United States Patent Application Publication US 2019/0348154 A1 - sequence listing, part 83

SEQ ID NO: 316179 - DNA, 2316 bp, Proteus mirabilis
atgtcacaatctgcaattaccttggcgtttgagcgctggaaagccagtgccaccgaagcacaacaacccgttattttagacgaatttgtgttagcaaatgtgccgaacttggatccatctaaacccattgaccgtaacgagggggtgcctgatgcgaaatatattatgcatcgacaagcggtgaataaaacgggcgtcgtcaatcaaaatgcagtggcgtattcagtcacgattggtgcagaagtgggtgattttgattttaattggattggcttgttaaataaacaatcgggcaccgtggcgatgattgtgcacgcacctacccaacgcaaaattaaaacccaagcagggcaacagggcaacgtgttaacccgctctttcttgctggagtatttaggggcaagtaaagaaacggccattaccacccccgccgaaatgtggcagattgattttaccgcccgattaacgggtatggatgaaatgcaacgcctgattaatcgcgacaaatatggtgtcgcttccttttttagtaatggttttttagtcgctaaagcaggtaatcaattttatgttacgaaggggttagggtatatcgaaggcttgcgcgccgagcttgtagaaaataaaaatatcacggtaccgaatcaagcaaccaaagtttgggttgatgtgagttatcaggggaatattaccagtgattgggatgtgcatatctcaattgcggtaaaacctgattttaaacattacaccgataacgcaggtttcccgcattttgtgtttgcggtggcgtctatttctgcaacgggcgttatcactgatttacgcccaaaaggcacgctcgatgcacaaaattttaatgatgcattgaaaaaacatgaacaatcacgtaatcatcccgatgcgacaaccgcagtaaaaggttttacaaagttagataatcaggttggtgacagtcaaataactgcattaaccccttacggtgctaaaaaagaattagaaaactatcaacccaaaggaaattatcaacctgcagggagttatgtcaccacttctacatttactttagaaatcaacaaaaaaattgataaagccaacatttctcaacagcttgcgaatgacgttaataaagtgccaagtttggatttgttaacaaaagaactaggaaagaagcaagcgtcgggaaattatgcagataagtctaaaacagccattcaattgttttctggcggagtgagggctccttatgttgatgctattcaaggggagttgtatgtaggattacgtgcattcaatgagactccctctctttatatatcaaataagggcattggatataatatttatataccttcagtaagtggtacgcttgcattagagagttacggatattccaagacagaatcagataataaatatcaaccgaaagggaattacgcggataagtcattaagcaatgaccaaatttttactggctcagtttcttcgcaactaaacatatcatcatcttcaacaaattcaacattagcactcgacacaacgaaaacataccctcgattatcgcatagggttgcttctggctattggagagagattaaaattccagatagatcaggtgaaatgtcgcttgtaggagatagttatacaaaagcagaaagtgagggacgttatcaatcaaaaggagattatgcggataaatcttcccgcaccccgcaatattttaatgggggaattgtttcttcgggtgatgtaggttcgagaacggatacatttgagctatttttaaaaacagaccaaaaaccctcattattacataaatcagaggggatatattatcggtcaacacttccacaaaaaagtggcactttagcactgctcagtgatattgaagaagccaatatttacccatggggtgttttaattccttggtgtggtgccactgctcccaattgggcattagttgctaacggtagtacgtttaataaaacaacttactcaaagttaggtcaattttttcctagtggtcgattacccgatgcacgagccaacgtgttacgaggtttagatgcggggcgcggtatcgatacaggaagaaccattttatcggaacaaatggggaacagtttgttatccagtaatatctttgggggattaggtgctgaaggggataaaaattggcgtagagttatagattatattggaatttcgggtactgataacgacggggggtatggagtctatcagcaaaaagaaggggttaacggacaagaaacccgtatgagaaatacagcagtactatggatagtgagagcaaaataa

SEQ ID NO: 316180 - DNA, 492 bp, Proteus mirabilis
atgacccgactacaaaaactgaccgcgttcttacgtgcaaatttgcctgaatctgtgtttgctacggaatttagtagcgaaatggatgaagtggtcttttcaatggctcatgacgatcaaggtgaagatgaagcaggcaaaaaacaatatcaaattcttacgcaagaatatgacgctgtgattgcttgggggcgttggccatatcgtgaaatcgatgtgcgctatatccctgtattgattgaagcttggcgccaagagttagaaacggattttaccgaacctgattttgatgaagaaccgccaaaaatggatgtcgatgtgattgatgattacattgccgtagttgttgtcaccattaagttaagcgacgccattgtgttaaaagaagatgaaaacggcattgtgccatttgatgggaagcgttggtcactggcaaatccagaagtgttgtttgctgaaaatatcgacgtaattcccaatggtgtgaaatga

SEQ ID NO: 316181 - DNA, 435 bp, Proteus mirabilis
atgagtgtgaaaaaaataaaactgacgttagatttattggctcgcctgtattttaagcaagtcagtgttttgtccgaaagggtaaatttctctcatgcggagtatttttctttagaatcaattttgaacgcattattaacagggaaaaataaattcttcattggagatgaatgcgaggttaatcatattttagattgtttttgcgatcatcttggtattgaaaatacaagtgttaggcgatttgtcttggaaggtgcaaaattttattttgttagtcatgaagattttaaaaagccattatttggcggtctggcgggggatgtttattatgcaatacctcaacaaccgaatgatatcgaagaatatttaattgattcattatcatgccatacccgatattacgtgacgaaatatcaaggttcacacaataagtaa

SEQ ID NO: 316182 - DNA, 402 bp, Proteus mirabilis
  misc_feature (55)..(64): n is a, c, g, or t
atggtttacaactgtctcttatacacatctgacgctgccgacgaagaggatagtnnnnnnnnnntaggaataaaatatatcccacatgaaatactttttttacttatagggttcaaatatattcttttttctgcaggactagtttctttttacactggtttaatgagcttatcttcattgaaacaagctggtattgatttcactattttccaatgtacaaatgcttttacagcaatcattgctactctattaggcacttggacagcggagaactggtcttatcattttgtttttgcaatatcatctatttatacttttatcgcagtactaatttccattaaattaataaaaaaacgccttaaactaaatatttcatcaaacaattttgagcaatatgtataa

SEQ ID NO: 316183 - DNA, 255 bp, Proteus mirabilis
atgacctctccttctggactaagtattcctgaagggatgattatattagtagatcccgcagtagaggttgttagtggcaagctagttgtcgctaaattagaatctgaaaatgaagttacatttaagcagtacatcgtagatgcaggcaaccattacttaaaaccattaaaccctcaataccgcttaataccaatcaatggaaattgtaaaattgtgggtgttgttgtggatgccaaaatagctcatttaccataa

SEQ ID NO: 316184 - DNA, 405 bp, Proteus mirabilis
atgctaattactatttcaccagctaaaacactggatttcgaatcgcctttagcaacaacgcagttcacccagcctgaattgctaaaatattcccaacaacttattacagaatgtcgaaaactgtcgtccagtgatatcgcaagcttaatgaaaattagtgataaattggcaggactaaatgcggctcgctttggtgaatggcaacctgactttacacccgataatgcgcgacaagccattttagcgttcaaaggtgatgtttataccggaatgcaagccgctgaacttttcacagatgacgactttcaatttgcacaacagcatttacggtttatatggcgtattgcgcccactcgatttaatgcaaccttaccgcttagagatgggcataaaactgaacaataa

SEQ ID NO: 316185 - DNA, 225 bp, Proteus mirabilis
atggatgcacaactgtataaagagtttaaaattatagaaaaagcgttttggtcagagatatgtgaaaacaatattcgtattggtgatcatacccactgctttatgacaccgatggacgcgcctatttttaattttatctatcttcgtcaaggcgctagcaagtacgctgttctcctcgcaaaaaaaaggtcacatgctggttctgccggaatctctgttgcctga

SEQ ID NO: 316186 - DNA, 1023 bp, Proteus mirabilis; identical to SEQ ID NO: 305051

SEQ ID NO: 316187 - DNA, 1827 bp, Proteus mirabilis
atgaatgtaaaagagatcattcgtcatgaaccatttggaacattactcggttatgcacctggtggtgttgcgatttactcttcagattacagcagtatagataaagaagattatgccgccaatgattcattccgtagttatattggtaatgagtatatggggcataagtggcaatgtgttgaatttgcacgccgttttctctatttacattacggggttgtttttactgatgtgggaatggcctatgagatcttctcgttacgtttcttacggagaacgattgatgacgatattttacccttgcaagcttttgcaaatggcagtaaacagccaccaacggtaggagcgttgcttatttggcaagaagggggagagtttaaagtcaccggtcatgtggcggttattaccgaagtattagaagataaaatccgtattgcagaacaaaatgtgatccacactaggttaccgcgaggtcaacaatggacacgagagttaccgcttaaagtgagtgataatggctattttatcgaagatacctttgataataccaccttgctaggttggatgatccaaacagaacctaatgcctacagtttacctcaacctaaagttgcccctgaattgttagctattcatgaggccaaattagccaacaaggggcaatttgctggaaaatggctagatgaaagcgatccgttagaaaaagcctatgtgctagcacagcacggtcatacgattaatcaagacagctatgaatatttcactatttcagaaagtgctgagcatgaacttatacgtgctagtaatgaaatgcatttgatgtatttgcatgcaacggaaaaagtgctgaaagacgataatttactgcgtttatttgcgatccctgaagtgttatggccccgtatccgcctatcatggcaaaatagacgtcatcaaatgatcactggacggttagatttttgtatggatgagcgcggtatcaaggtgtatgaatataacgctgattctgcatcttgtcatactgaagccggattaattattgaaaaatgggctaaacagggtggcattaaagcaggttataacccgggtgaacgtctattagatgcgttatcagatgcttggaaacacagtgatgcgaagccatttgtacatattcttcaagatgatgataatgaagaagattatcatgctcgctttatgcaacaagcactgactaaagccggttatagcagcaaaattctgcgtggactaaaagagctgcattggaatagtcgtggtcagttaattgatggcgataaacgtattgttgaatgtgtatggaaaacatgggcttgggaaaccgcgttagatcaactaagagaagagagtgaacaacagtcacttattcctattcgtattggtgatccggcgggagaagttcgtttagttgatgttcttttacgccctgaaatcacggtttttgaacctctttggacacttattccaagtaataaagcgatattacctattttgtggcaacttttcccagataatccttatctacttgatactgagttcactttaaccccacgtttgtcgcagagtggttatgcagttaagcctattgctgggcgctgtggtagtaatattggtttagttgatcaccaagaaaatgtattaggtgaaaccagtggtcaatttgaacatcaagaaaatatttatcaagagttatggtgtttaccaaaagtgtctaaccgatatattcaggtttgtacctttacggtagatggacattatggtggttgttgcttacgctctgatccgacactgtctcttatacacatctga

SEQ ID NO: 316188 - DNA, 243 bp, Proteus mirabilis
atgccagctatcaaagtgatgactgatgagcgtaaacggaagctaagaaatttctggataaaatttaaattcaatcaagagcgctgggagaattatttatcgtatattgccagtaattgtcgatggatgatggaggatcgagataatgggcgaggagggacatggcgacgtaaaaatttagattatttaattacggaacgttgttatgttgctgtcaaagaggagcgtgctaatgacaaatga

SEQ ID NO: 316189 - DNA, 369 bp, Proteus mirabilis
gtggttatctttttctcaattattaactgttcctatttagtcttttctacggtattgaaagcttatttttctgaaactttatcaatatcagcaaagcctaaaatattttcactaaactatacttttattaatatcgggtggacggttggcccacctattggcacattattattaatgtatggtactcaattacctttttggttagctgcaatatccgccagtattcctttatttatgatccaatgttttgtgcaacgttcagtggtagaccattccacagaagaaaatagtgtaaagtgggatccgaaaataatgctaaaagataaagcattaggctggtttgtgctttcaacttttttggcacattaa

SEQ ID NO: 316190 - DNA, 1266 bp, Proteus mirabilis
atggacactcatgaaataagcagtaaaaacatggccctaaaagaagatgtttctatcaacaccacttctaaaccaaacagtccgaaacactatatccagcgtgatgacgcgctttatataaaagtgacagtgtcattttttatggttggtttagccacttttgcattactctactttgtgcaacctatcttacctatcctatcaaaagaattttcagtcacccctgcaaccagtagtcttgctttatcgctttctacaggtcttatggcttgtggtctattgattacagggcctctttctgatgcgtttggtcgaaaaaatgtgatggttattgcgctattttgtgcggcttttttcacactattaagtgccatgatgaatagctggacgggaattttaattacacgagcactcgtagggctatcacttagtggtgttgcagccgttgcgatgacctaccttagcgaagagatccatcctgcttatctagccttatcgatggggctttatattagcggtaactctattggtggtatgagtggccgtgttattactggtgttttgagtgattattactcttggcgtgtgtctgtgattattttaggtatttttgcccttgttgctgctatcattttttggcgaatattgccgacatcacaacattttaggccagcaaccttaaaaccacgtaatcttcttatcacaactaaattgcattttagagataaaggactccctcttctttttattgaaggtggcttgttaatgggagggtttgtaactttatttaattatattggttatcgcctattagatgcaccttattcattaactcaaacaaccgttggtttaatttcaattgtttatttgagtggaacttatagtgcatcgaaagcaggcttattaaccaataaatatggattaggtaaagtgtttattgccggtgtttctatgatgctagcgggtatattaattacactatttgactctctagcaattatttttataggtatgcttattctaactacaggtttttttgctgcccatgcggtagcaagtagttgggttggacgtcgagctaaacgaggacgtgcgcaggcctcttctctttatctatttacctattatgcaggctcgagtattgcgggaacactaggtgggatcttctgggtcaattttggttggcttggtgttggtttgtttattgcttttttaatgttaacagcactattaatcgcactgcgccttaatcaaatagcacaataa

SEQ ID NO: 316191 - DNA, 687 bp, Proteus mirabilis
gtgttaaaaacaattaatatacagcatatcgaccttgcacatatatcagaccagaaactgaggaatatgttcgctaagaatctctatgactttgacaataagtttacacttgatggttttaattattttagtcttgagaaagttaggttaagtagaataaaaaccatacttgaagatgatactgatgagttgaatagccctcatttcgatttaagctcagatttcgatggcgatgaggaagatgaaaattcacaaggaatgataagtaaaaaggaggaaaataaaaaagatgaacacaataaggtatttaggcttaataatgcatcttatgacggacattctttagttgacgctaagcagattgaggagttgtgtgatgaaggtttctatagaagcttcataaggtggaaatcacgaatcacctcactaaataacaatccggttgttacctttgaaataggatttgaggacaagcatttttgccgtgaaattaagataagaatacttcataaacaatattcatattcagggaatgataaagaaaaaattgagcctcatgagtttgatcagattataaaatccttagaggatagaatatttaatgcaaacgatttaattatagaagaactggcaaagcaaacaccatcgccaattaagatcttaaaaaaagatttggaggctgagtaa

SEQ ID NO: 316192 - DNA, 351 bp, Proteus mirabilis
ttggcaaagatacggctatataatttctccatcccttctcaattaaaacactatatcgattttattgcgcgtgcaggcgaaacttttaaatatactgaaacagggtcagtcggattacttgaagataagcaagttattgtattaacgagtcgtggtgggatccataaaggacaaccctctgatttaattattccatatctaacacaatttttatcatttattggtattaataatgtacagtttattctcaccgagggtactgcgctaggcgaagaatatgcccagcagtcacatgctcaagcacaaaaagaaatagatttaataattaataaagaaataatgataaaataa

SEQ ID NO: 316193 - DNA, 198 bp, Proteus mirabilis
atgaacaagcttcttgtactaaaatccagtattttagaaaattactcgcacagcaataaaatggctgactatctaatagaaaattggcaaaagcatcatcaaaatgatctcattaccctacgtgatctggcaaaagatcccattcccattttagatcaagccatattatttgcttttggcaaagatacggctatataa

SEQ ID NO: 316194 - DNA, 186 bp, Proteus mirabilis
atgaagcaggcaaaaaacaatatcaaattcttaacaaaagagaagatgggttcttctaagaaaggtattgataaaaagactgcttttttaaacaaaaaagcaaacttatttttatcatttttatttattgtgatattgattatcatcaacattactcaaataaagagtagaattggtgggaaataa

SEQ ID NO: 316195 - DNA, 678 bp, Proteus mirabilis
atgaattacgttaatatgttgttttttgatatctacccctatattgctggtgctgtttttcttatcggtagttggttacgttatgattatggtcaatatacatggcgtgcaggctccagtcagatgttagacaagaaaaacatgcgacttgcttcgaacttattccatattggtattatcggcatttttgcaggtcattttctggggatgttaacgccacactggatgtatcaatcttttctaccaattgaatataaacaaattatggcgatggttggtggtggtacttgtggtgtgttaatgctgattggcggcattatgctgttaaaacgtcgtttgacgaatgcacgagtaagagcaacatcgtcatttggtgacatcatgatcttaaccttgctggttgtccaagttgcactcggcttattgactatcccattctctgcacagcatatggatggtagtgagatgatgaagctggtggcatgggcgcaagctattgtgacattccatggcggtgcttcggcaaatcttgaaggtgttgcacttatttttaaattgcacatattcctaggtatgacgatttttttattgttcccattctgccgtttagttcatatttggagcgtgccaattgagtatctaacgcgccgttaccaaattgttcgtaatcgacactaa

SEQ ID NO: 316196 - DNA, 1554 bp, Proteus mirabilis
atgaaaattcgttcacaagtcggtatggtactgaacctcgacaaatgtatcggttgccatacctgttcagtaacctgtaaaaatgtttggaccagtcgtgaaggtgtggaatacgcttggtttaataatgttgaaactaaaccgggtacagggtatccccaaaattgggaagatcaagagaagtggaaaggcggctggatcaaaaatattaaaggtaaattagtaccaagaatgggtaaccgtgttgggctattatcaaagatttttgccaacccagatgtgccagcattagatgattattatgagccatttgattatgactatgagcatttaaaaaatgcaccagaaggctcattacccaccgcacgtcctcgttcgttgataacaggtcagcgtatgaccaagatcgaaaaaggcccaaactgggaagatgatttagggggcgaatttagcaaacgtgctgcggataaaaacttcgccaatatgcaaaaagagatgtatgggcagtttgaaaatacatttatgatgtatttacctcgtttatgtgaacactgcttaaatcctgcttgtgtcgcgacctgtccaagtggtgcgatttataaacgtgctgaggatggtattgtgcttatcgatcaagataagtgtcgtggttggcgtatgtgtttaacagggtgtccatacaaaaaaatctactttaactggaaaagcggtaagtcagaaaaatgtattttctgttatccgcgcatcgaatcaggtcaaccaaccctatgctcagaaacctgtgttggacgtattcgttatcttggtgtgatgctgtatgacgcagataaaatttcacaagccgccagtgctgataatgaaaaagacttataccaaagtcaattagatatctttttagatcccttcgatcctgaagttattaaagctgcagaagagcaaggtattccattaagtgtgattgatgcagcccaacgttcgccggtttataaaatggcggtggattggaagctggcattaccattacaccctgaatatcgtactttacctatggtgtggtatgtgccacctctgtcacctattcaatctgcggctgatgcaggagtgttgccacatacgggagtattaccggatgtagaaagtttacgtattcctgtccaatatttggctaatttgctgaccgcaggcgatacagcgccagtgttattagcattaaaaagaatgttggcaatgcgccattataaacgcgcagaaacggtagaaggtaaaaccgatttgacagcattagagcaagtgggattaaccgaagcacaggcacaagagatgtatcgctatttggcgattgccaattatgaagatcgctttgttattccttctagccatcgtgagttagcaagagaagcttttcctgagcgtaacggctgtggttttagttttggtgatggttgtcatggcagcgagagtaaatttaatctgtttaatagccatcgtattgatgccatcgatatcacttccaaaacccctcaagatgagcgccgttctgaggagaaaatatga

SEQ ID NO: 316197 - DNA, 1830 bp, Proteus mirabilis
atgaaaatgcacaacattcaatggcattatcgcttttcaattattaatcaaatcgctattttaatgttgcttttcacactatttggtgtggtaggtatggctatttctaaccacattattttaagcgtacaaggcaatgcccacgccattaataaatccggctcactgcgcatgcaaagctatcgtttactctcagccttaccccttgatgataagcaccgtgattatctacaagaattagaaaatgatttagatagtaaagagttacgtcaagtattaagcacctcatcactgcaatcacaatatgtacaactgactcattactggaaagagacattaaaaccgactttgtcagcagccaaacagcctaatgatgcgaaacaagaagttatcttttttgtttctcaactcgatacattagtatcaagtattgaccaacttactgaacaaaaaatccgcctagtcgcttatactcaacttatctttaccgctcttaccttattactgctgtttggttctgtttggcattttcgtcgtcgcttattactgccttggcaacaattgatgtccatggctaattctattggacatggtgatttttcaactcgttttcggcctcgtcctcaccatgatgaaattgccacactaggaattgcacttaacaccatgtcagaagagctatcgacgctctacagtgaattagaacaacgagtcattgaaaagacccatgatttacaacagaaaaataaggttctctcttatctttatcactcaagtcaacaactgcattcccaagcgccactttgcgctcgcttaagacagatccttgcagagctacagcatattattcctgatagctatttgcagatccgtctatatgaagataatcaacatacattatttaatgagataagcttagccccttcctcacgccctgaatattgtccaacgccagactgtgagcgctgcaatgaagatgccagcatcactacaccgttaaataatcgcttattacattgggaattgaccgatcagatccatcgctacggtttattcgtaatgcagttaccggaaaatagtgtacttactgacgaacagaataatttaatgctcttattgactaagcaaatttccgcaatgcttgccatggagcaacaaaatgaacagcaacaacagctattattaatggatgagcgttcagcgattgcacgtgaattacatgattcgattgctcaatcgctatcatgtttaaaaatgcaggtcagttatctacaaatgcaatcggaaaccttgccagataactgtcaaaaactactaaaagagatgcgagaagagctaaatgtggcttatcgtcagttaagagaattactgaccacatttcgcttgaaattgacagagcctggcttattagccgcattagaaaatacactaaatgaatttaatcaacgtttagggtttgctatccattttgattatcagttacctgcaaaatgtgttaattcacatcaaagtattcatgtggtgcaaattgtccgtgaagcattaaataatattctgcaacatgcgaatgcaaactgggctgaagtcgcattaacacttaataatggcatcgttgaactgcaaattaatgataatggtgaaggtattacgcctaatcccgaaaagataaatcactacggactgattattatgcgtgaacgcgcgaatagtctgaatggctcttatagtataagggttcgcaaagaaggtggaacgcaagtatttgtcacatttccgttaatcactacccataaagatcctatcgaaaagggagcaaatcataatgaataa

SEQ ID NO: 316198 - DNA, 663 bp, Proteus mirabilis
atgaataatatgggagcagtcgcagacaaagcgactattttattaattgatgatcacccgatgttacgcaatggtgtgaaacaacttttaagtcttgatacaacattaaccgtcgttggtgaagctggcgatggtattcaaggggtaaaattagctgaagagttagatcctgatttaatcctactcgatctcaatatgccgggtatgaatggttttgaaacactcgatcaattgcgattacgatcgctctctgggcggatcgttgtgtttagtgtatcaaactacagtgatgatctgatcaccgccttaaaacgaggagcggatggctatctcttaaaagacatggagccagaagagctattagccgctttaaagcaagcagccgcagggaaaatggtggttagcccaacattaacccccattttagcgcagtcactgcgagaagatcgttctgaaggtgagcgggatatcgaccaactcaccccacgagagcgtgatattttaaagctgatagcacaagggctatccaataagatgatcgcacgtaaactcgatattactgaaagtaccgttaaagtacatgtcaaacatctacttaaaaagatgaaattaaaatctcgtgttgaagtcgcggtttgggttcatcaacaacgtgtggattaa

SEQ ID NO: 316199 - DNA, 231 bp, Proteus mirabilis; identical to SEQ ID NO: 310225

SEQ ID NO: 316200 - DNA, 498 bp, Proteus mirabilis
atgcaacaagaagaaaacaacacacaggcaacccaagccgaaatacgtcgcaaacgtaaaatttcgactttttggttactccctgttatcgctatttttattgcgagttggttgcttttccaacactggcaagaaaaaggcgtacaaatcaccatcgattttcaatcagcctctggtattgtttcagggagaacacctatccgttaccaaggtgttgatgtaggtattgtacaggacgtgacgctcagtaatgatttacgccgagtcattgttaccgctgatattcgaaaaaaccttgctaatgcattacgtaaaaatacgcaattttggcttgttaccccaaaagccagtctttctggtgtttcgggattagatgccttagtgggaggcaactatatcagtatgcttcctggagatgggaaaagcagtttcaatttgttgctcaagaggttcgtcctaaagccaacattgataaaaaccaacaaattatcaccttaa

SEQ ID NO: 316201 - DNA, 897 bp, Proteus mirabilis; identical to SEQ ID NO: 190877

SEQ ID NO: 316202 - DNA, 321 bp, Proteus mirabilis
atgaaaaagaaagttatgttaaaaatgatgtttcctgtcagcattatatcacttgcgctgacctcttttctttctcatgcggtaatacctccagaaggtactcttcttgcgaaacaacaagatattgttattaataatggcactgaagtttcctcccttgatccacataaagtggaaggggtaccagaaagtaatattattttaaatttattagaagggcttacttatatggggcctaatggcgaaagtatgccgggggttgccgctaaatgggagagttcagaagacaataaaacatggactttctattttacgcgatga

SEQ ID NO: 316203 - DNA, 285 bp, Proteus mirabilis
atgtctcaattagacggtaatgctatttcgcaaattcaaaatatggcggtggcttcattaagtctcgaagcaatagagaaatctctttgccccgccattgttcttccaaatgaatttaaagtgagtagtttggaaaatttacaagaaggtcgcttccgtttccgtggtgaaatgaaaacaaccagtatcagtgactttgttaaatactcaatcaaaaatgcaattgatgaaggtgttagctgctttattgatgccgatgaaatgagtgccaaaactattttttaa

SEQ ID NO: 316204 - DNA, 291 bp, Proteus mirabilis
gtggctgataatgaaattgtacaacgtgcaaaccaagatgatttggtgatcactgccgatattcctttagcggctgaagtgatcgaaaaaggggctattgcactcaatcctcgaggtgaacgttatacagagtcaacaatccgcgaacgattaaatattcgtgattttatggatacgatgagagcaagtggcattcaaacaggaggaccggcaagtttatcacagcgcgaccggcaactttttgctaatgagttggataaatggttactacagcaaaaacgtaaaaaataa

SEQ ID NO: 316205 - DNA, 1767 bp, Proteus mirabilis; identical to SEQ ID NO: 292231

SEQ ID NO: 316206 - DNA, 861 bp, Proteus mirabilis
  misc_feature (795)..(804): n is a, c, g, or t
atgtctcagagcaatgttgaaattggtgatgaagttcaaggctggctcagtgatcatcactataaagaagggttctataccgatatctcaaccgatacgttagataaagggttgaatgaagcggttgtgcgagctatttcagctaaaagaaatgagccagagtggatgctagagtttcgtcttgatgcttatcgtcattggctagagatggaagagcctcattggctaaaagcagattatccatcgctgaattatcaagattatagttattattcagcgccatcttgcggtgcttgttgtgccaatggcagttgtgctagtggtaacaatgaagctgtctcaacacaagaaacccaagattatttaactaaagaagttgaagacgcatttaatcagttaggcgtgccagtaagagaagggcagtcagtggcagtagatgctatttttgactcagtatcggtttctaccacttatcgtgaagagctagctaaacatggtgttattttctgctccttcggtgaagcgattcaagaatatcccgaattagtacgccaatatttaggtacagttgtttctagccacgataactattttgcggcacttaatgcggcggtcgcttctgatggtacctttgtttatattcctaaaggtgttcgctgccctatggaattatccacctattttcgtattaatgcggcacaaacaggccaatttgaacgtacgattttaattgcggatgaaggaagttacgtcagttacatcgaagggtgttcagcacctgtacgtgatagctannnnnnnnnngctatcagctgcatgctgccgttgttgaagttatcattcataaagatgccgaagtga

SEQ ID NO: 316207 - DNA, 327 bp, Proteus mirabilis
  misc_feature (212)..(221): n is a, c, g, or t
atgaaaacattaggcgaatttatcgtcgagaaacaacaagattttccccatgcaactggcgaattaacggcattactgtcagccattaagcttggggctaaaattattcaccgtgatattaataaagctgggttagtcgatattcttggcactaacggtgtttctaatgttcaaggtgaagcccagatgaaactggatctttacgcgaatgnnnnnnnnnncagcttaaagctcgtggtgaagttgcggggatcggttcggaagaagaagacgatatcgttatctttgaaggtgatcgtgcggaaaatgccaagtatgtggtattaa

SEQ ID NO: 316208 - DNA, 279 bp, Proteus mirabilis
  misc_feature (209)..(218): n is a, c, g, or t
atgaatagacggtatttgttattactatttttatgttgcttacttcctttattaaacggttgtaaggatcaatcactgctcactaatttaagtcaaaggcaagcaactgaaattcaagcggtgttacagaaacaccaaataacaagtactcgtactgcgttaggaaaaggattatttgagatctcagttaaaaaggaaaatatagggannnnnnnnnnatatagggattgctattcaaatattagaagaatatcaattaccaacaatttctcgtattga

SEQ ID NO: 316209 - DNA, 1401 bp, Proteus mirabilis
ttgggcttttttagcttttacgcgagcaatagcagcagccacagccgctttacgcggatcggtttccacctcagcctgagcctcagcaggagtgtctatttctgcagttgcttgcgcttgttgagctttcttagcttttacccgagcaatagcagcagcgacagccgctttacgcggatcggtttccacctcagcctgagcctcagcaggagtgtctatttctgcagttgcttgcgcttgttgagctttcttagcttttacccgggcaatagcagcggcgacagcagctttacgcggatcggtttccacctcagcctgagcctcagcaggagtgtctatttctgcagttgcttgcgcttgttgagctttcttagcttttacccgagcaatagcagcagccacagcagctttgcgcggatcggtttccacttcagcctgagtttcagccggtgtgtctacttttgcagttgcttgtgcttgttgagattttttagcttttacgcgagcaatagcagcagccacagcagctttacgtggatcggtttccacctcagccggagattcagcgggtgtgtctatttctgcagttgcttgcgcttgttgagattttttagcttttacgcgggcaatagcagcagccacagcggctttgcgcggatcggtttccacttcagcctgagcctcagcaggagtgtctatttctgcagttgcttgcgcttgttgggcttttttagcttttacgcgggcaatagcagcggcgacagcagctttacgcggatcggtttccacctcagcctgagcctcagcaggagtgtctatttctgcagttgcttgcgcttgttgagctttcttagcttttacccgagcaatagcagcagcgacagccgctttacgcggatcggtttccacctcagctggagtttcagcgggtgtgtctacttttgcagttgcctgtgcttgttgagattttttagcttttacgcgagcaatagcagcagccacagtagctttgcgcggatcactttctgcatcggcggtggtatgggtattttgtggtacctgttgtgccaatttagcagcttgttttgctcgggcttcttctttacgttttttgcgtgcagcaatagccgctgcgttgtcaggttgttctcctgctttaacagcaataattttgccaatgctatgtttttcttttacacgagaaagtgcagattgcacttcattttgttgatgatcatcaagcttaactgcagcacgttgatgtcttgcctcacgttcaagcttttctcgttccatacggatttttttcgcttcaaagcgtgccttagcttcagccgctcgcttagcttccgcatcaatttctcgtatttctgctttttcttggcggtaatattgcactaa

SEQ ID NO: 316210 - DNA, 222 bp, Proteus mirabilis
atgaagcctaacgacttttcaggtccttccggtaaatcagagataaattgtttgtttttatcaataagtgtcgtgacatcaacaaagcttcctgattgtcctgtggcacctaatgccttacagttaaccagtggcttcatttgttcaacggtatcacccgctttaccaaatttcacaatagtgcccgcgggaagcatggcgtattctggcgatgttttttga

SEQ ID NO: 316211 - DNA, 504 bp, Proteus mirabilis
gtgttggcatcgatcgcagtaggtaaagaaacacgccaaattcgtaaaaatacccgcattaaggcatcacttcctatcactttacattttgatgatggcgctgaattacaaactaccaccgaagatatttctatggggggagtgcgtattgcgattaataaaatagctgaattacgccagcgtaccgttaatagcattacgttaatggtgcaacgtgatgttgttacgcttcctgtggaaatggtcagtttagaaaatagccagttacgtctcgcttttttaccaatggatttaaatctacgccgtaagttagtacgggtgatctttggtcgagcagatgcttgggttcatcaaacacaatatcaagacaaaccattaaaagagttaggtgctatcactggctgtatttttgagttgttctttggtcgtcgtcaaaaagtaaaagcaccggtaaaaagagcaaaaacctctctctctgtgcaatctattaatggggatgactag

SEQ ID NO: 316212 - DNA, 1611 bp, Proteus mirabilis
gtgaccttaccttttgttaaaaaaagcatactcgcggggatcattgccacgtcatgtttaagccttccaatatcagcccatgctggtggcacacctgaaaaaccgaatgtactgttaatcgtaatggatgatttaggcacaggacaacttgattttgtactggataccttagatgtagatgcgttagctcagcgaccaacacctcctcgttataaaggtgatatcaataaaatgatagaagccgcacgtattgcgatgcctaatgtcagtgatatggcagaaaacggtgcaaaaatgactaatgcatttgtagctcatcccgtttgtggcccttctcgtgcaggtatctttacaggacgctcgcccgccagttttggtacttacagcaatgatgatgccattttaggtataccccaagatatcaaattgttaccttcacttttccaagaaaatggctataccactgccagcattggtaaatggcataatgcaaaagttatccgtaaaccgaaaataaatgaaaataaacaaacccgtgattatcacgacaatatgatctcaacccctgaagcgggttatgcgcctcatgagcggggctttgattacgcctttagttattatgcatcaggtgttgccttatggaattcgcctgcattttggcgtaatggtgtcaatgttcctgctccgggttacaccacccatctattaacggatgaaacactaaaatttattgatgaacataaagataaacctttttttatcaatctttcttatagcgttccacacataccgttagagcaagcatctcctgctaagtatatggataaatttgatacagggaatgtggaggcagataaatattttgccgccttaaatgcagcagatgaaggtattggacaaatcattgcgaaattaaaagaaaatggtgagctagaaaatacattaatttttttcttatctgataatggtgcagttaatgaatcccccatgcccatgaatgccatggatagaggctttaagggccagatgtttaatggtggagttagagtaccttttattgcttatcaacccggaactattcccgcgggaacaaaaagcgatgcgatgatctccgcacttgatattttgccaaccgcgttacaagtcgctgatattcaaattcctgatagcctgcaagtagaaggtaaaaacattatgccattgcttaaaggtgaaacaacgcgttcgcctcatgcttatctgtattgggcaggccccggcactaagcattatagtgaagaaaaccaagagttttggcatggttatcatcaatggatcacctatcaacgtcaaacgcctccagtaaaccctaacttagagaaactgtctaaaggtgcttgggcagtgcgtgatggtgaatgggcgctctatttttatgatgatggtaaaaatcaaccacagctttttaacgataacaccgatcctggcgaatcaatcgatttggcaaaacaaaatccacaaaaagtggctgaactaaaaaatgcgtattaccagtggatcaaagataaacctaaacctgttatttgggggcaagatcactatcaaatactagtagattcagccaaaccttaa

SEQ ID NO: 316213 - DNA, 528 bp, Proteus mirabilis
atgcttaactctatcgcgactattttcacgatggatatttataaagaatatattgggccaaaatcctcagaaacccgcttagttaatgtgggacgtattagtgcggtgattgcattgattattgcttgctttattgcgccactgttagggggcattgatcaggcattccaatatatccaagagtacacaggtttagtgagtcctggtatcttagctgtattcttgttaggactattttggaagaaaactaatgccaaaggggcaattataggggttgtactctcaattccttttgctttattcctaaaattaatgccactaggaatgccattccttgaccaaatgatgtatacctttattttcaccgcggttgttattggtttggtcagcttaacctcaacgaaaagtgatgatagcgtaggggcgattgtattaactgatgcaacatttaaaacccaaagtgggttcaatattgcttcttatatcattatgatcatcctctgtgtgctttatgctgtattttggtaa

SEQ ID NO: 316214 - DNA, 342 bp, Proteus mirabilis
atggactcacctgaatttgcacaagatcctcatggcgacaggatactctttgattcccatatgagacgagcagagcccagaacccccgaacgttatagtgccaaactgcgtcgtcgcagttatagctactcattagggctaacgccgtcagggcaattagatatggggcttgtctttgtctcatttcagaataaccttaaaaaaggctttattgatacgcaaaagcgtttaaatggtgaaccgttagagcgctatataaaaccttttggtgggggttattacttcgtattacccggcgtcacacaagcaagcgatatattagctaaaggactatttacttaa

SEQ ID NO: 316215 - DNA, 273 bp, Proteus mirabilis
ttgaaacgcgtaaacgatgctgaaaaggcgattaaagagcaggggagttctcttttacctaaaggtattaaagaaattaaaggtgacttttctcgagggtgtgttatccgcattcaaagtttgcaaggaaaagatcttgctcatggtgtcgcgcattataatagtgatgcgctacgcttaattgcggggcaccattcgcaagagattagtcaaattttaggttatgagtatggcagtgttgcggttcaccgtgatgatatgattgtgagctag

SEQ ID NO: 316216 - DNA, 909 bp, Proteus mirabilis
  misc_feature (867)..(876): n is a, c, g, or t
atgaacaaagaaatagctttaagtcaccatcccattaatcagaaaaaaaataccacaaactctctatttcaactctcccttattacttcggcacttcttttttctggctatgctgttgcatattcagaagttggacaattaggtaataaacaaagttgggaaagccctgaatatcaaaaagactgggggcttgcagccatgaatgcctctagtgcttatgctctgggttttcatggtcaaggtgctaaagtcggggtgatggactctggtgcactgctctcacatcaagagttgagtggatctcgttttcatgcagtaaaagccaaaggtgaatatggctctacgggaatgcgctatccacaagaaatgggcggacattatgaaaaaggccaagtctttgatgttgatggtaattggatcaaaggggtgaatgatacccatggcacacatgtcactggtactgtgggggctaaccgtgatggtaatggtatgcatggtgtggcgtggggggctgatatttatttagggaatactggggcaacagacagcaataactatggcccttatcaagactatacctatttctatactggctggaaagcgatggtcgatgcgggtgcgcaagtgattaataatagctgggggactaacccgcgtattattaatacagataaaacagaggggcctgatggtggtaataccacgatacatatgcctgttaacaccacggcacagacagaatacgaatatttctactttaaaaaagtctatggtgataaaccttcctttgttgatgctgcttatgatgcagttaaaggaacgaatgttgttcaggtctttacaacgggtaatcgcgactttgctcannnnnnnnnnaccttattatcgtcctctttatccttattttaa

SEQ ID NO: 316217 - DNA, 297 bp, Proteus mirabilis; identical to SEQ ID NO: 312202

SEQ ID NO: 316218 - DNA, 222 bp, Proteus mirabilis
atgggggacggttctattctcgtaaaaacatatcatcgcactcatcctaatgcacctaaatttgcccgtaatgatattgatggttacaaagacggcgacccaattgatatccctgatggtcgttttatttccgttcgtgtacagatgccagagcaatccatctataatgtgagaatgcgtgagatggaagaagcacagaaagcggaagaaaggccccaataa

SEQ ID NO: 316219 - DNA, 210 bp, Proteus mirabilis
  misc_feature (195)..(204): n is a, c, g, or t
atgcgttttttaaaattaccttttatttattggctgctactcaattgcatcccatttattggctttgaactacactcaggcaatataaaacccggtgtttttttctatttaggtgccctaacgatcatcacttcagggatttggctatttttctgtctttacttttttatcaaacataatacataccctaacccnnnnnnnnnnacataa

SEQ ID NO: 316220 - DNA, 558 bp, Proteus mirabilis
atgaaatacgcattaggctctgtactttattattggcaaaaagaaacacttgagacattttatcagcaagcaaaacagagcgatgctgatattatctacttaggcgaaacagtctgtagtaagcgccgtgagactaaaccacaagattggattaatctggccaaagaagtggctaaaagtggtaaacaagtgatcctttctaccttagcactactacaagcgccttctgaactaaaagagatagcaaagctggtggataacggtgaatttttagttgaggctcatgattttggtgtgatcaatatgctttatgagcgtcatttaccttttgtagcaggccatggattaaactgctataacgcttatgcactacgtttattacagaaacaaggcatgatacgttggtgtatgccggttgaactgtctcgtgagtggttaaatattgttttactgctcgctcagaaaatcgtgctaaagatgattgtgaaacctgctgtcaaaaatacccacaaggccgtcaggtattatcacaagaaaaccaacaagtgtttgttttaa

SEQ ID NO: 316221 - DNA, 267 bp, Proteus mirabilis
  misc_feature (253)..(262): n is a, c, g, or t
atgtatcacgatcttcaaggaaaagttgctgtagtaacaggttcgtcacgaggaattggtgcagcagtagtgacgagattagctcaagaaggaatgaacgttgttatcaactatcactctgatgaaaatgaagctcaagcattagccgatagcttaaataaacatggtaaaggtaaagcgattatttttggcggtgacattagtgatgaaaaaattgctcataactttatttataaagcgattgaccactttnnnnnnnnnntctga

SEQ ID NO: 316222 - DNA, 135 bp, Proteus mirabilis
atgaaaaatgttgtcgccttaccccatattggctctgcgactaaagagactcgctatgcaatggctgaatgtgccgttgacaatctgattgctgcattaaccgataatgtaaaagaaaactgtgttaatttttaa

SEQ ID NO: 316223 - DNA, 141 bp, Proteus mirabilis
atgaaacaggttgccgttttattggctgatggttttgaagaaggtgaagcggttgtttttattgatatcatgcgtcgccttgatattcatgtagatggtactttcttgcatggatacactggtattaaacacctattttaa

SEQ ID NO: 316224 - DNA, 210 bp, Proteus mirabilis; identical to SEQ ID NO: 315529

SEQ ID NO: 316225 - DNA, 522 bp, Proteus mirabilis
atggttactgaaagtgccatgcgtaaggcttccaatgctcaagctatagcggaggctacaactactggcgccgcaattacaaatgctatggctccggcggcagcaacaaccagtattgccactatgggctctgccgccacatggggtatggcagcaatggcagcagctattcccgctatgattgcgcttgctggtgctcgtaaaaatggtggacccgtaaatgctggctctatgtatcgagtgggtgaaggtggtaagcctgagatattcaaagcatctaacggtagtcagtacatgataccgggtgataatggtcgagttattagtaatcgacaaatgggtaaaggtggtaatggtgtcagcatgggtgatatgcactttacattccaggttcaagcacctaatggcatcactcaaaaggaagcacaacagatacagcaaatggtgagaggtacggtttatgacgtacttggtaacgaaatgcgtagcggtggtgctttggaaaaagtaagaagttggtaa

SEQ ID NO: 316226 - DNA, 351 bp, Proteus mirabilis
  misc_feature (335)..(344): n is a, c, g, or t
atgccattgagagagaaaaagtatcaccaaaatcaagagagcattttattttttccaggtcagggtaggccttatttaggtatgggaaatagggtatatcgtgacgttccatcaataaaagaagtatggaattgtgcgagtgaaatagcagggttcgatgtaaggactgtttgtttaaaagggcccatgaataaattggtacaaacctgttatcagcaagtggcgttaacaactatcaatattgcttctctttatttactgcgtgagcattgttgcgtgaatgaggcgggttattcagggcacagcgctggagaatattcagcgttatttgcggnnnnnnnnnnaacttga

SEQ ID NO: 316227 - DNA, 549 bp, Proteus mirabilis
atgcaacagctcgctaagaataacaaaggggtaatgtatgttgttaaaaattgctcttatcagacgttatcaacattgattgaccagcaagatctcgcaacaaaggtgaatatttgctgtgataacagtgaacttcaccaagttattgggggggagtatgcaagtgtacgtaaggttgttaatcaattagctaatatgaaaatagaaacgaataaattagccgttaatggtgcttggcacactgaattgatgagcgaagggaaaaatttacttgctcactttttacagacaatccctttttcaatcccagataaacccctagtgatgaatgtttctgctgagattgttagcgatattgagacaattaaacagaatttagttaatcaactcacagaaaccgtaagatggacagcaactatggcgctatggtgtcatttaggctatcacaattttattgaacttggtgatagcaagtcattgtattatttagcgaaaaattcatatacgctaaaagataaaaatatattgcatgttaatgattatatttaa

SEQ ID NO: 316228 - DNA, 138 bp, Proteus mirabilis; identical to SEQ ID NO: 306682

SEQ ID NO: 316229 - DNA, 795 bp, Proteus mirabilis
  misc_feature (708)..(717): n is a, c, g, or t
atggccatactcactctccgaaatgttaaaagctattctgctgataaagatgtaaatatagatctaagtaagcctgttaccctcatttatggacaaaatggtgcaggaaaatcaacaatttcaagttttttttcaggttttcaacaagaaaaataccagcattgtcattttgcaagtcgtgaaaattttgcttattttgtatttaatcaggaatatatagaacagaagtttcaccaagaaatatatcaacctggtatttttacattgaatgagaagaatgatgacgttaacggtaaaattgaaagtaataagagaagaattactgaaataaacaacttactaaacactttggatacagagataaaaaataaaaatgatgcaaagtctactgttatcgaaaagtactctaaagttatttttaaaaaaactatcaatgatcggcaatcgttagattattttctagatagagctaaacgagtaaataatttttatcaaaaaatgagggaaacttcattaggaattcaaaaatatgagctggtacaacttacagagagactggagttgttacttaatagtgaaggaactcaatatacagagattattgaaccagaggtttatggcctatctgacgaaatgctgactctacttcaaagttcgttgacagcatcgtccgatacaccattttcagccattattcagcagttaggnnnnnnnnnngaacaggttatattaaagataatatttgtccattttgccaacaaaaatttgattctcagcatcttcttcatgaattga

SEQ ID NO: 316230 - DNA, 411 bp, Proteus mirabilis
gtgggatggcgggtctcatcatccatggaaacggcattcgtgctggatgcactggagcaggcgttgtgggcccgtcggccgtccggcacaatccaccacagtgataaaggttctcagtatgtatcgctggcctacacgcagcggcttaaggaagccggcttactggcatcaacagggagtactggtgactcgtatgacaacgcgatggcggagagcatcaatggcctttacaaagcggaggtaatacaccgtaagcgctggaaaaaccggacagaagtggagctgtccacacttacgtgggtggactggtataacaatcgacgattgctggaaaggctgggccatatcccaccggcagaagcagaaaaagcttattatgcttccatcggaaacgatgatctggcagcctga

SEQ ID NO: 316231 - DNA, 549 bp, Proteus mirabilis
ttggcggtaattgaaggtagctcaggtatcgggaaatcaacgctgttacgtgcgttaagcggccactggccttattttaaaggagatattcaacgggtaaccaatatcagttggctcccacaacgtatgtatctgcctgttgcccgcttagatagcttattggcttatccttgccaagcatctcagttctcacaacaagagtaccaagaagtgcttcattgggtggggctagataaaataaaaaatcagctttcactggaaacagattggacaacacgcttatccggtggtgaacaacaacgtcttatctttgcccgtttattactcaataaacccgatcttattttattagatgaaaccacatccgctcttgatgaacaaaatgccctacatatgttgttattacttaaacagcatctaccaacctcgggcattgtcttagtcagtcatcagcgtttcactcacgctattgccgagcaagtaatttcattacaagcgccgactgcgtcctcctctcaatcagctggagttactgaatatgtatcgtaa

SEQ ID NO: 316232 - DNA, 258 bp, Proteus mirabilis
gtgctaaaagcgcctgaagaagttcagctagcggctaatctttctgtgctacaagataagctagcccctctatttgctgaacgtaaataccaagaagcattagttgaactcgcctctttacgtgatgttgtgaataacttctttgataaagtgatggtaatggataaagacgaagaaattcgtatcaaccgtttaaccatgctacatgaattacgcgagttgttcttaaaagtcgctgatatttctgttttacaataa

SEQ ID NO: 316233 - DNA, 342 bp, Proteus mirabilis; identical to SEQ ID NO: 27125

SEQ ID NO: 316234 - DNA, 279 bp, Proteus mirabilis
atggatatccgtcatccattaaaagatctcgatatgcagatgattgattgggcggtggattcagagcttccgactctcgtcttactcactaaagcggataaattagcatcaggggcacgtaaaaagcagttaatggcggtacaaaatgcactgtcagaaaaatcaggtgatatacgtgttgaatgtttttcttctttgaaaaaaataggcattgataaattacgtaatacgttaaatgagtggtttactgatactaacgaaccagagacagaagcttaa

SEQ ID NO: 316235 - DNA, 372 bp, Proteus mirabilis
atggctatccctggaggtaactatattgttgcgatcgcattggctgtttttgcttttaccactattttaggttggagctattacggtgagaaatgtgtgcaatatctatttggaccgaaagccattatgccttttcgtattgcatggttaattgccttgccaattggcgcgactcaatccttagaatttgtttggttacttgctgatacattaaatgcgatgatggctattcctaacttaattgcattagcactgcttagccccatcgtttatcgtctaacaaaagactatataaaagatgttaatgcggttgatattgatctaaatgaacaagtgaattctgtaagcaaaaaagaagcagaagcggaataa

SEQ ID NO: 316236 - DNA, 993 bp, Proteus mirabilis
gtgagagaacgtaaagatagaaagccagaaggcaaagtctgtgtacttgggtcatttgtggtagatattattgccaatgtcgattcttttccaaaagtcggagagttaattaactctaaaagcaattcgataggtcctggtggtaaaggaacaaatcaggcaatggctgccagtttttctgatgcgaaagtgcatttaataacaaaagttggtgaagatcattttagtaaatatgcatataaatatttacaagaaagtggaattgattctttcactatttttcaaacagaaatagagccaacaggcagttcaattagttatttagcagataaaacacaaaacaatattacagcgacttatttaggtgcgaacaatacattctctgagcaggagattgatatttctttgccttatgtaagtgaggcagatgtgttattgctccaaggtgaaattaatatagaagccaatattaaagcagcgatgtttgcaaagtctgttaataaaattatcgtacttaatgttgcaccttatagcgaagatttaaagcaactttattccactcttgattttattacgttaaatgcaaatcaagcatcacactgggctgacattgaaataaacgatattaaagacgcaacacaagcgattaacgttatttcaggtgatgaaaataagaaagtcattatctatatggatgagcttggtgtggtctattttgacggacgcgccacttttcatattccccctatgccatcgttacgagtggatacgatggcagccacggatgcttttaatggcgcatttgcttcaaaaatagcggcaggaggcacaatgcatgagagtgtattatttgccagtgctttcctctctgcatttatagaacaaaaaggcgtaacagcaatgcctgtactttctcaggttcaggctcgccttaaatcaaggctcgaagatattcgaccacaaataatctgcaatgagaaaaggtgcatataa

SEQ ID NO: 316237 - DNA, 345 bp, Proteus mirabilis
atgagaacattttcaatcgataaaaataatgatctctttatcggccctgatggaaacctccaattcagcgaaaaagacgatgcggttaaaaacctttgtcagcattttgccaaggctgtgcgtggtgaaatgttacataaaaaagataaaggtattccgttctggccaacaacctttggtcgccaagctgatatcccgatgtttgaaacagcatttagacaacgtatgagcgaaattgaagaggtggttgaagtgacgcattttagcgccacagtggaaaacggagaattaaagtatcaagcgacaattcgcacgatatacggaggggttacactgaatggctga

SEQ ID NO: 316238 - DNA, 693 bp, Proteus mirabilis; identical to SEQ ID NO: 311049

SEQ ID NO: 316239 - DNA, 813 bp, Proteus mirabilis
atggacttacgacgaatacgggtggggattgaagttgcaggacgattgcaatggtatgaaggattgcgtattaaagccaacggtaccaagtacgcaaaccctttacaaaatgaatgcacagttagcattgatggattgaacgcccacactcgagattatctgctcactgaaaccagcccttatcataaaagcaaacaaactcgccgtctttaccttgaagtaggacgcgtcaataccggattatttcgtatctttaccggtgatattgtcagtgcagaaattgcctcgccccctgatgttacgttaaccattaaagccaaaactaataatgccagttcaggtgatattgtttcttccagtggtggtgccatgcagaaaatgagcgagatcgcatcatcggtggcgaaggattgcaaggttagattggactttcaagccaccgataaaaatattgccaattggtatttttgtggttcagcgttacagcaaatacaacgactgcaggaagcaggaaacgttaaagcctttattgatgatgatacgttgtttgtcaaagatgataaccaagccttaaaaggtcgtctgcgcattcttagcatgaaatcaggcatggtaggtataccgaaagccaccgaaaaagggttgtctgtgacttatttgattgacggtgcctcagaactagggggaatgctacgacttgagagtaaattcaattccgcacttaatggtgactacatcattgaacaactgaaattcgatgttgcttcacatgatgatcctttcttttatcaggctacctgtaaacgagcataa

SEQ ID NO: 316240 - DNA, 318 bp, Proteus mirabilis
atgaaagtcatacccttaaaagctattccaaaccaacgcttatccgtcaatttgaaaggtgttaattggacgctgacaataaaagccggtcgccatgcgatgtatctcgatattgaacgagaaagtgaggttatcgccgtaggcatgcgtgcggtggcaaacacacctatcattccttatcgctatctgactgatggtacaaatttagcgtttataacagaaaatgatgatctgccctggtatgaatcatttgatagaacccaatcattaattatttggagtgatgatggacttacgacgaatacgggtggggattga

SEQ ID NO: 316241 - DNA, 528 bp, Proteus mirabilis; identical to SEQ ID NO: 307334

SEQ ID NO: 316242 - DNA, 2295 bp, Proteus mirabilis
atggctttgctagatacctttgttcaagtattcgaatttgatacccaccaagccgatgatgcgtttaatcgggtgagtaaatcgaccgatgacattatcgctgagatgaaaaaggcgcaacaatcggcaacgatgggagctgatgggtttacgcaatttattcaaaatctatccgcacaattgacagaattatcatcaaactcagtcgatattcatgttaatagtgacacatctggagttgccgataacctgattgcggagatagatcgcattaaagaaagtgcgacggacaattcgcaatcggtgaatgactttattcaaagcgtgattgccagtattgaacagttgtccgcaggggagccgataaatatcgaggttgaggcagatggtacacaagaaaaaatagcctcagtcactgctaaaattgatgaactaaaatcatcaatgaacttgcttgatatccaacgtaacgaactgtcacaaggcgtaaatgaaagcagtgtttcatctgaaatgctcaatgcccaatatcaacagatgcaagatgagttatcccttctcaataatgaattggtgtcgctcactgatgcagagaaaaagaaccgtgaaggtaaagaggtcattgatgccattgttaccgcattaaatgccgattatacgcaatttattgaaacgatgcggacaaaaggtataaagacagcgattgatgaagctaaagcccaagagcatctacaaaaagaactttcagaaaccggctctaaatatcaagaagccggaagttctgttgcaggatttgcgacaaaagcacttggcgctgtcggtattgtgatgagtattggcactatttttgccgaatctgtttctcgttctcaagaaattgaaacgctggacaagctgggtaaacaaatcggcgttgcgactgcagacgttgatgcgttttctggtgcgatcgctgagttaggcggttctagagagtctgcacaagccgatttatccgcgatggcgaaatcgttcggtaatacgaaagattcaatggaaaaagtacttcaaaccgcgaataaagttcaaggcatgagctttgataaagcaaagaaaacactggagggtatgggggtatcggacgaaaaaaccattgaattaatgatgaaagggcgcaaagaattagagcgcacaatgggtattcaaaaagagtattcaggcattagcaaggagagtattgaaaactcaattaaatttaatagtgctatggcaaaatttcaacaatcatcagggttgttgaagaatagttttttagaaatggtgatccccgctttatctaaaggattagagtggttaacaaaattagtcactttttgtaaggaaaacaagcaccttgtagtcggtttctttactgctgttgcaactattttgctggggaaatatatctatgctatgaagttggccagtattagcacatggactacgctttttcctattattgccattatcgctgttattgccctattagcggcagcttttgcaattgtttatgacgatatcatgaactttatcgacggcaacgattcaatgataggtcgtattcttgaaaaatacccgcgattaaaagtcgttattcttgcattgtgggaaacattcaaaaagctctttgaatatctaaaagctatcgttggtgttgtggcagatattgttgtcgctggttgggatctaatggcatcaggcttaaaagcttatgttaagtatttgctgagttgtatttcagtcattgcaggttggggtaaatcctttgcaggtgtatttaatacagtcagtgatgccgttgtgagtgcgtttgaatggatgtgggagcaagtcgaaaaaattattggttgggtaaatacaggacttaatgcggtcaaaaatggttggaaatccgccaaagagtttttcgggttcggtgacgatgaagaaatcactgtcaatcaaaacgtagagcgtaacgtcaatgataatggtgagattgaatatgccatgcctcaagaagaaagccaaacggaaaaccaaccaccggttagacactctattgctcaagccaatgcacagttagatgcgattgccaataatgcaatgaatcctattaccagccaagctattagcaatcaatccaatgtgaagaatgaaagtaacgtaagtattggagaaattaaggttgaaactcaagccacagatgcgcagggaatggcatcgggcgtaaaggatgcattgcaagatcaactcgccgattttaatcagcaaaactcaacgggagtagcaaaatga

SEQ ID NO: 316243 - DNA, 459 bp, Proteus mirabilis
atgttaattaaaccgaaagaaattacgatcaccgatgctgatcgtgaagagcacacttttattattagccgattaccggcaacgattggacgtgaaattctggcgaagtacccactatccaatgcacctaaaattggcgactatgaagtcagcaaagaagccatgttaaagatgatggcgtatgttgcagtggaaaaagagggacaagagatttatctgaagaccagcacattaattgataaccatgtgcccgatggtgaagcccttattcgtctagaactggaaatgttgaagtataacaccagttttttcggcaaagacgggagccaaggtttcctccaattcctgctcaacaaaatcaccggttcactcccgtcgattataaaaacgctgatggcttctttgccgtcatcatctcagccggtttcgccacgctcaccgaactcaaaacgtcaatag

SEQ ID NO: 316244 - DNA, 453 bp, Proteus mirabilis
atgcatgatgtatcagcaaccggcttgagtattgttattcaagctcataaaacctttcccgccggtattcaaattaccgccttcgcagatgatgccgatccgttagatttgcctgccgtggacattgcgcaaacaggaatggatatcaacggtaatttggtgacatggtcaacgccaacacctcaaacggtcaccattaacgtgttagccggtagtgaagaagatgaaaacctcgctatcttactggaatcgaacaccgcacgacgtggacaacggcatgcaggggatattatcaccatggtcgcttcgtatggtgatggttcaacaaccacggcacgaaacggcaaaatcactaatggtagtcgtggtagctccgttgccagtgcaggacgacataaatccaaagcgtataccttcgtatttcaagacttcgatcgcactcgcgcacgttga

SEQ ID NO: 316245 - DNA, 1203 bp, Proteus mirabilis
ttgtttggcgaaaagacaggcgatttagctgatttaaaactgattaatgagggtgaactcaatatcactatcggcaaggtgaccaaaacaatcactggaattgatctctctgaaagtacgtcatacgcggatgttgcaacagctgtacaagcgaaattaaatgcagaaagcgagcctcaatttgctagcgcttatgtcacatttaattcgctggatagtgcctttgtcattagcggtggcgtacaagagcgtgcagatattagtgtacgtcaatcggtacttgctgatgcaatgaatattagccacggcacatcatcagccggtaatccagcgcaaactccgttacaagcctttattgcttctgaggctgtttctgactcttttggtagcgcaacgtttttaacggaactctcattagagcatgccgtagagttggcgcagtacgtggcaggtgaaaacgtgaagtatcaattgcacttgtctgtgaccaatcaaaatgcagaagattttagcggggcgttggtgggtacggcttcaacgggcttaaacctaaaaacagcagataacttctttgttcaagcgttacctatggccattatgtccgccacggattatgaccgaaccaatgcgacaacaaactatatgtatcgtcaatttggtgtcacgttcccatcgcaaatcacgaccgatatcgatgcggatcgcttagataaactacgggtgaactattacggagaaacggcggtatcgggttcacatatcagtttctatcaacgtggcttcttatgtggtggggttgctaacccattagatatgagtgtccatgccaacgagcaatggctaaaagcctatattgcgcaacagtggtttagtttacttatggccacacgcggagtacccgccaataaagacggtgaagcacgggcgatgatggtgattgcgggggcggtgaccaaggcgattaataacggcacgatcctagcgggaaaaaccttaaccgatgtgcaaaaaattgcagtgacagacgcttctggtgatgatttagcgtggcacgatgtacaaaacaaaggttattggtacaacgctcaaattgttgaaaatacaggaccctctgatttgcctgagtacgtgatgaaatacgtattgatttacggtaaaggcgactgggttcgtaaagtcgaaggctctcacaacttagtgtaa

SEQ ID NO: 316246 - DNA, 162 bp, Proteus mirabilis
atgcgtaaagtagcaatggttgcactagcatcaatgtttttagtagctccgacggtagtaatggctgaaacatcaaatacaaataatcagcctgctgggcaacaacagtataatgataattaccattgtggatacggttacggtatgcatgatgggacgtga

SEQ ID NO: 316247 - DNA, 390 bp, Proteus mirabilis
  misc_feature (325)..(334): n is a, c, g, or t
atgcatgaaacatcggcaggtttagaggttcgtgcttttttaccagatgcagttgtagtcagtgtcatcgatagaaaaaatggccgaaaagtagcaacactagagcgtaagcaccctagtggttttttctgtggtgctatcccccgacgtaaacgccgttttagttactgtttagatgtaacgtgggaaaatgcacaaggtgtcgttgatgatccctatcaatttggcattttattgcaagaaatggatatttggtttttagcgcaaggccatcactcccgcccttaccaatgtttaggcgcacaccctgcaaaactgggtgatnnnnnnnnnngggtgatatcgatggtattacttttgctgtatgggcgcccaacgcaaaaagcgtaa

SEQ ID NO: 316248 - DNA, 687 bp, Proteus mirabilis
  misc_feature (662)..(671): n is a, c, g, or t
gtgagtcataaactgcacccttatatcacaacagatgctaaccaagctgttgcttctatcgcttatcgcttaaatgaagttattgctatttatcccataacacctagctcgacgatggcggaatatgctgatcgttgggcagttgctcaccagcccaatctttggggggatatacctcgattaatggaaatgcaatccgaaggcggtgcgatagcaacggttcatggtgcattacaaacaggtgcgttagccaccacatttacctcatctcagggattattattaatgatcccatcactttataaaatagcaggggaattaacgccttttgtattgcatgtcgctgcacgtactgtcgcaacacatgctttgtctatttttggtgatcattcggatgtaatggcaatacgacaaacgggctgtgcgctactttgtgccaatagtgtgcaagaagcgcaagactttgcggtgattgcgcagatagcaacgctcaatagccgtattccatttgttcatttttttgatggatttagaacatcacatgaaatgaataaaataatgtctatttctgatgatgaactcaagcagcttatcccatactctgcgattgaagctcatcgccaacgtgcattatcgccagaatcgcctgtgataagaggaannnnnnnnnncttattttcaagctag

SEQ ID NO: 316249 - DNA, 171 bp, Proteus mirabilis
atggaacaacaacttattactgatatttctctcactgcccgtattttaggcgcggctttttattatgcacctactgagaaaagtgacattgtcgagctgctgtctagtcaaaagtgggttgaagaatggccttatggcagtgatgaagaaaagcaacgcattgctagctaa

SEQ ID NO: 316250 - DNA, 258 bp, Proteus mirabilis
  misc_feature (212)..(221): n is a, c, g, or t
atgaactcattcagcacactaaaaacactattttgtggctctttgctggcactgagtctagtgaatacaacacaagcgggtgtttcactggatagaactcgtattgtattaacgggtaatgaaaactcagccagtgttaatttaaaaaataccagccctgatattccttttttagcgcaatcttgggttgaaaatgaaaatgggcagaagannnnnnnnnnccgttacaacgccttgatggtgctcaaaaaggcgtag

SEQ ID NO: 316251 - DNA, 261 bp, Proteus mirabilis; identical to SEQ ID NO: 27108

SEQ ID NO: 316252 - DNA, 441 bp, Proteus mirabilis
atgaaaaaacgatttttatcccttcccgggatactgatgctgtcgctgtcatgcctgccgtttaccgcgggggcggcagtggtgctgtataccacgcataatgacgccctgccgcagacggacatcccgtttgaggtggtgtatctggatgcgcctgaacgcctgctggatgaggccctgcttcagccggggacggaactgagtgaagcggatgccccgcacatcaccgccctgttacaaagtccggcctggcaggccagagaaacggcattacggcaggcttatcagggggttattcaggcctgggagctgggggtgacccgtctgccggcggtggtggtggatgcgcagtgggtggtttacggcaccactgatattgagcaggctgtgacacagatacagcagtaccgggaacaacaggaaggaggaggtcaaccatga

SEQ ID NO: 316253 - DNA, 792 bp, Proteus mirabilis
atgaaaggaaagcccctgcagtattcggtagcgccctctagccgttatcaaggtgacatgtcacgcctcattaattcaatgattaaagactatgaaaaagtgtttagtgaattaaatgacgactttgatggctttacgatggatgccagctttgccagtcaaacacgcatctggcttaaccgactaaaacgcaaatgggataagatttttaaacaaaaatccacagagattgcggataaatttgtttcccaagtcgatataggtgcaaagcgtaatttagatgattctctcaaacagttgtcaggagggatcaccatcaaaacccctgatatgcccgaagccttgaaagataaaatcattgcttctacggctgaaaacgtagcactcattaaatccattccactgcaatttcatcaacgtattgaaagtgttgccttacgctctatcagccaaggtggtgaaggtgcaaagacgttattagaggaaattaggcatacaggcagtgtgactgaaaaaagagcgaattttatcgctgttgatcaaacacgaaaaatcacgactgcagtgaattatgagcgcatgaaatctgccggtattcgtaaggcagtttggcatcactcggcaggtagtgccgaaccgcgtgaattacatctgcgtctggatggtgaagtgtttgatttagacaacccgcctgtgattgatgaacggacaggtgagcgtggcttgcccggacaattaccaaactgtaagtgcttctggacacccgtaatagatttcggtgaggagacatga

SEQ ID NO: 316254 - DNA, 123 bp, Proteus mirabilis
atgatgtatcacattatacctgtgacaaattatatgcaaaattgcacccttatctggtgtgatgataccaaagaagcggccattgttgatcccggtggtctcatggccactttgatcacgtag

SEQ ID NO: 316255 - DNA, 699 bp, Proteus mirabilis
atgaaccgtaaaaacctgtttactcgcacagctctcgctgccattgtaggaacactttcctcttatgcaagcgctgccggttttcagttaaatgaatattcaacttcagcactaggtcgtgctttttcaggagaaggcgttattgcagatgatgcgagtgtaggtagtcgaaaccctgccgcattgaccatgtttgatcgtcctgagttttccgttggtgctatccatattaatcccagtgttgatattaaaggtaaatcccctttaggtaatcatgccagcactaatgctggcgatatcgccccaagtgctttagttcccaatattcactttgttgcgcctatcaacgataaatgggcaattggtgcatcaggtactactaactttggtttagctaccgactttaaaaaagattacccagcaggtttaattggcggtaaaactgatttaaaaaccatgaacttaaatttaagtgcaggttatcgggtcaataaacaatttagtgtcggtttaggcttaaatgcgctctatgctgatgctgaaattacccgccatgtaggtgaagccggtaagctattgggtggtgccttatctcaacatccagatactgactatcagggattaggccgttatttatcaggcttatcgccaagtgatcgttttgcacaattaaaaggggatgcttggggctttggctag

SEQ ID NO: 316256 - DNA, 693 bp, Proteus mirabilis
gtgtggggatggcatggggtaattggtgggcaatttaatcagcgcgattttagcgctcaaggtgaagaagcttatgttccccctactaaaactaaaatacactcactttttttattagaagaataccatttaggcgatttccgctatgaattaggatttcgccaagactggcaatcactattaaataaagcgacccagcagaacaataaacagagtgcttcctctatttctgcaggattagcatggaattttactcaagattattttttaaatttatcattatcacacgccaaaagatcacctgtggctgaagagctatatgctaatggaattcatgctgccagccgcacaatagaaaaaggcgatgctaatttaaccacagaagttgcaaataatattgatttgggaataaccaaagtaacaggtgatattcaatttaatattaatgcctattacaaccgtattaacaattatatttatgggaaatttacaggacctgtattagataatggctatcgttcattacaatatatacagcatgatgcggaatttaaaggtatagaaggaaatattgattattactattatcaagataatttaatagggatttctggtgattatgtcagagcaaatctattacataacaaaggcaatattccaagaatgccagcctatcgtttaaacaccacttaa

SEQ ID NO: 316257 - DNA, 1134 bp, Proteus mirabilis
atgggaaaatctgtttttaattgtacaatgatttatatttcaataagttattctttatttgctaatgccaacaccaccaacattgttgaagataaacaatcagatcaaatattaaaggtctattctacccctttacacacatctcgagaaaaaatggcaactcccatagtggtgataacgcaagaagatttacgcacagttcgtagtgcttcaattgctgaaaccttaaccacattacccggttttcgtgctagtttttttggcggaggctcagtgcatccagttgtgagaggcatgtctggaaaccgcgtgaaagtattacatagtggtagtgatcttatggatgtttcgtcaataggtgcagatcacgcaattactagtgagccttttttgagtcagcgtattgaagtattaaaaggttctgcaacattactctatggtggcggtactatagggggggcgattaatgtaattgataataaaattcctctttctgtccccgataaaggctaccaaggtgaattacattatcaatatgattctgtttctaagggaaatactggagccgcaggcttaaccttaggacaaaataattttgcgctacgtattgaggggagtaaacgccaacagggaaattaccaacaacccgtacctttacatcaaggagaggataggcacttagcgggctcttatcaaaataatcaatctgctaatatcggtacatcgtggatatttgatgacggctatattggtattagctatggtgaacaacatcgtcgctacgggctccctggccatacacactttcattcacatgaggatgaacatcaccatgatactgttattgctcctccttcagtgggtcatcatcaccataatcacaatcatgtttatcctgatgaacagcatgtacatggtattccctatattgaaatgaatagcaaacgatgggatcttcgtggtgaaaaaaataaccctttcgcgggtattgaatcaatacgttttaatgcaaccagaaccaattatcatcatgatgaaaaagaaggtagcgaaatcacaacccaatttaaaaacaaaggagatgaattaaggctcatttcacacatcaaccggtgtggggatggcatggggtaa

SEQ ID NO: 316258 - DNA, 324 bp, Proteus mirabilis
gtgataagagcgtcatggataggcgattacaatgaaccctccacatttttatctttattaggttctaagcatgctggaaacatcccaaaatatcagagccagcaatatgatgagattttagtccaagccaatatgacgacagatgaagaggaaagaaatcgtctctataatcgtgcagaacaggttattgcggaagaggcgcctattgcccctatctatcagtatactaatggtcgtctaatcaaaccttggctaaaaggttatcccattgagaatcctgaagatgtcgcttatagccatatgctgtatgttataaagcattaa

SEQ ID NO: 316259 - DNA, 681 bp, Proteus mirabilis
gtggatttttttactgctgaaggagaagttgatttttgtgggcatgcaacattagcggtttttttcactctgtcatcgcttaagttactcaaacctggcgattatagccaaaaaaccaaggcaggaattttaaccgttaccattaatcacgataatattgtgatggaacaaacgcttcctattacccgtaaggggccttgtattaacgatgtcgcaaaggcgctgggcattctacctgaagtgatagaaaagacagatttaccaatagagattgtctcaacaggattaaacgatatttttgttcccgtacaatttggctatttagatgccttacagcctgactatcaagctatcgctgctttaagccataaatttgatactatcggctttcatatctttgaacttagtcatgatcaaaatattactgcccactgccgaaactttgcaccacgctatggcattaacgaagaatcagccacaggtagctcgagcggtgctttagggtgttatcttgttcatcaccttttgccaaacaaaaggcaatttttgttcgaacaaggtagagcaatgcaatgctcttctttaattgacgtatttattgattcgacagcaaaaaacgtcactcgcgttcaagttggtggaaaagcgacattgattggtacaaaaataattgagatctaa

SEQ ID NO: 316260 - DNA, 294 bp, Proteus mirabilis; identical to SEQ ID NO: 277241

SEQ ID NO: 316261 - DNA, 417 bp, Proteus mirabilis; identical to SEQ ID NO: 277206

SEQ ID NO: 316262 - DNA, 369 bp, Proteus mirabilis; identical to SEQ ID NO: 27139

SEQ ID NO: 316263 - DNA, 240 bp, Proteus mirabilis; identical to SEQ ID NO: 272469

SEQ ID NO: 316264 - DNA, 318 bp, Proteus mirabilis
atgttaggtgatttagtatcaacaacgataatatcagcaagtttacctgattctaaagatcccaatttatcttccatatgtaatactttcgccgaccccattgttgccagctctacaacggttaatggtggcatagcagcacgatctttattctctaacttatggattttacccacaagatttagctcattcatcgtcgttagtgtgttacttgacattgggccatcagtccctaaacctacacgaacacctttttctagcatcgcgacgacaggcgccacacctttcgctgatttagtatttgcacttatattatga

SEQ ID NO: 316265 - DNA, 669 bp, Proteus mirabilis
gtgcaaggctatcgtcctattattgtctgcgataacacattacttggccctgtatatcaacatccgatagaacaaggtgctgatatctcagtctattctttaactaaatatgttggtgggcattcagatttagtcgctggtgccgcaatgggctctcgtgaacttattaatcaaatcagattattaagaggagcaatagggacacaactggatccgcattcttgctggatgctaggccgttctttagaaacgttacaaattagaatggaaaaagccaatcagaatgcattattagttgtagagtttctgcgtgatcatgaaaaagtaaaaacaattcattatttaccttttgctgataaaaattctgttgaagcccagctttttgctaaacaatgtacaggtgcgggatcaactttctcatttgatattgtaggtggagaaagtgaagctttccgttttcttaatgcaatgaaaatttttaaacttgcagtaagtctggggggaacggaatctctagcatgtcatccaggttcaacaacgcattcgggtgtaccaatgacattacgacatagcattggcattcaagacaccactattcgtttatctattgggatagaaaatccacaagatttaattgctgatttatcccaagcattagcaagtgcttaa

SEQ ID NO: 316266 - DNA, 141 bp, Proteus mirabilis; identical to SEQ ID NO: 299388

SEQ ID NO: 316267 - DNA, 441 bp, Proteus mirabilis; identical to SEQ ID NO: 316252

SEQ ID NO: 316268 - DNA, 486 bp, Proteus mirabilis; identical to SEQ ID NO: 279299

SEQ ID NO: 316269 - DNA, 819 bp, Proteus mirabilis
atgttcgaaacagtttcacccttgattattgataatactggcaaagcaacaggggatatgagggcggttgaatatggccctgttgaatgcggtgccggccaactgaattctgttgctagctcagtattaggttgggagaaagtcaataaccccactcatgcggttgttggtcgttatgctgaatctgatatcaaagcaagacgacgacgtaagcaaacactggctaaaaataccgtcagtgtcgcagaagcgatcacctcttcactgtatgaattagagggcgttaactcgctttcttttcgcgagaactacaccgattcggtgctcactattgatgaaatttctctgttgcctcacagcatttacgtttgtgttgaagggggcgacagtaacgaaattgctaaatcattgctgagaactaaaactattggatcggcttttaatggtgagattgaaatcggtgttgtagagccggtaagtggacaagaatataaagtgaaattttcacgccctaaggagatcaccgttttttgtcgagtgaccgttaaaaaatcagccgttgatgcgcaaactattatccccagcgccatagaacaatggacgcgtggagatctggacggcgataacggtttgattgttggacgtgaagtatcgccttttgagatagcttcagcggtaaatactgttgagcctcgtctgttcgtgactaaagttgaattgtcactggacgggaaagtatggaatgttgcattaattccgattgccattaatcaaatcgcacgcttgcaacgaggtgctgtgcaagtggtgattgtatga

SEQ ID NO: 316270 - DNA, 294 bp, Proteus mirabilis
atgaacaaaatgaccattatccgctttcagttactggtacatcagttactgcaagtgcattacggcattacgctgagtgataccggattgtccgatgatgctgaggtgtcccggatgattgaactcgggatatcgccggtatcggtggtcaaccgtctggtggataagtaccacctggataaactgaatgcatcctgttatctgccggcatccccgtatgtcagtgataccgatgccttacatgcacaggctcaactgagcggtgccattaacccggatgtcatgcccggataa

SEQ ID NO: 316271 - DNA, 537 bp, Proteus mirabilis; identical to SEQ ID NO: 316122

SEQ ID NO: 316272 - DNA, 672 bp, Proteus mirabilis
atgtggttatctgaaggtggggtgtaccattcctgggactcgctgacggcgatgcagaaagcgatactgtcaccgttgttatcggccggcagttttgactggctaaaccggtttaccggggaggatgagagccgggtggcgacagcctgggaggatattcagtatcttcgcggtacaggggaagccgtaccaatggatatgcggacattgttaccgaccagccttgcggctgaattacacggcttcaacggtcgtttatggaaaacaccggaagttatctggagacaggcgcgctggcaggcgtttgcccccggtaacagtacatatcacctttatcagtgtcgttatggtgtgaaatggccgaacggcagtggttttcgctgtattgatgacggggaggccaccacgctgtcagtgacgtttgatactccatggagtctgccgtcagcagaggtcttgtgtgctctgtctacgcgtttccgctgtcaggtccgtcatgtctatgccgaagaaggctgtggtttctgcggatacagcgagtatgaccatggccggttagccgaccatgaatctgatgagattgagtacagtgatgaagagaatgaggatggtttccgggatgtgacgggaccggactatattcttgattcattaccacattacggagggtga

SEQ ID NO: 316273 - DNA, 450 bp, Proteus mirabilis
gtgatctttattcctaattacggcgtaagtttagcgcaacatattatccctgcggcagatttatctgaacaaatatcattagcaggaacagaagcttctggtacaggaaatatgaaatttgccctaaatggtgcattaaccatcggtacacttgatggcgcgaatattgaaattggcgaacatgttggtttcgataatatgtttatctttggccacaatgcacaagaagtggcggaattaagacaacgttattcccctcgtcgttattacgatgaagatattgagttacacactgtgcttaatcaaatcgctaatggtttctttaacccaacggatcctgataagtacaaatcaattttcgatagcttaattgaatttggcgatcattatcaggtattagccgattatcgtagttatgttgatactcaagatagtgttgatgtgcgttaa

SEQ ID NO: 316274 - DNA, 267 bp, Proteus mirabilis; identical to SEQ ID NO: 307313

SEQ ID NO: 316275 - DNA, 267 bp, Proteus mirabilis
atgctaacactcagaaaaatgattgctgatgatgagtcgcctaccggtgtggtgacgagtgtgactatcgataaagtgagcgtgtcatttacggcaccgcctgccggttcggattggtcgcactggtttaaaatgaccacctttggccagcagtttcttgcactgatcaaacgttgtagcgtccctcaatatttgggtggtggtggcgaacgttcagcatttcgtggtgtaggtgggcgatttacgcgaggagggcgattacgttaa

SEQ ID NO: 316276 - DNA, 279 bp, Proteus mirabilis
atgaatgacaaaaagcaggattatagtcagttaatttttcgagcagtgaaagcgtctgttaagggcaatatcacgctggataatgggctggcacaaattggtgcgacggtggcgggcgatgtgaaaatggcaataaaagcagtcacaacaccggcactggaggagtcaaccgttaaagcaagagcacgtcgccatagtaaaggtaaggccaccgataagccgttagtcgatactggccaaatgcttcaagcggttagtttcgcagtggaggataaataa

SEQ ID NO: 316277 - DNA, 279 bp, Proteus mirabilis
atgaatgacaaaaagcaggattatagtcagttaatttttcgtgctgtgaaagcctctattaagggaaacatcacgctggataatgggctgacacaaattggtgcgacggtagcgggagatgtgaaaatggcaattaaagcagtcaccaccccagcgctggaagagtcaacggtcaaagcaagagcacgtcgccatagcaaaggtaaagccacggataagccgttagttgataccggccaaatgcttcaagccgtgtcatttgtcgtggaggataaataa

SEQ ID NO: 316278 - DNA, 333 bp, Proteus mirabilis
gtgcttattaaatctagtttttttatcacattaatatcactatttataagtattgttgttttttacttagaaactcttgctttaatcacactatttttcattaaaaaaattaattttgataaaaaattccgttttatcatatatttattaattccctatataatcaatatgattgtttggtattttaatggatatcaagttattaattataaatatacttcagtaatggttactgattttttatttatatcctatgtcatacacttcatttttattattcctatcattgcatatatactggattacactttccgttttaaaataaaaaagtga

SEQ ID NO: 316279 - DNA, 846 bp, Proteus mirabilis
atgattcatgttgtcagtttttctggcggcagaacctcggcttatctcgtgcatctgatggaacaaagacgaatcaaggaagatttggatgttagatatatttacatggacacaggagcggaacacccaaagacatacgagttcattaaaaacgtcgtatcacattggggtattagcttaacctgcttgcgtgtcgtagttaatccagaacttggacaaggaaatagctacgaagtaatacccgtcagtgaaatcaagcatgaccttgagccatggaaagccatagttaaaaaatacggactaccatatccagctggtgcgttctgcactagggaaatgaaattcaatccagtcactaaatactgcaaagataactttgatgaatatacgacatggaatggaatacgagcagatgaacaaaacagattgaagccaaagggcggcattaattatctagctgatatcagtgactttgaaaaggatgatattaatcactggtggtcaaaacaacctttcgatttaaacattcctgagcacctcggaaactgcgttttctgcatcaagaaaagtgtaaataaaattgctttagccgcaagagatgaacccattctagcgaagcaatttattgatgtgattaatggagatgtcagagaagttaatcgagagcagcaatcaagccaaattatgtttagaggtaataattcactggaaggaataattgctttgttcaaggaccatacaagagatgaaatcgctagtgtagttaaaggttctggcggatataaatcaggttcttgtagtgaatcttgtgagtcctttaattgccagttggatttaccaatttaa

SEQ ID NO: 316280 - DNA, 888 bp, Proteus mirabilis
atgtcaggaagtaatgaagtttcaaatctttctgttgagagattcagtatttcttatgatgctgatgacgagcaattatcactgcataaaatggatgcattttatctagggcaagcaattcagcaagtttccaccatggtaaaacaggctggtagaatcctcaatgaagaagagcctgatgtagttgttacagttcctgctgatgcagggtcatttattgttgaattcgcggtgtatgctttatctgatccgaaggcgcttctgacatctcttggttttttaggggctggtgctctagctgttgctcaacacatacacaacaaaaaggttataaacgttagaacttctgatgatagcgataatgctgttataactgttgaacataagggaaaaactgaagaagtaacctgcaaaaaagatgaagctcttcttgccactgactcagtaatacgtaaaagttataatgaagttatcactcagccactctcaaacaaagaatcaccagtgtttaaaataatggtagatggtagtgaaacactgaaattagatggtaaaaataaagttgagttagctccactaccaaaaaaatcaatggtttttgaggaaactaagaatatagatgcagtagtgtctcttactcaggttaacttcaactctgttaatgggtggaggatggagtatcttgatgaagagcacgcagtaaaaatggaagatgctgtgtttatggaaaaagttctcaataaacagcagtcatttgaaaaaggcgacctatttagcgtgaagctacgaattaaaaaagttgaaaagccagattcaaaaccatccacaacttacgcaatagaatatgtttatcgacatcttgctgatgaagaaagacgaattgaatag

SEQ ID NO: 316281 - DNA, 246 bp, Proteus mirabilis
atgattaacaatatcatacatataatacaagaggttagttggctggtgctaactggcttaggtatgatatttgtttatacattaactcgatggatccttagcacgtactttcctcatagacacgtgagagtgaactttatacacaataaaaagctagtatctagttatgatattgatctaaaaagttcagagactttaattgaacaattgaagcgattatcaaaacgagagggagatgatggctga

SEQ ID NO: 316282 - DNA, 381 bp, Proteus mirabilis
atggctgaaaaaactcccgttcagttaggcttaggaacaggcacgacagcaactacagctctcattgcttctttatccaaggcggctgattttttacccatagagtatcaaagcagcgtcaaggagctagttccatatatatctcctcttataagttggatggctatctggttatacaataggttcgctgttccgcctgaaatggctggaatagaaggaaagttaaaaagagatctaagatactacaaaaagaatatgaggaataaaaacttatctgctaaggaaagagtccatttcagaaatggctactcagaaacattgaaaaaaatatcaagtctgggtgttgattatagtaatggggtttactccaaaacatcttag

SEQ ID NO: 316283 - DNA, 471 bp, Proteus mirabilis
atgcagttactgctatgcttgatgttgcattgcattcgcagcaaggccctgtcccccctcgctgatatttctgagcgtcaagggatttccctttcttaccttgagcagcttttttcacgtttacgtaaaaatgaattagtcgcaagtgtgcgtggcccgggtggtggttatttactcggtcgtgaagcggggcaaatttttgttgctcaagtcatttcagcagttgatgaatctgttgatgctacccgttgtcagggtaataaagaaggatgtcaaggtggcgatcgttgcctgactcatactttgtggcgtgatttaagtgatcgtattaccagtttccttagcagcattagccttgaagagttagttaataacgaagaggttatggatgtcgctgatcgtcaagacaatgaaaaacgtcatgctatcaatggtcgtttacaagaaaccattgttaatatgcgagtttaa

SEQ ID NO: 316284 - DNA, 1167 bp, Proteus mirabilis
atgaatgtaaaagagatcattcgtcatgaaccatttggaacattactcggttatgcacctggtggtgttgcgatttactcttcagattacagcagtatagataaagaagattatgccgccaatgattcattccgtagttatattggtaatgagtatatggggcataagtggcaatgtgttgaatttgcacgccgttttctctatttacattacggggttgtttttactgatgtgggaatggcctatgagatcttctcgttacgtttcttacggagaacgattgatgacgatattttacccttgcaagcttttgcaaatggcagtaaacagccaccaacggtaggagcgttgcttatttggcaagaagggggagagtttaaagtcaccggtcatgtggcggttattaccgaagtattagaagataaaatccgtattgcagaacaaaatgtgatccacactaggttaccgcgaggtcaacaatggacacgagagttaccgcttaaagtgagtgataatggctattttatcgaagatacctttgataataccaccttgctaggttggatgatccaaacagaacctaatgcctacagtttacctcaacctaaagttgcccctgaattgttagctattcatgaggccaaattagccaacaaggggcaatttgctggaaaatggctagatgaaagcgatccgttagaaaaagcctatgtgctagcacagcacggtcatacgattaatcaagacagctatgaatatttcactatttcagaaagtgctgagcatgaacttatacgtgctagcaatgaaatgcatttgatgtatctgcatgcaacggaaaaagtgctgaaagacgataatttactgcgtttatttgcgatccctgaagtgttatggccccgtatccgcctatcatggcaaaatagacgtcatcaaatgatcactggacggttagatttttgtatggatgagcgcggtatcaaggtgtatgaatataacgctgattctgcatcttgccatactgaagccggattaattattgaaaaatgggctaaacagggtggcattaaagcaggttataacccaggtggacgtctattagatgcgttatcagatgcatggaaacacagtgatgccgaagccatttgtacatattcttcaagatga

SEQ ID NO: 316285 - DNA, 204 bp, Proteus mirabilis
atggctattatggtattcttttttaaagccggattaaaggaaagtaaaaatactggcatcgggagtgatttttcttataaacccaatgaatttccttcctatgaatatggtcagtacgcgtctccggagtttgtctggaatagtgaaaaacaaatttatgaagtaaaaccgtcagcacgcatgacattgacaataactccatga

SEQ ID NO: 316286 - DNA, 222 bp, Proteus mirabilis
atgtttccggaataccgtgatttgatttcccatcttcgccagaatagtcatcagtttcgtacgctgtttgataaacacaaccaactcgatcatgaaattgcccgtctggaaaaatcggacagaagcggctacagtgaggaagtggtggaactgaaaaaacagaaattacgcctgaaagaaaaaatctaccagcttcttaaagatccgccggaagatgactga

SEQ ID NO: 316287 - DNA, 489 bp, Proteus mirabilis
atgatttgttaccggaagatggttaatacagattgcgggcaggtggctgtattattacaggagaatgctcagtcgcggcagggcgggttgctgggggaatatcccctgaagaaagttgaaaatatgtttgcgcatgcactgatagtgataattgcgcaggatgatgatgtgattgccggggtggtgttcagttttccggtacagtccgcacaaatatcgccggtgacagcggtgatttcacagcaattcggtgatttactggaaaataactggttttacggcccggtctgtattgcggcggattatcgcggacagggaattttaccggcgctgtatcagcggttatgtgcggaaaatagcggaaagccggttgcctttattaatcaggataatgaacgttcggttcgtgcacatctgaaatccggtatgaaagaagccggtcgttttatctatgataataccccttacttactgatgattggccgctga

SEQ ID NO: 316288 - DNA, 369 bp, Proteus mirabilis
atgtggtcatttatcggtaacaaaaaacgtcagcgttggttgtggtatgcatgggagcctcgcttaaagcggattgtcgctcatgtatttggttcccgaagcaagaaaacactgggtaaattgttaaaactgttgtctgggttccgtatcgctttttggtgtactgatggttacagggcgtacaaagaggcactccctagtgaaaaacctattttaggaaagctatacacacagcgaattgagcgtgaaaatctgacgttgcctaaccgattgaaacgacttaatcgcaagacgttagggtattcaaaatcatccggcatgcatgacaagatcattgggactttcattgagcgagagtattacgtttga

SEQ ID NO: 316289 - DNA, 276 bp, Proteus mirabilis
atggctaccatttcagtaaaatgccgattctgtgggttaaccgaccctgttaaaaaacatggcaccggcaatggaggtcatccccgttatcgctgtcaggcctgttgccgtacttttcaactcgattatacctacaacgcttgtcagcccggcatcaaagagcaagtggttgagcttgccatgaataatgcgggtattcgtgacaccgctagagcattacatatcagtatcaatgccgtcgtccgcactttaaaaaacgctcgccacggaatgtaa

SEQ ID NO: 316290 - DNA, 735 bp, Proteus mirabilis
gtgcctgaggatgttaatgcggtacaacaaaaaatatcggaacagttgagagaggattatgattatgcagggcacgttgccttgttggatatggacggtggacaaaatttgaaaaacattttgaacgccatcaatccagaagcattattccattctttattcatcgaggtgttgcgagataattatgcatcattaattcaaagtatgaatgtcaaaatttctgcgtttaaatcaaataaaaaagaaactgaagaagcgctttttgccttgcaaagcagtttgagtgagattgaagggaaaaaacaaactgctattgcggatgtgcaacagcgttattcacgcaatagcatttcaatgattaaccaagaggtgaccaacgcgattttgtctcaaaaagcccatttagtggatttagcaataagcaatcaaggtgcgtttgaacgtgaagttactgatatcactaaaaatgcattattgtctgctgtacaaactcgtttcaatgcgattagtcaagatttaatggacgaactcggtaatggcatcacggcgcaattatcttcgctgtcagataacaacttagggacgattgcgatgaacacctttgcaaaccactctggaaccatgtcgaatattgcgaatggtgcattgagtgcactgagtaaaacggtggtaacaacgatagggtttgaggaatacttccctaaacgctcgtcgatcattcggttgaccgagtga

SEQ ID NO: 316291 - DNA, 1296 bp, Proteus mirabilis
atggcaattaggcatagtaaaagcaaaatggccaatcgcttatcactggatgatatttttagtggtcctgatgagtttgggttgttggatgtggcacccaaggcaataagccaaaatgcaccgattgaaattacgaattttgaggcgattaacgcttttgtggatcagcatgggcgagcgccgagccaagatggcgatttagcagaaaagctgttagccagacgtttggcgagttatcaaaacaatagcagttctcactccactttggctccatatgatcggtatggtttgttggtttcgggaaaggaaaagggcatcgtgccgccagaagcgctagaggtggccttctgtgatttggttggtgatggacagcccaagaatattcctcccgatgaggttacctctttagatgatatttttgctagcgctgaattcaatgatctagatttaggtgaccagagtttattcgatattaaacatgtccccactatcacagagcgagagcagcctgatgaaatagcccagcgtcgcgtgtgtgaagatttctatcagtttgagccaatctttttggaagtgcagcaagggctgaaatcaggagagatgaagacagttcgttttaacctgacctcacgggtggaggaaggtgatctattcatcatggaaggggtgctttgcttaattgatgaaataggcgagtacagagaagatagccaaggtcgttatgaccctcggctacgagttatttttgaaaatggcaccgagtcaaatcaccttttacagtcacttgctaagcgtctttatatggatgaaacagggcgtagagttatacgtagtgccgagtccgtcgtcgatgcgtttaataatatttctcataaagacaagcgtgctggacaaatctactttgtgacaacgctaagcgacaatccggttttaaaagccatacccaacctgattaaaattggctacaccgaacaaacagtagaagaacgtacaaaaaatgccgaacgagatatcgcctttttagaagctcccgttaagatcctagcctctatcgaatgctataacctcaaccctaataaatttgaatcattgattcatgggtttctacacgcccagcgtctgcaaatgaccttggtggggaaggatggcaaaacctacagcccaagagaatggttttcagtgccattagacaccgctcgtgaggtagtaagacgcattattgatggaagtattgtgcattatcgaatggataatacgacggggagactggtggggaagggtagtgaagtcaattag

SEQ ID NO: 316292 - DNA, 2073 bp, Proteus mirabilis
atggctaatttgttgaccgtaaattacaagcaaactggtaaaagcgccaatcttaacgagatgggtatgcgtgaaatgcaggctcgtgcttttgagtacagagatgcacagtatctcttgcttaaagcgccacctgcttcgggaaagtcgcgggcgctgatgtttttgggtttagataagcttcaccatcaaggtattaaaaaagtgattgtcgcagtaccggaaatgtccatcggtgcttcgtttagaaatactcgattaagtgagtttggcttttttgccgattggacggtggattcgctctataacctgtgtgtgcctggtgccaatgaagaaggcaaggtgaatacctttgtgcgctttatgtcagatcccgctgcacaaattttagtgtgtacgcatgcgaccttgcgttttgcttatcaaaaactcacacctgctgattttaacgataccgttttggcgattgacgagtttcaccacacctctgcggatggggataatcgtctaggcgaactcattgatggcatcatgaaaggctctaatgctcacattattgccatgacgggttcgtatttccgtggcgatgcggtgccgattttgctgcccgaggacgaggagaaattcacccaagtcacttactcttattatgagcagctgaatgggtatcaatacttaaaatccttgggaattggctatcacttttataccgggcgttatttggatgcgctgcatgaggttttagacacgactaagaaaaccattattcatatcccaaacgtcaattcagtggagtccaccaaagacaagtactcggaggtggatcatatcttggatgtgatcggcactgttattgaaaaggatatgacgactgggattatcacggttcaagacaaaaacggtcgtttgctaaaagtcgctgacttggtcgatgacaaccccatgcgagtcgaggtgcaaaactacctacgcaatgtgtctaaagcagaggacatggacattattattgcattggggatggctaaagaaggctttgactggccatggtgtgagcatgtgcttaccgtgggctataggtcgtctttaaccgaaattgtgcagattataggacgtgctacacgtgattgtgagggtaaaacccatgcgcaatttacgaatctgattgcgcagccggatgccaatgacaaggatgtgagagtttctgttaataacatgctgaaagcgattactgtgtcattgctgatggagcaggtgttagcgccgtctattaagtttaaaccacgctctcgtatggagcctggtgagaaggtggagcctggcacggtggtgattgaggatggcactgctcctgtttctgataaggtgatgaaagcactggaaaacatggacaacattaaggccgccattttgcaaaagcctgaagtggttgcgccagcagtgacaggcgaggcagaccccgaggtgttgggcgaggtagagatccctaagattattgaaaaactctatcccgagatggatgacaacgagattcagactctatcggaagcagtgcaactgtccttaggtgtacaggctacgggtggcttaattgatgaggcggacttacccgaaggcgccgaggtgtttgtaccaccgggtgtgcaggaaacaggtgcaacgtatcaggtgcaaacaggagctgctggtggaccttcctctacagcccaaagtggtgcgcctgaaccaagccgtaaatttgtgctaattgataagaaattcgtcaatattgagcacttgaatgtggacttgattcgccagattaacccgttccaaggcgcttatgaaattctttctaaggcggtgactcctttggtattaaaaactattcaagacaccgtcgtttctatgcgttccaccatgtcagaagaagaagccattgttttgtggccacgcattcagaattttagaaaggataaaggacgagagccctctgtgacttccggtgatccgtatgagaagcgcttagctgaaggtttggcctatttgaagcgtaaggctcaggaacgcaaggctgcacaggttagtatgtcatag

SEQ ID NO: 316293 - DNA, 1851 bp, Proteus mirabilis
atgagcaaattgcaaaataaaattgaagcccaagatcgtactttatttgatgtcttgaacgaaaaaaaatatacggtagattattttcaacgagagtacagctgggaagaaaaacatatagaggagttagtaacggacttaaccctggcttttttaaccgaatatacccccggtgataagcgtaatgatggggagagctataacaattacttccttggtccttttgttattcttataaaagacggtaagcgtagcattatagatggtcagcagcgtttaacctctttaacgctatttttgatttttctaaacaatctacaaaaagagttagggtatgacgaaaaaatagcgccaatgatcttttcggagcatcgaggagttaagtcttttaacatcactgttgaggagcgtatagagtgccttgaaagcctctttaactcaggggagtatataccaaaaagcaacgcctctgagtctgttcgcaacatgactgagcgttattacgacattcagaaagcttttccagaggagctgaagaccgaggtatttcctttttttatcgattggctcaagtacaacgttgtcatggtagaggtgagagcctactctgatgaaaacgcttacaccatttttgagactatgaatgatcgagggcttagtttaactccttctgaaatgctcaaaggctacgtgctttctcgctttaatgacgaggataagcgtataaaggcaaactctgaatggaaggaaggcatactaaaactcaaagcttatggcaaagaagaggatctgcgctttttccaagcgtggttacgtgctcaacatgcagactctattcgaccagggaaagctgggtctaaaaatgaagattttgaaatcataggtacgcgattccataactgggtacgtgaaaatcatgaaaaaatagggttagattcagctaatggggaaacatttgaaaattttgtagagagagattttagattttaccttaaagcctatttacgtattttagatgctcaggggcagctcactaaagggctcgaatctgtttattacatccatcattggggcatagctcctaccttaagcttgcctttaatgcttgcgtcattaaaaacggctgatagccctgaaacagtggatgcaaaactaagcatggtagcgtcttatatagaggcttttgccgttagacgctccatcaactccagaaatttctcagccaactcgattcgctacacgatgtatagtctagttaaggaaattcgtggtttgagcttgccagagcttcatgctctcttgtctgaaaaactaactgagatgaaagagagttttgaagatataggggcgtttcgtttacatggccaaaatcgacgttttgttaagtttttgttatgtcgaataacagcatggtgtgagcagcaggcaggcatgggtacagattttactacttactacttacctgctagcggtaagccttttgaggtagagcatatttgggctcataagttcgaacgacatacagatgagtttgataacgaaaatgagtttctacagtttcgtaatcagctaggtgggttagtgctgcttcccaaaggcacaaatcagtcctacggggacttaccttacgcagaaaagcaaatacattatattaaagaaaacttgttagttaaatctctttgtcctctcgcctatgaaaataatcctaactttcgtgccttaagggagagtcaaaacttaccctttaaaccacatgcggagttcaagaaaaacgatatcgtagagcgtcaaagtctttatcaagaaatatgtaaacgtatctgggtacttcccaccctcgctaccccttaa

SEQ ID NO: 316294 - DNA, 2739 bp, Proteus mirabilis
atggcagtcagccaagcaagcattattcagtcattagaaaacttgatctctgatttgagtcaggacgagtttattttttctttcctcgatgcctatggttttcctaaaagtaccatcactcggttgagaaaagaaggtgacagtcgaaatgtggcagaaaatggtgatataggactgcgcaaacaactctattttcgtgctttggctaagggcgaagacctgaatgctcagttggacgcattgtgcgagagcagcgtggtggcacgcaatgacatccgttttgtgctggtgactgacttcaaaaacctattggctgtagacctgaaagcagacgagcgattagatattgaaattcaagaattagataaaaactatgcttttttcttgcctttggctggctatgaaaaagcggtgatgtattccgaacacccagcggacctaaaggcctctgaaaaaatggggcagctgtttgatttaattcgtgagcgtaatgaattaactaatagcgaagacattcatgcattaaatgtatttctcacacgccttttattttgtttttacgccgaagacacagggatttttgaggaagggcagttcagttatgcgcttgagtcttataccaaagaggacggttcggatttagatcagtttttctatgatcttttcacggttttagacctagaggaaaacgcggcagagcgcaaaaaaatgccagcgcactttcagtcctttaagtatgtaaatggtggcttgttcagtgctgatgagcctatccctgatttcagccgcaaagcacgccgtattttgttggattgtgctcgtttaaactggtctgaaatcaatcctgatattttgggttccatgtttcaggcggtgatcgatgaagagcaacgcggcaacttaggtcaacactacacctctgtgtctaacatcatgaaggtcatccagccgttatttcttgatgacctttatgcagaactaggaaaagccaaaggcaatgagaaaaagcttaaggcattgctagtgcgcttacaaaacctaagtatctttgaccccgcgtgtggctcaggtaactttttgattattgcctataaagagttacgtcgccttgaaatgcaggtgattgatgcgctcaatgccgctagtcagcagatagtgatgtattactccggcattaagctaagccagttttacggtatcgaaatagacgacttcgcttgtgaaatcgctaccttatcgctttggttggcagagcatcaaatgaatactgcgtttaaggccaagtttggtcatgccgagcccgcattacccttaaaagatggcggtaatgttgtgtgtggtaacagcttgcgtttagattgggaggaggtttgcccacccgttgatgaacagggcgaagagcgagaggtttatatttgtggcaatccgcctttcttgggcagtggtggcagaagcaaagaacagaatgaggatatggattctgtttttgcaggctttaaatcgtttgggatgctggattttgtggcgtgttggttttggaaggcagcgcaatatattcaggataaacaggctcagtttgcattagtcgccacgaattccatttgtcaaggcgagcaggtagcaatgttatggccacgtattttagaaaaaaacttagccattcgatttgcatacccaacctttgcttggaaaaatcaagccaagcaaaatgcagcggttcatgtggtagtgataggggtggctaacacagcggatataaaagaaaaaactttattccgtgtgggtaaagacgaggtgacatttaagatagatgcgaaaaacattagtccgtacctattagagggtggggatacgccgatatcgagtcgaggtaagcctatttgccaagtgtctgagatggtgtacggcaataagcccgtggatggtggttacttattgttaaccacagctgaaaaggagcagttgttagcgagcgagcctcaagctgctaaatggataaggcgtttggtaggtgctcaagagtttattaatggtaaagagcgttggtgtctatggttgttggacgttagtgacgaggagattaaagaaatacccgaggttcaggctcgagtaaatgcggtacaagctatgcggttagagagtaaaaaagctgcaactcaaaaaatagcagcgactccatatttgtttggtgaaatacgacaacccaaagacggccattacatcctagtgccaagcgtttcctctgagcaccgtcactatatacctataggttttatgagcgcggatgtgataacaagtaacgctaatctgataatccccaacgccaccctctacgagttcggtatccttacctctgaaatgcataacgactggatgcgtaccgtggctggacgattaaaaagtgattaccggtactcagccactctggtttacaacacctttccttggccggatgtgaccgagctcaagcgcaagcacatcgagtctttagctgaggaaatcttacttatccgtgaagactatcccgataaaactttggcgcagttgtacgaccccgacaccatgcctgagcctttattacaggctcacaaaaatttagatcgtgccgtagaagccttgtatagagagaagccattccgtgatgcttccgagcgcttagagcatctatttgcccgctatgaaaagttgattgcggcggagaaagaacagacgttggcaaaaaagaaaaaaggtaagtaa

SEQ ID NO: 316295 - DNA, 195 bp, Proteus mirabilis
atgaaaaaattagcgattagccttttctttatcgtgatgacatgtgtcggcttttctgcccatgccgaacggatcagagatcttacttcggttgaaggggtaagagaaaatgcgctgattggttatggtttggttgtcggcctcgatggtacgggtgaccaaaccatgcaaaaccttttaccacgcaaagtctaa

SEQ ID NO: 316296 - DNA, 135 bp, Proteus mirabilis
atgtcaatagagaatgagcaaaataaagaaaagctaattgaatattttaaaaaggaaaaagagaaaaaactagtgtttttttatcaaaaacaaggactgtggctctatcttttatacctggagttaaacagataa

SEQ ID NO: 316297 - DNA, 276 bp, Proteus mirabilis; identical to SEQ ID NO: 294433

SEQ ID NO: 316298 - DNA, 705 bp, Proteus mirabilis; identical to SEQ ID NO: 14478

SEQ ID NO: 316299 - DNA, 486 bp, Proteus mirabilis
  misc_feature (452)..(461): n is a, c, g, or t
atgtcagacactaagcgcttaaatgtgttgattgcaaaagctcttttacttaaccaagatattactgatagcgaacaagtagatgcgctaacagctcatatcaatggtgatattgaaaaagaagagtttaagcaatatgaccactttattaatatcacgctacttgcactttcattggttcctaatatcagcagtgaactcagtgaagagcaaatcgttaacgctattatgtcatttattgataatcctgatatgcgtagcgttcgtcatagagttaatcactttaactcattaataaatccaaaaaccacctcaaatgaggtagaaaaaaaggaagtacctcaggaagaggtgatttttaacgccagtaaagataaccaaaacggtcaacataaggaggcggaagatattccaaaggaagaaaatgaccaacctgcttattttgaacctgnnnnnnnnnnctggtcggtatcccgatattcctaa

SEQ ID NO: 316300 - DNA, 399 bp, Proteus mirabilis; identical to SEQ ID NO: 307912

SEQ ID NO: 316301 - DNA, 324 bp, Proteus mirabilis; identical to SEQ ID NO: 302340

SEQ ID NO: 316302 - DNA, 1023 bp, Proteus mirabilis
atgcaactatttaatgacgacgcactatctgtattaaaaacactacctgataacagtattgatttaatcgccacggatccaccgtatttcagagtgaagtcgtgcgcatgggataatcagtgggataatgttgagtcgtatctgtcttggcttgatgaggtattagctgaattctggcgggtattaaaacccaatggcagtttgtatttattctgtggttctaaattggcgtcagatactgaattgcttgttcgcgggcgatttaatgtattaagtcatatcatctgggctaaaccatctgggccatggaaaaaacaaaataaggaaagcctgcgcaccttttttccttcaacagaacgaatactttttgctgaacattaccaaaaaccagtcacagctaaaggttctgagttttcgttaaaatgtaaagagctaaaacaaaatgtattcaagccattgattgattattttagaaatgctcgtttagcactgcaggtgagtgcaaaagaaatagaccaagcaacaggtaagcaaatgtgcagtcattggttcagcaatagtcagtggcaattacctagcgaggaagactataaaaagttacaaacactgtttacacacattgctgataaacacgaaaaactatcaccgttatcccgccagtttaccgagttagagcgtgagcaggttacattacaaaaagactaccaagaattaataaaagaatatgggttattaagacgaccattctttgtaactgtagatgtaccttatactgatgtgtgggattatccacctgttcagtattatcacggtaaacacccttgtgagaaaccatcagccatgatggaacacattattcgctcaagtagtcgcgaaggggagctagtcgctgatttctttatggggtcaggtgcaacactgaaagcagcactaaaacttaatcgaaaggttttaggtgtggagcttgagagagagcggtttgagcaaaccgaacaagaaataaaagcgctaacttgtaagtaa

SEQ ID NO: 316303 - DNA, 195 bp, Proteus mirabilis
atgttaaaacagtgtgatatgacaacgcaggcaagttgtgtacttgaagcaatctcaaaaaatgattggcaaacagtacaagcaatttcaaatcaaactgggctaagtaatgaaaattgtgagtttctattaactcagtttgaaatagcagggtttgtcgcaaagcaaggaaatagctatatgcgtacagcctaa

SEQ ID NO: 316304 - DNA, 270 bp, Proteus mirabilis; identical to SEQ ID NO: 306660

SEQ ID NO: 316305 - DNA, 243 bp, Proteus mirabilis
  misc_feature (219)..(228): n is a, c, g, or t
atgaatatagaacttcgccatttacgttattttattgctgttgctgaagaattacattttggtaaggctgctgagagattaaatatttcccaacctcctttaagtcagcaaatacaagccttagaaagtgagataggggctcgtttactcgaaagaaccaatcgttctgtttcgttaaccccggcaggacaaatgtttttaaaaggatcctatcaaatnnnnnnnnnntatggcacaagttaa

SEQ ID NO: 316306 - DNA, 579 bp, Proteus mirabilis; identical to SEQ ID NO: 298324

SEQ ID NO: 316307 - DNA, 270 bp, Proteus mirabilis
atggtcagtgtgatagtgataaatattgaaaacaaaaaagccccacttaaaaagtggggcttcttagattttgctgagagcttgttagatacaaatctctcactgtggagttatagtatgcttatttttcctttaagtcaacaatatttttcacaaaaaccaataaaaatagaaaattattattttacagtaacttcttgtagaaatttatctgataaagactcttctttaaagcattccgccactaaaaaatcaaatagcggtttataa

SEQ ID NO: 316308 - DNA, 309 bp, Proteus mirabilis
ttggcattgctgagtgagcgtttaaaacagcgaggcagtgattatcacgctctttttgatgtattgctttgtctctcacaaagtgagttagacgcttcacaactggcggctcaagtagaaaaagagcctgtagatgatacgccggctgcattagatgccgtatgggaagaagagcaagtgacgtttctaggtgaaagtgcgcaatgtggtagtaacaatattagccagcatcagcgacgttttgcgcaagaaacgcctgttcaatatctcaatgtcggtaattcgctagatatgggagcacaaaaatga

SEQ ID NO: 316309 - DNA, 354 bp, Proteus mirabilis; identical to SEQ ID NO: 298387

SEQ ID NO: 316310 - DNA, 483 bp, Proteus mirabilis
gtgtatacaccagaagaacttgaagatcgtccgattaaagacatcaccccaccgaaagaacgtgtcagcattaatgaaattaccactcagcaacagccaatcaatgcagaaccagtaaaagagactcaaggcgagtttatacctaagttcgatgctgacgcatttagattagctattgatgatgttcaaactgtcgaagatgctaaaaatattcgcgcagaaattgagaacttaaaaaatgaaatggggatcaacctgtttgctgaattaaaaaataaagcagtacaggcatatcaccgcattgatgcacgtaatgccctagaagcttctattaactcacttcctgaatctggctcatctgaagctaccgaagcatttgaaaaagtagacaagctacttaagtcaagtaagcgaaaactcggtgatgaattatacgagtctttctctatcacacttaatgatatgcgccctgaataccagtga

SEQ ID NO: 316311 - DNA, 777 bp, Proteus mirabilis
  misc_feature (11)..(20): n is a, c, g, or t
atgtcggacannnnnnnnnnatttaaagagatccgccctatctttaaagagcttaaccaattaatggcaagaatagatgcggctaatattagagaaaaacaatttatggctgatgcggctcatgagctaagaaccccgattgccgcagtgattgcccaattgcatattctctctttagtcgatgaaaagcaggagcgagaagaaattattgaagatatgaaacaatctctggatagagccgccgcactttcccaccagcttattgatttagcaagattagagtgtgacgatttccctataaaaatagaatcctttgatgtttataatattattggtaatgctattgctcagcgcgtgccttatgccttaacaaaaaatattgagctatctttaaatgaaggtatgtcacttaaaatagaaacagataaacaagcactactgtctatttttaataacttattggataatgcaatcaaatattgccccaataatagtcaagtcgaagtgactattgaacataaagatacccatcatctcaatattattctgcgtgataatggaccaggaattgcacctgagtatattagctcactattttcccgtttttatcgtgttccgggatcacaagggacgggcagtggtttaggcttatctattgcacaaaatctcgctgaaaaaattcaagcaaccatttccattactgaagggctacacaataaaggtattggttttattattaccttaccgttaaaaattaaaccactagataatgagtaa

SEQ ID NO: 316312 - DNA, 660 bp, Proteus mirabilis
  misc_feature (645)..(654): n is a, c, g, or t
atgaagatccgctctttctttatttatactatctttctacaaacgatatctatcgtgatgctatggggcgtttggttagcttggatagaatttgattatcttgctgactttgaaactatctacaataagcaacaagaaattattgctgaaggatttgccaatacactcgaaacggtttcctctcaacccgagacagtaaaacagatagctcaccatttacaaaacatgtatatcgataccatgcttaatggtgaggatgatgatttacactatttaccttggtttattgtcttaaataaagataatgatctgatttataccaatagaccggaactttctctgcctaaacgggtactgtcgcttgcctctgaaaaaatctctgtggctggggagaaatggtatttatcttatagttggggaaaacaacataaaattaaagtttttattggtgaatccgtcgaagatagaggacatgtcattggtaaccctatttccggtacttttgtgcccttcctatttattttagcgacggtgatcttggctatcttaattactgcttattttagtttgcgccctttaagacaagccgcagagctgatttctaaccgaaaacctcgcaatttaacgccaattaatgtcggacannnnnnnnnnatttaa

SEQ ID NO: 316313 - DNA, 270 bp, Proteus mirabilis
atgaaaaatgagctactgatcatagacctattattttataatgctatttttggtgaaaattctttattttatgcaaagaagtgcaaaattgtgatcaaagagactcaggaggggctagcccctctgatgttctacgcagaatgcggtagagaaatattaggaagaggaggaagcccaaaagcggctcttgcccgatcgcaagcttcattttttacgccattagcccaagattgttcaaactcacggcaaggggatggtctctgttcataa

SEQ ID NO: 316314 - DNA, 468 bp, Proteus mirabilis
  misc_feature (449)..(458): n is a, c, g, or t
atgcaggacattggtggctgcagagttattttattgggtaaggaacagttgatacagttgaatgaatctttagataatagtaaaacaattcatacaactattagagttaaggattatacagtagagaaaaaatctacaggatacagaggaattcatcggatctataaatgttatgatcaaaaagaagatcatccatggaaaaatttccatattgaagtgcagctcagaacaaaattacaacatatatgggctacaactgttgagatagtggatctatgtgaaaataaaacattgaagactaatccttttgatgcagataaagattggattgaatattttactattatgagtgattttttggcagaagaagacggttttatacatctaaacaatgagacaaaaaataaaatgactcgcagaataaaatctttaaatgtgaaacttaatgnnnnnnnnnnaataaactag

SEQ ID NO: 316315 - DNA, 210 bp, Proteus mirabilis
atggataataagatagataaagctgacaaaagagcaagtgcgggtgttgcttctgttgcagcgatggcaaatattccttatgtcactgatcgcacctttagtttaggtgttggtgttgggaattatcgtaacgccaatgcactggcaacgggagcacaatatcaaatatgccgttattcgtgtatcagcatcatggaatacggaagatag

SEQ ID NO: 316316 - DNA, 522 bp, Proteus mirabilis
atgtcattaacactttttcctgtcgcggcattaatcacatcctctgtggcaattggtctttttatagtaaaagaatgtagagaaagttgtaaaaagaaaaaggctgataatttgaagttgattagcctatgtttgctttttctagaaaaaattagaattaataaactcactgcaaaacaattggatttattttcagatgcaattttaaatggagaatataattattgggaggttaaatatgaatttggaatgattactattggctctggtttagatagagctaacaaacatgatttattgtcttttgcagaaaaagacttctttgaaaaaggtatttatgaattagcatttttagatgtggatttgtttaatgatgtgacaaaattgattatcgagattgatgaatttaatttacaattaaaaagattactctttgttttatatgtaaataacgagaaaaaatttacacctattctaaattccgttgagagtaaatgtaaaaaaataggtagtgtcgaataa

SEQ ID NO: 316317 - DNA, 1212 bp, Proteus mirabilis
gtgacacagccaatacaacatgactccgcggctgaaatggcacaaccatttgatgtcaaagattggaaaaaaggtgaatgtgaccttattccggggaaaactgcaccgcatcttattcctgtggagcgtgattatccaaatacctatgctcgttttacctcacttgggccgttaatggataaattaggtaatggcggtaaagggatcggttggaatacacagacagaagttgatttcctgaaaaaacttaatcgcgttcgtcatgagggtgtggcaaaagggcgcccggcgattgaaaccgcaattgatgcagccgaagttatcctctctttagcacctgaaacgaatggccaagtggcggtaaaagcgtgggatgcactaagtaaagtgacaggacgcgatcacactcatttagctaaagtaaaagaagatgagaaaattcgtttccgcgatatcgttgctcaacctcgtaagatcatttcaagtcctacatggtctggtctggaagatgagcatgtctcttataacgcttgttataccaatgttcacgagatgatcccttggcgtactttaagtggccgtcagcagttatatcaagatcatgagtggatgcgtgcttatggcgaaagtttagtggtttatcgtccacctattgatactaaggcaatcgaagcagtgaaaggtaaaaaaccgaacggcttcccagaaaaagcgctgaacttcctgacgcctcaccaaaaatggggtattcactcaacgtatagcgataacttactgatgttaaccctcggtcgtggtggccctgtggtttggctgagtgaagatgatgctaaagagatgggtattagtgataacgattgggttgaagcatacaacagtaatggtgcgttaaccgcaagagcgattgtgagccaacgtattcctgatggcatgatttatatgtatcacgcacaagagcgccaaataaacctaccaggctctgaaataactggaatgcgtggcggtattcataattccgtgacgcgtgtttgccctaaaccgacccatatgattggtggatacgctcagttggcttatagctttaactactatggaactgtgggctctaaccgcgatgaatttgttgtggtacgtaagatgaaacagattgattggcttgatggtgaaggcgatgcttatcaacaaaccctgaatggacaggagaaggcataa

SEQ ID NO: 316318 - DNA, 246 bp, Proteus mirabilis
atgtatatgctttgtgctagttttagcttttcttattttatatcttctttgtatcttttttatatctttcggttttatttcttagcttttttagttatttttcttatcaagaaataccatcttgcacttacttttattaaaaatgatgagaaatcagttactaatacctttctttctaataatcttttcttaaattcatttttttgtatttactcttgtcgatactctttagcattaaattgttga

SEQ ID NO: 316319 - DNA, 303 bp, Proteus mirabilis; identical to SEQ ID NO: 311300

SEQ ID NO: 316320 - DNA, 1200 bp, Proteus mirabilis
atggcaattaaactcgaagtaaaaaacctatataaaatatttggtgaacaccctaaacgtgcctttgaattattaggatctggtatgaacaaagaccaaatctttgataaaacagggttaaccgttggtgtgcaaaatgccaatctggccattgaagaaggcgaaatatttgtcatcatgggattatcaggctctggtaaatctacattagtgcgccttctcaatcgtctgatagatcccactaaaggcgaagtccttattgatggtgaaaacatcaccaccatgtctgataaagatttacgacaagttcgacgtaaaaaaatcagtatggtgtttcaatcattcgctttaatgcctcatatgaatgtactcgataatacagcatttggtatggagcttgcaggcattagcaaagaagagcgctatgaaaaagccatggcagcattagagcaagttaacttaagctctcatgctcaatcttggccggatgagttatccggtgggatgcgacaacgtattgggcttgctcgtgcactggccaatgatcctgatatcttattaatggatgaggcattctccgcacttgacccattaatccgaacagaaatgcaagatgagttattgagcttacaaggtgataaacaacgcactattgtatttatttctcatgatctggatgaagccatgcgtattggcgatcgtatcgcgattatgcaaggtggtgtggtggtacaaatcggtacccctgatgaaattcttaataatccagccaatgattatgtacgtaccttcttccgtggcgttgatatcagtcatgtatttagcgctaaagatattgctaaacgtcgcccagaaacactactgcatattgcgccaggttttggtccccgttcagcattaaaagtactggaagatgaagatagaaactttggttatttaattgagcgaggacggaaatttgcaggtattgtttctgtcacttctcttgaagaagcattaaaagcgaaacaacctattggatccgctattttaactgaaccttgtgcgattaatggtgatacaccattaaatgaactgatttctactgttgcgcaatctccctgtgcgatccctgttattgatgaaaaaaaccgttatatcggtttaatttcgaaaggaatgttgttacaagcactggataaggagacaccaaatgagtaa

SEQ ID NO: 316321 - DNA, 837 bp, Proteus mirabilis; identical to SEQ ID NO: 315214

SEQ ID NO: 316322 - DNA, 894 bp, Proteus mirabilis
atgggcggcacaaaaatcgagctcgccgtttttgataaagatctgactcaagtatggcaaaaacgtgtaccaacgccaaagaatgattatcaagctctattaaatgtttttaaaacactcactttagaagctgataatgatttaggctgtaaaggaaaaataggtatcggtgttcctggcatcgtcaacgcaaaagaaggaactgtatttaccaccaacgtgcctgctgccaaatataaaccgatgatccacgatctggctaatattcttgaacgccccgtcaaagttgagaatgatgctaactgttttgccttatcagaagcatgggatcctgaatttcgtcattatccttcagtactgggtttaatattaggtacaggtgttggcggtggttttgtcattgatggcaaagtactctctggtaaaaatggtattgccggtgaaataggtcacatgaatctgaatatagatgctgataatgtgattggtgaaaccatgccaaaaatattgtgcggttgtggtagaaaagcctgctttgagacttatttatctggtcgtggttttgaacgtatgtataaagcctttaatggctcaccacaaagagcggtggatatcgttgcacaatattatcaaggcgatgaacagacccaacagcatgttgaccgctatatgaaagtattagccatttaccttagtaatattctgactgtacttgacccacatttaattgttattggtggcggtttatcacaatttgacgcactgtataccttattaccggattatctctcacattgtgtatacggtaatacacaaattccaacaatagaaaaagcacgttatggtgatgcgggtggagcaagaggagctgcctgcttaaatttattagactga

SEQ ID NO: 316323 - DNA, 1029 bp, Proteus mirabilis
gtgtgtgcggtagcaccctgggcagtggcattgtctccgtccgtgagttatgtcaccgccggtgcgtttgccggtttttccgcattgcgggcacatcagggattccgggtattacgttaccgccggaatctccggcgtctgccccgctatcaggtgacgtcggcacaggtgccggtcagccggcagcgtctgtttctgggaaaagggtttcagtggcagcaaaaacacacgcaacgcctgctggaaacccagcgtccggaagtggagcggtatgttcagccgccggcacattaccggctggcccggcagtttgaactccgttttgaatcccgttttccggcggtttgccggcttttgcaaaaagacagttggctgaatccggtccgcccgctgccgccggtgggggggaatccggtgttacacggtgtggagccggatgaggtgaatgtgaccatggatttgcgtgaacgggttggtcatatgctggtactggggaccacccgtgtcggcaaaacccgtctggcggaagtgctgatcactcaggatatccgccgggggaatatcacgattgtttttgatccgaaaggggatgcggatttattgcgccgaatgtgggcggaagcgcatcgtgcggggcgcagtgaggagttttatgtttttcacttgggctggcctgatatcagtgcccgttataacgccatcgggcgttttggccgagtatcggaagtcgcggggcgggttgccggccagttatccggggaagggaacagcgcggcgttccgggagtttgcctggcggtttgttaatatcattgcccgggcactggttgctctgggggagcgtccggattatgccaaaattttacgttatgtcaccaatatcggggaactctatcagacatattcgatgcaggtgattaaagcacaactacctgatttgtttgcccaaatcgagaatgcgcagaacgcgctgacggtcgaggatgtgccccgtcatctgcaaagtgatccgaaagctgtggctatctag

SEQ ID NO: 316324 - DNA, 699 bp, Proteus mirabilis
atgcaggatccccgtccgatttttgactggcagcaggtgattcggaaaaaagggattgtatatgtcgggctggatgcgttatcggatgcggaagtggcggcagcggtggggaattccatgtttgcggatttggtctcggtagccgggcatatttataaattcgggactcaggatggactgccggaggatgagcacgccggaaaattaccgatcagcctgcattgcgatgaatttaatgaactgatgggggatgaatttattccgttactgaacaagagcggcggcgcggggattgaagtgacggcctacacacagacctggtctgatattgaagcccggctggggaatgcggcgaaatcggcgcaggtcaccggtaactttaatacgctggtgatgttgcgtgtccgtgaactgatgaccgcgaaattactgacggaacagttaccggaagtggatatttacaccaaaaccctggtatccgggatcaccgatatttccaatccgaggcaggggagtgattttacctccaatacccaggacagggtcagtatggtggctaaaccgctgctgttaccggcagatattattcagttaccgaaaggacaggcgtttgcgctgctggaaggcgggaagttatggaaaatcaggatgcccctgccggcggcagaggctgatgccctgatgccaccggcggtatga

SEQ ID NO: 316325 - DNA, 321 bp, Proteus mirabilis
atgggaattacccttgatgatgatggaactttaatgttaataaaagggaaaacatatgatttatttaccggattaattcaaaagtactttaatggaggttttaaatataatgtatttcatatcaactctcaacatggtgatgatataaaatttaaagaactatatgtcgattataatggttttttaattgggagtaagagagatagttcaggaaataataatgaactttataaaataaaatttaaaaagattgaaggtgaatataatttaagcgatgacgccaccgataatactaatattaattttaaggaaatgtattaa

SEQ ID NO: 316326 - DNA, 198 bp, Proteus mirabilis
atgcaaaaaattccaagtattgacccgaatatgattaatagaaaaaatagtcatagtatgttaacaaaagaacaactcaatactattcaacaacgtttagatacactagtacaattatcgcctacatgggcacaaactcatggaattgaaatggaaagaaaacttagaaataaatgcaataacagacaaacaacttaa

SEQ ID NO: 316327 - DNA, 429 bp, Proteus mirabilis
atgttatcggaacaacaaaaagccgctagagcactctctgatacattaattaatgaattaaaagcacatgatatcattgtgatcacggcgcctatgtataatttctccatcccttctcaattaaaacactatatcgattttattgcgcgtgcaggcgaaacttttaaatatactgaaacagggtcagtcggattacttgaagataagcaagttattgtattaacgagtcgtggtgggatccataaaggacaaccctctgatttaattattccatatctaacacaatttttatcatttattggtattaataatgtacagtttattctcaccgagggtactgcgctaggcgaagaatatgcccagcagtcacatgctcaagcacaaaaagaaatagatttaataattaataaagaaataatgataaaataa

SEQ ID NO: 316328 - DNA, 216 bp, Proteus mirabilis
atgaacaagcttcttgtactaaaatccagtattttagaaaattactcacacagcaataaaatggctgactatttaatagaaaattggcaaaaacaccatcaaaatgatctcatcaccctacgtgatctggcaaaagatcccattcctgttttagatcaagccacactatgttatcggaacaacaaaaagccgctagagcactctctgatacattaa

SEQ ID NO: 316329 - DNA, 171 bp, Proteus mirabilis; identical to SEQ ID NO: 300357

SEQ ID NO: 316330 - DNA, 333 bp, Proteus mirabilis
atgatttattttgcagatcatggattgaatcataatattgaaagtgatgggatgattattttgaataatagaggtgttagcaaatttcattataatataccattatttaaagtttcatctgatgacactgaacgccttcaatgcaaatcatttaaatcaggattaaattttgttaatgggctcgcttcttggatgggaattgaaaatgaacaattagataaaaactatagtctttttgattgtaaaaatgatgttagtgattttggtcttcagaagcggataaatagggattctaaaaccccagatcctgctattgacttaacaggaaggtaa

SEQ ID NO: 316331 - DNA, 546 bp, Proteus mirabilis
atgcaaaatgaattaaaccataaagaggatgccgcgaagattgaaatcgttgatgtaacttattcaaagaaaaacacgtttgttttaacgcaagaagagcgtgctgaaattgaacaagaaaaacatcactatgaagatccccgtgctgcatcgattgaagcgctgaaaatagtgcaaaaaaatcgaggttgggttgaagacggtgctatctatgctattgcagatgtgcttggtataccggctagcgatgtagaaggggtagcaaccttttatagtcaaattttccgccaacccgtcggccgtcacattattcgtttttgtgacagtgtggtttgccatattacaggttatcaaggcattcaggcagctattgagaagcacctcaatatccttcctggccaaacaacaccagatggtcgttttaccttactgccaacctgttgtttaggtaactgtgacaaaggtcctactatgatggtagatgacgatactcacagttttgttaaacctgaagagattgaaacgttactggggcagtatccatga

SEQ ID NO: 316332 - DNA, 276 bp, Proteus mirabilis
  misc_feature (19)..(28): n is a, c, g, or t
atgcacaaaccattattcnnnnnnnnnnccattattcctgatgcactagaaaaatggagtcatggagagatagagggggataatgggctggtggtagggcgagatgtctctccttttgagatttccgctgccgtcaatgctgtggagccacatttatttgtcacaaaagttgagttatcaacagatggaaaaaattggcatgtagcattaattcccattgccattaatcaaattgcccgcttacctaaaggggcgatacaagtggtgatggtatga

SEQ ID NO: 316333 - DNA, 2169 bp, Proteus mirabilis
atgaacaaaatcaactccgtctgtccttattgtggcgctggctgcaaaatcaatctctgtgtcgaaaatggtcgaataatcaaagctgaaggtgccaatggtgtcactaatcaaggcgagctttgtttaaaaggtctctatggatgggattttttaaatgacaataaattactgacagccagaattcatcaaccgatgatccgccgacaaaaaggggctgattttgaaattgtcagttgggatgaagcgattgagtttacggctaaaaagttactcgcaattaaagagaaatacggtgctaaatctattatgtgcaccggctcctctcggggtacaggtaacgaaaccaattttgtgatgcaaaaatttgctcgtgctgtactgggtaataataatgttgattgctgtgcccgtgtttgtcatggcccttctgttgctggtttacaagaaacactaggcaatggggcaatgagtaattccattgctgatattgaagattcagattgtttgttggtgtttggttataactgtgccgactctcaccctattgtggcgcgtcgtgtggtgaaagcgaaacaaaaaggggccaaaattattgtttgtgatcctcgtaaaatagaaacagcgaagattgctaatcaatatcttcccttaaagaatggcaccaatatggcgttagttaatgcatttgcctatacgctgattgatgaagatctttatgacaaagaatatgtgagtcgttacaccgaaggttttgaagaatataaaaaacagctggtggattatagccctgaagcagtagaacgtattgttggggtttctgcaagcgagatccgccaagctatgcgcacttatgcagccgcaaaaacagccaccattatgtggggaatgggagtaacacaatttggtcaagcggtagatgttgtgaaagggctagcgagtttagcgttattgacgggtaatttaggcaaaccacatgcaggtgttgcccctgttcgcgggcaaaataatgtacaaggtgcttgtgatatgggggttttacccaatatgttccccggctatcaaagtgtgacagatgaaggtattcgtcaaaaatttgctcaagcttggcatattccggttgaaaaactcgatccgcaagtgggttatcgcattactgaagtccctcatttagccattgaaggtaaagtgaaagcttattacatcatgggagaagatccacttcaaactgaggcagatttaggtctggttagaaaaggttttcaagcgctcgattttattgtggttcaagatatctttatgacgaaaacggcagagcaagcagatgtcattttaccttctaccagttggggtgagcacggtggtatttttacttgtgctgatagaggttttcaacgttttgaacaggcagtacaagcacgtggtaacgctaaacgtgattgggaaatcattagtttattagccacggctatgggctatccaatgtcttatgcagataatgaagaaatttggcatgaggtaagagcattatgtccgctatttttcggtgcgacctatgaaaaattagcgggattagcccatatacaatggccttgtcctgagctcgatcatccgggaacaccctatttatattcagataatcgattcacaacgccatcaggtaaaggccagctttttgctaccgcatggcgcgctcctgcagaattgcctgatgaagagtatccaatgattttatcaacggtacgtgaggtagggcactactcttgtcgctcaatgacgggtaactgtaaagcattagcatcattagcagatgaaccggggtatgtgcaaattcaccctgatattgctaaagcggcaggtattgctgatcaagaaattgtttgggttgcatctcgtcgaggtaaggtgttgtcacggtgtaatctaaacgaaaccgttaataaacaagctatttatatgacttatcaatggtggattggtgcatgtaacgaactgacacaagataatctcgatcctgtttcaaaaaccccagaaactaaatattgtgctgcacgagtggtgaagattgacgatcaaaaatgggcagaaagccaagtcgctcaagataatcacgctatgagaagtcgtttaattaatttagtcgagcaagcaaaaacagcgacacactaa

SEQ ID NO: 316334 - DNA, 201 bp, Proteus mirabilis
atgaaagacagaatcaagcttaacaatgttatgttagtggctgtcatggatggcagaaaaacacagacgcgccgaccaataaaaccacagcccagaataacagaagaaatattacgcaaactcggcacatggcaagaaggctataccctatctcaacaaacatgcgtagcgtggcgacacggattgacacggatttattga

SEQ ID NO: 316335 - DNA, 543 bp, Proteus mirabilis
atgaaaataatacaattaattctatgcttgctgttaacaatgccaatatatacgtttgcatatgaaaaaggcgagctatatgaagtaaacgaactaggatgggaagtcgcaagaacacctgttgcagatctatatgtatgtaagcaatgttcatcaataattgaagttcaaatatcttatgggcagaaaattgaaggtagtgatttttttaaatcaaacactgaatttattcaagccatgaagaccccgtctgttgctgaaaaatttataaagataatgataaaaggaagtgcaccaaaaatagttgatagtgatattgttatggttaaaataaatcctaattcactaataaatggaaataactttctgaattattcttttttcattaaaaataaaatgcaataccctatttttgaaaatacttatactggaattttcaatgggcgaatattaagaattagtgctaattacttgctaggaaaagccagtgaaacagatttagagacattgggaaaatttatatattcatttaaaccaatttaa

SEQ ID NO: 316336 - DNA, 2214 bp, Proteus mirabilis; identical to SEQ ID NO: 305965

SEQ ID NO: 316337 - DNA, 252 bp, Proteus mirabilis
atgaaatcttcattaggtatccctgcttctatccgtgaggcgggcgtacaagaaagtgatttcttagcgaaagtggataaattatcagaagatgcgtttgatgatcagtgtactggtgctaacccacgttatccgctgatctctgagttaaaacaactgttattagattcttactacggccgcgaatttaacgagcaccctgttgctgaggtaaaagaagcgaagcctgcgaaaaaaagcagtaagaaataa

SEQ ID NO: 316338 - DNA, 2421 bp, Proteus mirabilis
  misc_feature (2406)..(2415): n is a, c, g, or t
atgtctgtaactaacgttactgaactcaatgatctggttgctcgtgtaaaaaaagctcagcttgaatttgctaacttttctcaagaaaaagttgatgcaatttttcgtgctgctgcattagctgccgctgacgcccgtattcctcttgcaaaattagctgttgaagagtctggcatgggtatcgttgaagataaagtgatcaaaaaccactttgcttcagaatatatctacaatgcgtataaggacgaaaaaacctgcggtattttgtctgaagatttaacctacggtactatcactattgctgaacctatcggtattatctgtggtatcgtgccaaccactaaccctacttctaccgctatttttaaagcattaatcagcttaaaaacacgcaacggtattattttctctccacatccacgggcgaaattagccacaaaccgtgcggctgaaattgtgttaaacgctgcaatcgccgcgggtgcaccaaaagatattatcggctggatcgatgaaccttcagtggcattatccaatgcattaatgcaccatgatgatattaacctgatcttagcaacaggtggcccaggaatggtaaaagccgcttacagttcaggtaaacctgctatcggtgttggtgcgggtaatactcctgttgttattgatgactcagcagacattaaacgtgcagttgcttctattttgatgtcaaaaacctttgataatggggttatttgtgcttcagagcaatctgttatcgtcgtagacagtatctataaacaagttcgtgaacgtttcgccactcacggcggctacatgttaaccggtaaagagttaaaagctgttcaagatattatcttaaaagatggtaacttgaatgcggccatcgttggtcaaccggcagtgaaaatcgcagaaatggccggtattgaagtgcctgttaacactaagattttaattggtgaagttaaagaaactactgatgcagaaccttttgctcacgaaaaactatcgcctctgttagcaatgtaccatgcacaaaactttgaagatgcggtacataaagcagaaaaattagttgaaatgggcggtattggtcatacttcttgtttatataccgatcaagacaactgtcctgaacatgttgcctactttggcgacaaaatgaaaacttcccgtattttaatcaatacaccggcatcacaagggggtattggtgacttatacaactttaaactcgctccttctctcactttaggctgtggctcatggggtggtaactccatttctgagaacgtagggccaaaacaccttatcaacactaaaaccgtggcgaaaagagcagaaaatatgttgtggcacaaacttcctaaatcaatttatttccgccgtggttgcttacctattgcactggaagagattgcaactgatggtaaaaaacgcgcatttatcgttacagacagtttcttattcaacaacggttacgttgatgaagtgaccaatgtactgaaaaaatttggtgttgaaacggaagttttctttgaagttgaagcagatcccacattaagtgtcgtacgcaaaggtgcagagcagatgaacagctttaaacctgatgtgatcatcgcattaggtggcggttcaccaatggatgcggctaagattatgtgggtaatgtatgaacacccagaaacacacttcgaagaattagcattacgctttatggatatccgtaaacgtatttataaattcccgaaaatgggtgtgaaggctcaaatggtagcaattaccacaacatcaggtacaggctctgaagttacaccatttgctgttgtgactgatgatgaaacaggccaaaaatatccattagcagactacgcattaacgccagatatggcgattgtagatgccaatctggtgatgaatatgcctaaatcactctgtgcttttggtggtttagatgcggtgactcacgcattagaagcttatgtttctgtattagccaatgagtattctgatggtcaggcactgcaagctctgaaattgctgaaagaatatctgccagcaagctatcatgaaggtgctaaaaatccggttgctcgtgagcgtgtccacaatgcagccaccatcgcaggtattgcatttgctaacgccttcttaggggtttgtcactcaatggcgcataaattaggctctgaattccatattcctcatggtcttgctaatgcgttattaatttctaacgttattcgttataacgcgaatgataacccaacaaaacagactgcatttagccaatatgaccgtccacaagcacgtcgtcgttatgctgaaattgctgatcacttagaactgtctgctcctggtgatcgcacagccgctaagattgaaaaactgttagcttggttnnnnnnnnnnggttag

SEQ ID NO: 316339 - DNA, 240 bp, Proteus mirabilis
atgtcatttttaaaaaaactaccgggaattctgttttgtgcactaattggtgggttattaacattatctggtctaccgatggcgttgatgtttgggccaatcgtcgtggttattattgcttatcgttttaaatggcagctctctgttcctaagcatacactgacttttatccaactgaccttaggcacctctgttggattgatgtttaaccaagtacatttagggagtgcgataatttag

SEQ ID NO: 316340 - DNA, 174 bp, Proteus mirabilis
atgttattaaatattcattatctggatattaatcagcctcatatattaggaacgcaatggcaatctgttattcataatgaaactgtacgaactgatgatggaatacatattacccgtaaagggggagtacgggtgatcagagaagtggtaaaaatcctgaatgggcaggattga

SEQ ID NO: 316341 - DNA, 540 bp, Proteus mirabilis; identical to SEQ ID NO: 297523

SEQ ID NO: 316342 - DNA, 255 bp, Proteus mirabilis
atgtatcacgatcttcaaggaaaagttgctgtagtaacaggttcgtcacgaggaattggtgcagcagtagtgacgagattagctcaagaaggaatgaacgttgttatcaactatcactctgatgaaaatgaagctcaagcattagccgatagcttaaataaacatggtaaaggtaaagcgattatttttggcggtgacattagtgatgaaaaaattgctcataactttatttataaggcgattggtattttctaa

SEQ ID NO: 316343 - DNA, 234 bp, Proteus mirabilis
atgacatatcaagaaattgctcaaaaaattggttcgccaaaatcttatcgagcagtggcgaatgcctgtgcatcaaataaactagcagtagcgatcccttgccatcgagttatcagacaaaatggtgaaatatctggatatcgttggggaattgagcgcaaagaaaaattattacaaagagaaaaatcccttcatcatcagcatgatagattggctattagcaagagcgattaa

SEQ ID NO: 316344 - DNA, 363 bp, Proteus mirabilis; identical to SEQ ID NO: 301378

SEQ ID NO: 316345 - DNA, 441 bp, Proteus mirabilis; identical to SEQ ID NO: 302375

SEQ ID NO: 316346 - DNA, 132 bp, Proteus mirabilis
atgaagccaagaaaacgtacttactatattccacatgagatcgccagaatgtttgataaataccatccttcaattatgctcactatttatcaaacggggagccacttccccttattaaaatgtttcttttag

SEQ ID NO: 316347 - DNA, 261 bp, Proteus mirabilis
  misc_feature (216)..(225): n is a, c, g, or t
atgtctaagtcaccgtggaataaaaatcgtatcattggacaaaaacgaccgcttaaaatatctcatatctgggggatccgtattagactagagttagaagggaaaattcgcgacttagctttgtttaatttagccttggatagcaagcttcggggttgtgatctcgttaagttgagagtgtcagatgttgcatatggcagttcagtctccagcagnnnnnnnnnncagcagagcaacagtgttacaacaaaagactggtag

SEQ ID NO: 316348 - DNA, 423 bp, Proteus mirabilis
atgtcaaaagagataagcgaattacagtttagtcttcactatgcctcagaaacagacagtgaaaagaatacctccgccattttaacggcgaatatccatacgactgatggtgaaactcaacaactgacacaattaatttgcacgacatcttccgcaggtaaaaagcaatatcgaatcggcttgcaaaaaattagtgatgctggtgctccattgctggtggtgattgaatcttattggcgtaaaaacacacaagagagttgtatttattttttagagaaagcaaaacagtttattcaaggacacttacaacaaacgaatacatggatatccatgtacggccttgtgattgtttctaatgcgtcactggaagaacagttgcctgaagatttattaaaagcacttaaagtatcaatacccgcctaa

SEQ ID NO: 316349 - DNA, 936 bp, Proteus mirabilis
gtgcttgttcagcttcaagttgcgcttgacgctgggcttcttcttcggctaaacgcgcctgctctgcacgttcagcagctaatttttcagcttctgctctttgcgcttcttggcgtgcttgttctgcttttagctgtgcttgacgttgagcttcctcttcggctaaacgtgcctgctctgcacgttcagcagctaatttttcagcttctgctctttgcgcttcttggcgtgcttgttctgcttttagctgtgcttgacgttgagcttcctcttcggctaaacgtgcctgctctgcacgttcagcagctaatttttcagcttctgctctttgcgcttcttggcgtgcttgttctgcttttagctgtgcttgacgttgagcttcctcttcggctaaacgtgcctgctctgcacgttcagcagctaatttttcagcttctgctctttgcgcttcttggcgtgcttgttctgcttttagctgtgcttgacgttgagcttcctcttcggctaaacgtgcctgctctgcacgttcagcagctaatttttcagcttctgctctttgcgcttcttggcgtgcttgttctgcttttagctgtgcttgacgttgagcttcctcttcggctaaacgtgcctgctctgcacgttcagcagctaatcgttctgcctctgctctttgcgcttcttggcgtgcttgttcagcttctagttgcgcttgacgttgagcttcttcttcggctaaacgcgcctgctctgcacgttcggcctctaaacgttgttgttctttctcttgtgcagtattttcttctttattacggccaaatccgagccacgagaaaaaaccttttttttcttttgccattagctactaaactcctcgcactaaatcatggcgcgataacattgacgatattaaaaataataatgaagtctatcatttga

SEQ ID NO: 316350 - DNA, 4104 bp, Proteus mirabilis
  misc_feature (3929)..(3938): n is a, c, g, or t
atgatgacaggcgtgattgaacctgtttcagtgatctttcctgaaggtgcatctcaaggtgttgaagttctctatcaagattttagttttggtcgttattttaaccaaattgctgccgcggtacttaaaggattactttctcactaccagcccactgtggctaagcctttgcgaattattgaagtcggtggtggcacgggaggaaccacctcttggctgctacctattttatcaaccatacaacatgttgaatacgaatttaccgatatttcacctatcttcacccgacgtgccgcacaaaaatttagtcaatattcatttgttaactatcgagagttcaatttacaacaatcccctgaaatacaaggttttcaatctgattattatgacattattattgctgctaatgttattcatgccactcaacatattggagatacattaactgctcttcgtactttactgcgttccaatggtcatttgcttatgcgcgaaataaccaaacaagctcgcttatttgattttgtttttggcccactggtgttacccctccatgatgaaaagatccgtaaaggaaaactatttttatcaccagaattatggcatcaacagtgtcgcttagcaggatttcaacatattcgctggttacctgatgcattaccagaaaccaaagatatgtgtgaacatattattctcgccagtgtttcgacagaaaacgatcactttgatcaagagttacctagtgacaccaagatacaacaaagttcacactaccaatggcaattaacaccttgtgtggaacaagatcttatcaagccaacattaatatttaaccatcaacaaacattgccttctgaaatcacagctattttatccgctattggatgtctttctgaacagggcgaaaatcaattaatcgttgccaaccttgcagatcctttaattatcgccgagcagatccgccaaatattactgtcatcgtctgatgggtttgttgttatcacgcaacaagcctgggcattaactgccatagaaacggttaatccagcacaacgtagtattcgaagtttattaaaaactattcaaaaagaatatagctcaaggttaattgccattgttgatttaggtataaatgcctcatggtctgaattagttcctgcttttatacaaatagaacaaggtaataatgaaattattgttcgtaaccattgctgctacttaccacaattaaccccactgccctcatcttctacgatcatagcgcagaacatcatggtatccccgcgctggcatattattactggtggttttggaggcttaggtcgaattacagcaagttggttagtaaggcaaggtgctaaacgtatcgctattttggcaccacgagctgatagcagcgcattagattggatgaataacttacagaaatctaaccagctagaaataaaatggctaacatgtgattgtcgtgataacgctcaatgtcatgcagcactcactcagcttgaaaatgaaggtggcattgaggggcttatacacagtgcaggtattttggatgatgcacttatgacacaactcacccctaagcgtatgtctgacgtattttctgttaaagcgatatctgccaagcaattttgtgatgctttagaaaaaacagatgccagttaccttattttatactcctctgccgctgcaactataggctctgaaggacaagcagctcattccctcgcttgtggatatttagatggattagctgaatatgcacgtcgcaatatcaagggattaaccgtcatttctatcgcttggggggcatggcaaagtgttggctttgtggcagaaaaacaactccatgataaattacaacacaaaggtatgagtacgcttactactgaggaaggactggcacatttagatgcttgtctgctagataatacctcttgtcgccttgcaatgcgcttagcgactccacctttaatgacacaaaaaacgcctttatttcatcagactaatcataatgatcattatgataaccatgaaattaatcacactcgccagctttgtgaaaccccaactcaaacggatcaaacagagccggtaagccctaacagggttgattatcgcgttggtgataacttagaacagtggctaacagcatgcatcaaacaactgttgcgtcttggtgatgaacatattgatactcacattgaactattccaattaggactagattctctctctttcctcgatctcagtgcggaaattaagaaacagtttgcggtcaatattgacgctgaacaatcttatgatgatatgactattgctggtttagcctcagttattcgaaccgcagcacctgagaaatttactgtgacagaagcactccataatcaagacaacatttcccacacaatggagtcagaacgatatgccccatttccattaacaccaattcaacacgcctattggatcggacgtaaaaacctctttaactacggaggcgttgcttgccatgcaatttttgaatgggattgtcaacgccatatatgggagccggcctcacttgaaaaagcttggaataaagttattcagcgtcatgatatgttgagaatgatcatagatgatgatggacaacaacgtatcttaaaagaagttccttattttcattttattcaacatgacctaacaaatttaacccaacaagagcaacaagagagcctaacacagataagggaagccctttcttatcgggtattaccgactgagtcatggccattatttgaagttgaaatttcttggctaaataacgattgttacagattacatatcaatctagatttactgcagtttgataccatgagctttaaaattctgtttgatgatctatttaacgcctattcaggacaagaattaataccacaaacatttaccttccgcgactactgcttaaaaaatcaaacaaatcgtaacagtgatgagtggaaaatggcatggtgttactggcaggatctattatctgatttaccttctgccccatatttaccgataaagaattcatccattactgaacaacctcgttttacgactttccaacatcatgtttctatagcgcaatgggacaaattaaaacagaggtggaaaaagcatggtattacaccatcagcagggcttttaacactttttgctttagttttaggtcgctggacaaaatacccagcctttacactaaacttaactttctttaatcgtcaaccatggcacccagatgttacacaacttattggtgattttacctctgtactccctatagatatttatctagataacgactgtacattaaatgagtcaatggcaaaaatacagcgcagactttggcaacatttaagtaagtcccaagtaaatggtgtagagattttacgtgaatggggacgctataaaggggatagtagccaatctctgttacctattgtatttactagcatgttaggtatgacactagatggtgacaatattgatgaagcattaaatcagcttttcggccaacccgtatatagcttcgcgcaaacacctcaagtttggttagatcaccaagtaatggaaggaaaagaggggctaacattaaattggttctgcatggatgacatctttgctgacggtttattaacaatgatgttctctgattatcaaagcttgatcactcaattatgccaagatgaagataataatcaatcagttgataagattattgcgcaacttccttcatatcaacatttagcaatagataatcacctccaatcacgctatcaacaactcgagcaaacattggaaaatcatccgcaaatcaaacgtgctcatgctatggtaatggtaaaagacgatacgaaagtagagcctcctctacaattactgtttgaagcctcttctgatannnnnnnnnngatattccactatccgttattaaacagcccaattggttacctaatttactttcgccatcagcttcactcagtgacattattgaaaagagttggcaacgatttgaggaacgagcacggtatggcatatgtcacacactgtatcgaaatgctctttttaccgagctaa

SEQ ID NO: 316351 - DNA, 195 bp, Proteus mirabilis
atgaatacgactattgataccaatcaatggtgcagtcagttcaaaaaatgcaaagggtgcaatcttgatgctgagtgcatggttaagccagaggaaatggctttagttgtagaggatggaaaaattgtcgataaatgggcggtgaggactgccgccatgatcgaaagagagatcaagcgaaaaatggaaacttaa

SEQ ID NO: 316352 - DNA, 918 bp, Proteus mirabilis
atgcaaaatttagatggagcactggaaaattatactagcttcatgcttgatagcttcagaaaagcatacttcccagattcagatatagtttcatattatggcggtataactttttggtctaaacatgtattccaaccaactatatctaaattgggtaaagtagcaaaaacgcgtgaaacgaaaaaactagttatcatgctccacacaacaggcggaagtgttgaatcagtagaaaagctagttgaaataactagaaacttttacgatgaagtttattttattattcctgattttgctatgtctgcaggaactatctggtgcatgtcaggcgataagatatatatggactacgcatcatcacttggccctattgaccctcaagttctgaactcggaaaacaaatgggttccagcattaggttatttagataaagtagaagaaatattaaataaatctcaagaaggagttgttactcaagctgagcttatgatgctaaatagacttgatttagctgaactaaggagatatgaagaggctagagagctttcaaaagaactgctaaagaaatggttagttgactacaagtttaaagattggatacgcaaggagacttctggtgaagaagtcacaaaattagataaagctactagggcagaagaaattgctgtactattatcagacaatagaaggtggcattctcatagtaggtctataggtattaacactatagttaatgtgttaaagttaaaaatagaagactattcagaaaatgaaaacctatcaaatgatattaatctgatacataatttactaattgaatttggaatgaagtctaaccgagaaatcgttgtgatagggtcttcaccatttacagatgaagataatcacaaggagggagagcatgaacaaaatgattaa

SEQ ID NO: 316353 - DNA, 252 bp, Proteus mirabilis
gtgagtgatgaaacatacaaatggatagtagccacgttatcaatgatgggctacgtgtggattgttacacaagcgttttgctggttcttaagtttgatattcagcaaattatttaaacgcaaatcaaaggaacgaaagcaagcggcaattgatgagctgtacgatgcgtttgaacttagcgaagtcaaagataaccagacaattaaggttgcaaccaaaggcggtttagtcgttatgatttatcgccaatag

SEQ ID NO: 316354 - DNA, 237 bp, Proteus mirabilis
atggctgcgttactgcaaacgccagaatatttgcaaagtactaaagcgtggtatcagcaaagattagcgggtgtcgataccacaacagtagagggaaaacgggcgagactggcttttttagccaccgagggggctttcttgctacgatattttggtttaatggatattgatgataatgagtgggaagagatttttagcgatatcgattctaaactcattaatgccgaaactaaatga

SEQ ID NO: 316355 - DNA, 501 bp, Proteus mirabilis
atgcataatgaattatgggcgttattgcgcccttatcgccctttgttaataggtgccttgttgctacaagctgtcgctggttttagttctttagtaccttggttagctctttatcaacttcttctttctttcccttttaataatacgttatggttaaccattgctgttattggtggcgtggtatggcttatctcacaaaccattgcatttcatttgacgcatttaatggatgctaaattaacctatcaattacggttagcattatcagaaaaaatgcagagattaccgctcaattggtttattagccaagggaaaaacggtgttagccaatatgttcaacatgatattaaagcattacatcaattaattgcgcatgcacctgctgatattgtgcaatttatcgttgtacttttattcctcttatcattgcttatttttgttttaaacaaacgcaatcttcacgttatcaaacctattgtgaacagcgtgatagggcgatga

SEQ ID NO: 316356 - DNA, 252 bp, Proteus mirabilis
atgattggtcaggtaagccatgcattaaataatgatgaccgtccatttgaattttttatgaaccgttttcggttattagaagcttttcctcggcaagattttagcgactacacggggcttgcacaagagactatccgtaggcaaattgatgaagcactcgcattaggttatatcagtgaaacagaaacccattggcagataacgccccacggtaaactgtttcttaattcattacttgaactctttctttaa

SEQ ID NO: 316357 - DNA, 1056 bp, Proteus mirabilis
  misc_feature (1043)..(1052): n is a, c, g, or t
atggagacggtagagaaaaagagtattgcagggcaacaaactgctatacaaacagatttttcaacacgtaatgcccttgctcgtatcattcgctgtctttttgcagaaaaattattggatgataataaactgcaagttttcaatgatgaaaataacgttaagtacccgctttctgatgggatacatatccttcaatttaatcaaacgaccgtttttcctgcaaataccgttattaatcgcggtgatattatccttaaatcaatggatggccaccaccgaatggtgcaatcccatgaagaacttatggggatactgaaaaacgaacttagtttcacccctacaacggagggaatgacaaaattcaataaagatgtagcaaacagtatccataatgatcgattagctagagcacatcggtcaaagtggcgggatacgatttctaatgagatggcacaagagggaacatcttgttttattgaatggataacacgtcattacagtcggcgtgatggtgcaacttttctcgatcagtggggcgctcttgaaggtcattcttattacccaacttggaagtctagacccggtttaagcgatgatgatattgtcgcactatcagctgaatttggtgcacgagttaatctgcgcatcgcagccatacaaagcgatatggtttattgtgagaagatgccccatattcaggatatccatcaatggttttcatcggcttttccaaccgtttggaataaatggtgtgagtggcttacaagtcaacatcaaaacccacaaaaatggttacctattcctctacatccttggcatcttgaacactggatcattgcgcatttctcaaaagaaatagatgaaggcattcttctaccattaggccctcaacttgagactgcggcatccatgtcgtttagaaccatgcttcctaccgcatctaaatcaccctttatcaaattacctgttgctatctggatgactagcgaaatgcgcagccttcaagccaaatctattcatatggggccacgtattagtacgannnnnnnnnnatga

SEQ ID NO: 316358 - DNA, 2904 bp, Proteus mirabilis
atgccttttactcttggtcaacgttggattagcgatacagaaagcgaacttggactaggtactgttgtggcaattgatgcccgtatggtgaccttactttttcctgcatgtggcgaaaatcgtctttattcccgccatgatgccccaataacgcgggtgatgtttaatgtgggggatactgtcaccagtcatgaaggctggaagctcgccatcgacaacgttgtggaagataatggcttacttatttatcacggcgtacgtttagataccgaagagccagcacaactgcgtgaagtattcttagataacaaactcacttttaataagccacaagatcgtctttttgctggtcaaatagaccgtatggatcgttttgctttacgctatcgtgcgcgtaaatttatgagcgaacagtttaagcaagcacaaagtggtctacgtggtattcgcgcaagtcttattcctcatcagctctatattgctaatgaagtgggtaaacgtcataacccacgtgttttattagcggatgaagttgggctgggtaaaactatcgaagcgggtatgataatccaccagcaaatcatggatggacgcgctgagcgtgttttaattatcgttcctgaaagcttacaacatcagtggttagttgagatgttacgtcgtttcaacctacgtttttcactgtttgatgatagccgttatagcgaatctttattagatagcgataatcctttcgaaacagagcagatgatcatttgctcattagactttgtgcgtaaaaacaaacaacgctttgaacaccttgttgaagcgacttgggatatgttagttgtcgatgaagcccaccatctggtatggagtgaaaaggcaccaagtcgagaataccaagttatcgaaacgctggctgaagcgatcccttctgtattgttattaaccgcaacaccggagcaacttggtcaagagagccattttgcccgcttacgtttgctcgatcctaatcgtttccacgattacaacgaatttattaatgaacaacaaaaatatcgccccgtggccgatgcggtaactattttgctttcagaagatgatttaaataacgaacagcaaaatagcatcagtgagatgatcagcgagcaagatataaagccgttgctaaaagcctctaatacccaaggtgaagagcgtacaaaatctcgccaagcacttattcatatgttgatggatagacacggtacgggtcgtctgttatttcgcaatactcgctccggcgtcaaaggcttccctaaccgactgttgcacgcaataaaaatgccactaccaactcagtatcaaaccgccattaaggtggctgagattatggcagcgaaaaagagcctcgaagtacgagcaaaagagatgctctatcctgaacgtatctaccaagagtttgaaggtgaaaatgccacatggtggaactttgatccacgcgttgaatggctactaggctttttaaccgccaatcgtcatgaaaaagtattagtcatttgtgctcaagccgccacagcattgcaattagaacaagttttacgtgaacgtgaaggtattcgtgccgcagtattccatgaagggatgtctttacttgaacgagatcgtgcagccgcttatttcgcctcagaagaggaaggcgcacaagtgttactatgttctgaaatcggttcagaagggcgtaacttccaatttgctaatcaactagtgatgtttgatctcccctttaatcctgatttattagaacaacgtattggtcgtcttgatcgtatcggtcaaaaccgcgacattgatatcagtgtgccttatcttgaaggaaccgctcaatctgttctattacgttggtatcacgaagggttagatgcatttgaacatacctgcccgacgggtcgtacaatttatgacaacgaatatgatgcgctagtcaattatcttgctcaacctaatgaactaggtgattttgataagtttatcgtttcttgtcgtaagcaacatgatgagatgaaactcaaactagaacaaggtcgtgaccgtctattagaaatgcactctaacggcggtgaagttggcgttgagttagcgaataagattgcagagcaagataacgatcccgatctggttaacttcgccttaaacttatttgatattgtgggcattaaccaagaagatcgtagtgatagcttaattgtattaacgccatcagatcatatgttagttcctgacttccctggattaccgcaagatggttgtacaattacctttgatagagagcacgcactctctcgtgaagatacgcaatttatcagttgggaacatcctattatccgtaatggattagatttagtcttatctggtgatactggtagttgtgcggtttctttattgaaaaacaaagcattacctgtaggtacgctattagttgaactgatttatgtcgtagaatcgcaagcccctaaacatcttcatttaactcgcttcttaccggcaactccggtacgcttattacttgatttaaaaggtaataatcttgcatcacaagttgagtttgaaagttttaaccgccaattaaatgcggtaaatcgccacacatccagcaaattggtcaatgcagtacaaaatgaagttcatcatgtactaaaagcatctgaatccttaatggaagcggaagcgaaaacgctaattgaacaagcgaagcaagaagcagacaacgcattaacacatgagttatcacgcttagaggcattacgtgccgttaacccaaatatacgtgatgacgaagttgaagcaattgaaaatgagcgtacgcatattcttaaccacttagatgaagcgacatggcgcttagatgcgatccgtttaattgttgttacccaccaataa

SEQ ID NO: 316359 - DNA, 225 bp, Proteus mirabilis
  misc_feature (213)..(222): n is a, c, g, or t
atggcgtcactgaaagatgttgctcgacttgcatctgtttctttgatgacagtctcaagagcgattaataaccctgagttattaaaaccagatacgttgaaacaagtccaacgcgcaatcgaagaactgaattatgtgcccgatttttcagcgcgaaaaattcgaggtcaagggactaaggtctcatcgatcggtgtgcttggtattgatacnnnnnnnnnntga

SEQ ID NO: 316360 - DNA, 243 bp, Proteus mirabilis
atgccaatccaaacggatcaatataccccgtcggacaatgcacatacccatatggattcagcccacccaataaccctatggggtctggagaaagatactgccctgtttccttatcataatagcgaaagcgattataaagccacttttttcatcttcatactgccccgcaatgcgaaaaggacattcggtataattagggtcattctccgccttgctctcgcggggttccttggtggtcggtga

SEQ ID NO: 316361 - DNA, 1350 bp, Proteus mirabilis
atggatgcgtccaatttagccccatcggcgaaatcaagcccgataaacaaacgagggttaattattttagcaatcgacgttgtactactgctgttattgctagaatttttaccctacgatccaaaagctaatgcaggtttagcgttaatggtgtttgtgggtgtgttatggctgacagaagctattcacgtaactattacagcgttgtttattccaatccttgcggtagtgctcgggttaatgaacaccaatgaatcgctaaaatcttttgctaatccgattattttcttattcttcggaggatttgcattagcaacagcgcttcatattcaaggattagatcgcttaatcgctaaccgcttactgatgattgctaaaggcaagctctccattgctgtcttattactttttggggtaacggcattactctcaatgtggatcagtaacacggcaactgcggcaatgatgttaccgttagtgttagggattttatctaacttagatattcgttcagaacgtaatactttcgtcttcgtactattaggtgttgcttatagtgccagtatcggtggtttaggtacattggtgggtagcccgccaaatgcaattgctgctgctcaactaaatttagattttattacttggatgaagtacggtgttccaatcatgttagtgctattgcctatcatgtttattgtgatgtatctgatgctacgtcctaacctaaaacataagtttgatctgaaattagaagtgttagagtggaataacaaacgtgttattaccatgattatcttcttagtaacggtattttgctggatctttagctcctttatcagtagtgctttcggtggtgtgaaagatttagataccgtcattgcagtcagtgccgctattgttatcggggtgacgggtgtagcaagttggagtcaaattcaggaaaatacagagtggggcgtattaatgctgtttggtggtggtttaacactgagcgcaattttacaatcttctggtgcaagtttggttatggctgattttatgaaagatacttttggtaacagccattggtttgtcattattcttgctgtaacaacctttattattgttttaactgaattcaccagtaataccgccagcgctgcgttacttgttcctatctttgcaacggtggcacaagctttaggcatgcctgttatggcgttaacgatgattattggtatcggtgcatcatgtgcctttatgttaccagtggcaacgccacccaatgctattgtatttggctccggatatattaaacagacagagatggtacgtgtaggaggagtacttaacctaccttttttattttaa

SEQ ID NO: 316362 - DNA, 204 bp, Proteus mirabilis
atgccattccttgaccaaatgatgtatacctttattttcaccgcggttgttattggtttggtcagcttaacctcaacgaaaagtgatgatagcgcaggggcgattgtattaactgatgcaacatttaaaacccaaagtgggttcaatattgcttcttatatcattatgatcatcctctgtgtgctttatgctgtattttggtaa

SEQ ID NO: 316363 - DNA, 972 bp, Proteus mirabilis
  misc_feature (958)..(967): n is a, c, g, or t
atgctgactcaattaactattagtcattttgccatagtccgtgaacttgaaatcgacttttctggtggcatgaccacaattaccggtgaaacgggcgcaggtaaatctattgcgattgacgcattaggcttgtgtttaggaaaccgtggtgatgctaatatggttcgccctggtgccactagagcggatttatgcgcacgattttcactctctgataccccttccgcccagcgttggttagaagaacatcatcttgacgatcataacgaatgcctattaagaagaaccattgcagcagatggccgctctcgtggttttattaatggtacttctgtccctttgtctcaactaagagagcttggctcattgctgatccaaattcatgggcaacatgctcatcaacaactattagagcctcgctaccaaaaacatttacttgatatctatgctaatgaacctgctttattaaaaaagatgaaagcggcttatcaaacctggcatcagagttgccaaaccttagcgacttttcaacaacaatctttagaaagagaagcaaggcaacaactgattgattatcacttaaaagagcttaacgagttccaacctgttgcgggggaataccctgaattagatcaagaatataaaaggttatctaattgtggtcaatttctgaccttgagccaaaatagtttgcagatcttaagtgataacgaagaacaaaatattttaagtatgctgaatgtggccaagcatgaaatcagcgaactttgcacaatggagagccaatttaattcactgttagatatgctggaagaagcaagtattcaaattagcgaagtgagtgatgaactacgccactacagtgatcgtttagaaatggatcctaaccgtttattcgaattagaaaaacgtatttccaaatatattagtctatctcgtaaacatcgtgtcacccctnnnnnnnnnncctga

SEQ ID NO: 316364 - DNA, 291 bp, Proteus mirabilis
atggcgctattgaaataccatttgaaccaattttgcaaagcttggctgcccctggtggataaccttgaatgcttgaatgaattgatagctaaagagcctttgcttggtaatgattaccaaattggtcatgcctatttgatggacttgaagtatgcaaccagccttacagtttcggaagtacgagagcgtgtatgggatgattgtattcgtccgttattacaggagtatcttcgtggaacgggtaaggagactgaactgattagctccttcggaaaggcgtttggggtttaa

SEQ ID NO: 316365 - DNA, 435 bp, Proteus mirabilis
atgccttctttgggggctttgatattgtattttatgcgtgatacttcaagccttgcttgtgtcgtctgtaacgccagatccattgctgttctttttacatgttccagtgagatttcatttgcggggatatctttaaaaaagatcttaattctctctaagtcattaacccagttactaagtgtactgtctgatggtttctcatcattagtgatccgtaaaaataacttatctaaatgttctgagagagggagtgcctctccatattgccctcccgagtcaataattaatgagttaacagaaacgcatttttctggtcgcataatattgttgtattctctggctattgcgatagcttttgctttatctgcaccaatgcattttcttaaaccattagttaatgtaaggcgatattgtttaactgatttatcaaaataa

SEQ ID NO: 316366 - DNA, 402 bp, Proteus mirabilis
  misc_feature (333)..(342): n is a, c, g, or t
atgaaaaaagataaatattttcgtatcgtgctgttattcaacgctaataaagtctatgaccgacaagttgttgaaggggtaggtgaatacttgcaggcgtcacagtgccattgggatgtatttattgaagaagatttccgcactcgccttgataatattaatcattgggtttgtgacggcattattgcagactttgacgatcccattattactcaacatttaagccaatcacccttatctgttattggtgtcggtggctcttatcatcaagcaaaagattatccttctgtgccgtatattgctactgataattaccaattgattcatcaagcnnnnnnnnnntgtttaagccctttttgctttttatggattaccggcaaaaaactacccgcattggtctaa

SEQ ID NO: 316367 - DNA, 195 bp, Proteus mirabilis; identical to SEQ ID NO: 298769

SEQ ID NO: 316368 - DNA, 681 bp, Proteus mirabilis; identical to SEQ ID NO: 300238

SEQ ID NO: 316369 - DNA, 1026 bp, Proteus mirabilis
atgaagttactgttaacgccgtatattcaaaaagaactgggtgttgtgttacttaaaccgggtgctgaattactcgagcaatttaagaagcaccaccgagtgattatcagtgatgtaccgcagagtttagatgtattgccctcaggcgcattaaccggtgatgaacagccgattttaaataatcggcacattgtccaatttcttaataacaaaaaggtgatccacaccatcgacaaagtttcaccgatggatacgtgggtcgctcatcatattcattgttgtcagattaataacgatgcagataactatcatcatcatgaattggtgaccacatttcatgaagcgggtgtgatccgcacttgttggtatcacgataatcatattcgaaactcatcagcagggtgggttgctgagctggctcataaaaatcgtattgattggatgttagatactattcgttttcgtttgagattagattgtggccaccagctgacgatacctgattttttcacctttgctgttatgcataacgttatcgatgaattacctgatgccatattgcggagagtgttggactggcctaataaacccaaagaacgcagagtacacggcggatttcctgaggctgatattgttccaaatgaaatatcagcattatctgcaatgagcgggcgtttagaggcgataaaaccggttattaaagttgctgtcgatccggagccaccagcctcatttctgctgaaacctaaaatgcaacgttgggaaaatacccaatggttgcaatgggtaaaaactcaaccgtgttgcgtgtgtgggcaacaggctgatgatccgcatcacatcataggtcatggtatgggaggcatgggtactaaagctcatgacctattcactattccattatgccgcattcaccatgatgagttacatcgagacccaaaacaatgggaagcgactcacggcaatcaactcgaattgttatttcattttttaaaccgttctttaggtatcggtgcatttatttaa

SEQ ID NO: 316370 - DNA, 804 bp, Proteus mirabilis
atgaatggattaattgttattgatggttttcaggttcgtagagatgtagccggtcgctattgtttaaatgatttacatcgagtgtcaggtggtgaaaaacgacaccaaccatcgaactggagttcattggctcaaacgaaagagttaattgatgaaatttcgaccgctcctgagatcacaggagcgcctattgccactgtcgctggtggatataaccaagggacgtatgtttgcaaagaattagtgtatgcctatgcaatgtggatcagcgctgcttttcatttaaaagtgatccgcacctttgatgctttagtgtcacaacagcaccaggagaaactcagtgataaggttcaagcgggtgtgatactactggagtcgatgtctaaaagtttaaatttttcgaattcatcaaaattaggggcttatcaaaagttacaagcaatggcaggattacctgaattagcccctgtgtatgcgattgatgcaccaagtggatctatggatggctccagtcgtccaacagttgcattatcaacactgatcaacaaacacaacctacctatttcagcacagcaagcctataagcgattagccgaactcggaattgttgagcgtttatcacgtccaagtacgaaaactgccagcaaagtaaaagagttctggtcagtgactgcacgaggttgtcagtttgggaagaatatgatgagccctaataatcctcgtgaaacccaaccgcatttctttgagagtaaaacggatgagttgatccgtatggtgatgttgaataaacaggtgagcgcatga

SEQ ID NO: 316371 - DNA, 654 bp, Proteus mirabilis
atgaaatgggcatgtttagctaacgggtacaattatgatattaaagggtgccaattgattattctagagcaagaattcaataaatatggaattagcaccgattcactatctgtattagaaaccgactttatcaaagatacgctaggggtcgatgatgcgctggttaaaactatccgctacggcactatatttaatgctggctctgttagtttgtcagcgaagggaagtatggtaaaaaagctacaaaagctctattccgacgattatgtatcagaaatgctgaaacattgggaattagaaacaaaagaactttgtgacagtttaaacctacttcttgacgagtatctaaagacaggaaagaagaatggatatgggttatgtgttacaaatgctgtaggacatccatttaacacaacgtggaggaagtcacatagcggtgagtggaaaaaatggactaaagatagtaaaaagatgaagcgaaagttgcttgcccatatgattcaaggactagaaagcggcgcagtctatgattatgtgagttcacacagcggtgtttgtgcattagaacatgatggatttgtgagcttgcataagctgtttgatggcgattggaagcactcatatttggatataatgctgaaacatggttgttag

SEQ ID NO: 316372 - DNA, 234 bp, Proteus mirabilis
atgcgtgaagcggttatctcaagtgaaacagaaatatcggtacaactcgaccgtcgtggtaaagtgtttgatagcttattagctacagtaaaaaaatatcttagtcatgaagccgatgtttttactaaaatcaccgaattaagagctaaaacacaaaagcggcagaagatgagctatcaaaaattgtttcaagtggtgcgattaatgtcgctgttgaaaactatcctgaactaa

SEQ ID NO: 316373 - DNA, 192 bp, Proteus mirabilis
atgaaaaaccagaatatcacaggcggtatactcgccggtggccaagctactagaatgggaggcgctgataaagggcttcaactcttacatgggctacctttatacctccatattgcccaaaagttatcaccacaggttgcctctattctgattagtgcaaaccgtaatctggaacgctatcgccaaagctag

SEQ ID NO: 316374 - DNA, 834 bp, Proteus mirabilis
atgaacaatcaacaagccgaacaactaaaaaagattatgatggctgatagttattttgcacaacctattacgcccccttttccacagcctttagcaataaaatcattacaacagacacttaatatcaaagatacagaaggacttgttcaatttattatcgcttcacctaaacgttttaacgaatcagaaaaaatgatcatgacacagctgaaagatatacaaattgccttaatctctattatgtcgaatcatctttcagtattaaaaaaagaagatagtgaagcttattatcaaccagagcattggctagaaacccttaatcatttgcctttgcttagccgtaataaagttgaaagcaaacgacttgataagcaaacatttgatttttcaattgctcaagcctttgtgcaactgttattaggtgcggccattaatgcagcgtcaccgtcattagccgagtttatcgattttttacgcaatcagggacaacaaattgaactaggaatacgccaatcctttgatagctataaaacgataactattgcaggtgtgacggaaatccttaatcataataatcagcttatttttgtacctaaattaaaaataatgagtctacgtttctcacatcgaacagccaaaatgttattagccagttgttcggggcgaaaatttacgatttcagtagaatacacaacaatcacctcaatttttgatattggtgcacttaatgatccactgattaatcgacaattttatgcttttttaaataagtttcgtcagttgagtattactcaatctgattcattttttagtggggactttttattgcaatag

SEQ ID NO: 316375 - DNA, 411 bp, Proteus mirabilis; identical to SEQ ID NO: 309872

SEQ ID NO: 316376 - DNA, 270 bp, Proteus mirabilis
atgcgtagtttggtaaacggcagaaagattattttagaaaatgatacaacaaataccggcggtaccgtgcttaccggctcttctattgctaaacaaacacaaggggttgcctgtgtaggtgatcctgtttattgccctgcgtgtaaaaaaacaggcactattattgaaggggataatttaatgaaaattaaaggtatccctgtcgccctcgaagggcataaagtcgcttgtggctgttcagatggctgtatactcgttgcaacagattaa

SEQ ID NO: 316377 - DNA, 492 bp, Proteus mirabilis; identical to SEQ ID NO: 303115

SEQ ID NO: 316378 - DNA, 336 bp, Proteus mirabilis
atgcgtgtattaacccccgcatttgtacaacattacccaaatcaaattattaatattcatcactctttcttaccggcatttattggcgcccgcccatatcatcaagcctatgaacgtggtgtaaaaattattggcgccacagctcactatgtaaatgataatttagatgaaggccctattattactcaaaatgtaataaacgtagaccacactttttcagcagaagatatgatgcgcgcaggacgggatgtagagaaaaacgtactaagccacgccctctattgggtgctctcgcaacgtgtttttgtctatggcaacagaacaattattttgtag

SEQ ID NO: 316379 - DNA, 321 bp, Proteus mirabilis; identical to SEQ ID NO: 300325

SEQ ID NO: 316380 - DNA, 156 bp, Proteus mirabilis
atgatgttcttactttgcttatcctatgctgcattagcttttgctgcttcagcaatatggtctttacccggtgatgttgcacctagaaatatgacgtctgtattaggtggaatgcaaagtgcagtttcaaactgcggtggtatattgggccaatag

SEQ ID NO: 316381 - DNA, 351 bp, Proteus mirabilis
atgaattacggcgatatagcggtaccttatactcgcatacatgaacataaacacttctcaccatgggaatctcatgacaaaacgatttatattgaagaacatagtcgggtatgcgaagagaatgatattccttactatcccattcatttagaagaagaaaataaaatattaaacaaatacttagaattggctcaaaaagaaaaatatatcacttttgcaggtaggctaggtacatatagatatatggatatggatgtatcaattaaagaagcacttatgcttgcagaaaacttagtatcagatttaataaatcaaaatgaacttaaatcgttctaccacaaacaccaataa

SEQ ID NO: 316382 - DNA, 129 bp, Proteus mirabilis; identical to SEQ ID NO: 298575

SEQ ID NO: 316383 - DNA, 633 bp, Proteus mirabilis
atggttctcggcaagccgcaaacagacccgactcttgaatggtttttgtcacactgccatattcacaaatatccatccaagagcacgctgatccaccaaggtgaaaaagcggaaacactttattatattgttaaaggttccgtggctgttcttattaaagatgaagaaggaaaagagatgatcctttcctacctaaatcaaggtgacttcatcggtgaacttggattatttgaagaaaatcaagaacgtagtgcatgggttagagcaaaaacagcctgtgaagtagcagaaatttcctataaaaaattccgccaattaattcaggtcaatcctgacattctgatgcgcctttccgctcaaatggcgaatagattacaaaccacatcagaaaaagtaggtaaccttgctttccttgatgtaacaggtcgtattgcacaaactttattaaatttagctaaacaacctgatgcaatgacgcatcctgatggcatgcaaattaaaattacacgtcaggaaatcggtcaaattgtaggttgttcacgtgaaactgtaggccgtattttaaaaatgctggaagatcaaaacctcatttcagcacacggtaaaactatcgttgtttacggtactcgttaa

SEQ ID NO: 316384 - DNA, 972 bp, Proteus mirabilis; identical to SEQ ID NO: 307492

SEQ ID NO: 316385 - DNA, 273 bp, Proteus mirabilis
  misc_feature (237)..(246): n is a, c, g, or t
atgctaattactatttcaccagctaaaacactggatttcgaatcgcctttagcaacaacgcagttcacccagcctgaattgctaaaatattcccaacaacttattacagaatgtcgaaaactgtcgtccagtgatatcgcaagcttaatgaaaattagtgataaattggcaggactaaatgcggctcgctttggtgaatggcaacctgactttacacccgataatgcgcgacaagcnnnnnnnnnnacaagccattttagcgttcaaaggtga

SEQ ID NO: 316386 - DNA, 417 bp, Proteus mirabilis; identical to SEQ ID NO: 312515

SEQ ID NO: 316387 - DNA, 1113 bp, Proteus mirabilis
atgcatattgatagtttcccagacgatgataaattacgcgtagtttatgcaactggttctgtacctaaaaccaatgatttcgtttctaatcctttagtgaatatctttgttgctttagttccccaaaaagatcaatcacgtgaacctcaattactccaaatcccaatatcagatttagatatagtacgaagaggatctgtatggttggggcaaaaacgagtttctataaatgaacaagaatattttgaatttcgatcaaatattttaggtaaatatgagtgtttcgaagaagattttgtgattgatgagattccacttgataataaactattaaaatacaatacaaaattcgaaaatggtgagtatctaattccctataattacttccctttacctaaaagtggagatagtgattggagagttgattataaaaatcgtacgagaataatgaatagttactgtaacgtatttgaaaataatggcatcgaatatgtcataccttgtatggaaatattttcatctctctatgcaccaatgcgcaaagatttaagacgcatgatcatgacacactcgaaagaggacatattaaaaaaatacattgcaatagatgataagagctttaaggttcattcaaataaagaagtttcgctaaaactaacaacaagtctcggtgatagttctacagtacttttaggacatctactattatctgaatatacaaataggatgtttgaagtcataaaaaacagtattcatacagttgatgacttcaataacatttatccaatagttaaaccatattttgttggaaaaactaaaattagtggtagaggtgtttggctaaatgaagataaaactaaaatgctcgtactccgcattaattcctttatgcttccaagcgatataaaaataaatgtggtagaaaaaaggaatgtaacatcagaaacagaaagtaacataaaaccaaataccgagcttacagttactcgtctaataataggtaagcctgagttaaatatcaccatagatagacccacagagggtggagaccgattactgaaaatattgatgaaaattctgaagacgatgagggcgaatataattatggtatag

SEQ ID NO: 316388 - DNA, 357 bp, Proteus mirabilis
atgtctactgcaacaaatctgaatgaactacaggaacaagttcgctcccgctataatggattaagtaaaaggctacagcaggttgcacattatcttttggataataaaaacagtgtagcatttgatacaatcgcgatccttgcagataaagcaaatgttcctccatcaacattaatccgttttgccaatgcatttcatttcaaaggatttaatgaaatgaaacttttatttcaacgtcatttaatgggtgaaatggataatgaaaaattaacctataagcagcaatctcacacattttttgcatttcttctgaataagggtggaaatggatgccaaacagcacatctctatgtgtaa

SEQ ID NO: 316389 - DNA, 321 bp, Proteus mirabilis
atgttaaataaaactatacaactacttgagtatgcagaaactatctatataggtggttttcaccattcttttagtgctgcgagctatttttttcacacgctttctcatatcccttgtgaaaccgtctttgttaattgcctagggggaatgtataaagaacaacttaggaatattacacatagagatgtgctgtttggcatccatttccacccttattcagaagaaatgcaaaaaatgtgtgagattgctgcttataggttaatttttcattatccatttcacccattaaatgacgttgaaataaaagtttcatttcattaa

SEQ ID NO: 316390 - DNA, 249 bp, Proteus mirabilis
atgatgaaagctgttattcctgtcgctggattaggcacacgtatgttacctgcaactaaatccattccaaaagaaatgttaccgatagttgatcgtcctttaattcaatatattgttgaagagtgtgcacaagcgggcgttgaagaaattattttagtgacacattcatctaaaaactcaattgctgatcattttgataccagctttgaattagagaagaagttcgctctatttgtcctgaaaatgtaa

SEQ ID NO: 316391 - DNA, 138 bp, Proteus mirabilis
atgaggcgttttattagggtagatcttcctcctgacctatcattaatgataaatgtgttaggaaacgcctcaaacaaagcctttgtgatagctgttcaaaagtctgtcctgtggacgctatcacttttagtcttttga

SEQ ID NO: 316392 - DNA, 354 bp, Proteus mirabilis
  misc_feature (338)..(347): n is a, c, g, or t
atgcaaaatgtgttgttaacgttatggcctttatttgcgttaattgcgctaggcgctattttaagaagaaataaagcatttgaacctgcattttgggtaggggctgaaaaattaaattattttttactctttcctgcattacttctcaatagcttggctaatgctcctttatctgatcctcaattacctcaccttgctggggctattttctcagtagtcatcattaccactattttgtgtgttatttttaaaaaaataaccggctggtctgctggccgttttggtgcgatcgttcaaggcaatattcggtttaacacttatttaggtttagctattgnnnnnnnnnngctttga

SEQ ID NO: 316393 - DNA, 336 bp, Proteus mirabilis
gtgacattagatgctattgttgaaaatagtgaagaaaatgaagaggatgagcaaaacgatgccataatagaagacagcattgatttagctcaatcacttgatttaaattcaattggcgctattccgattacaatatcttttcttttagccaataaaacattatcaattgatcaacttgaagaattaacaccagggaagaaatttattttacctgataatgccattcgtcatatcaatattttagcaaatggtaaagctattgcccaaggagaattaatcaaaattaaagatatgttagcggtagaaattaataaattatctataaaatgcgaataa

SEQ ID NO: 316394 - DNA, 453 bp, Proteus mirabilis
atgagtattaacgtagaggtagataataaccataaagaaacaaataaaattaatgacatggtaatattatcttctatctttggtacaaaaaaaataacagaaaaacagctatattttgtattgagatgtgagaataaattaggaaccttaacggcgttaatttcagttagtcaagtcatggataacttatatcctgaaaaaaaaattgattgggaattagtacctgaaaactatttaattgctcttttttcacaatctttatcaacattattatttcctttttctaaagagccaatgtcatcatgtgttgataatatctgtttaggtgctgaaaaaggatcttgctatccttgtgtacataccacattaggtcatgtttttatttgcgatattaaatggaaatatgaattgacagtatttccaattaccaggggatgttttattaatagatga

SEQ ID NO: 316395 - DNA, 432 bp, Proteus mirabilis
  misc_feature (417)..(426): n is a, c, g, or t
atgccattgagagagaaaaagtatcaccaaaatcaagagagcattttattttttccaggtcagggtaggccttatttaggtatgggaaatagggtatatcgtgacgttccatcaataaaagaagtatggaattgtgcgagtgaaatagcagggttcgatgtaaggacggtttgtttaaaagggcccatgaataaattggtacaaacctgttatcagcaagtggcgttaacaactatcaatattgcttctctttatttactgcgtgagcattgttgtgtgaatgaggcgggttattcagggcacagcgctggagaatattcagcgttatttgcggcgaacgtactggaacttgaatctgtctttaagttaattagttatcgcgcatctatcatgcaacagctcgctaagaataacaannnnnnnnnngaataa

SEQ ID NO: 316396 - DNA, 462 bp, Proteus mirabilis
  misc_feature (418)..(427): n is a, c, g, or t
atgcaatgcgcacgctccagtgcgggtgattgccactcttgtgagtggctttctcttgcttattccgaacaaattaatcaaaaacaacataatctattagatctattgcccaaaaactacgcgtttactcaattagcgccggtagaaagccaacaagttcaatttcgtaataaagcgaaaatggtggtaagtggtagtgtcgaaaaaccgattttagggttacgtaaaccagagggggaaggtgttgatttatgccaatgcccactctatcccgcttcctttgaaccggttttcccaatattaaaaacctttattgccaaagcaggattagtgccttataacgtggaacgtcgtcgaggcgagctaaagtttattttattaacagaaagtcgccacaatcacagcatgatgctacgtnnnnnnnnnngtttcaagcgctggactctactggttttgctttag

SEQ ID NO: 316397 - DNA, 309 bp, Proteus mirabilis
  misc_feature (272)..(281): n is a, c, g, or t
atgttgcgtgaagggcaatttgagtatgagtttagtgcggggcaatatgatggtggtatcacgacagattccaaaaaaagtaaatttgctttaggaacgtttagttatggtatcaataactcaatcactgcatacggtggtttattaattgccaatggttatacctctggtgttatcggttcgggtgtttctcttgggttattaggtgccttatctgcggacgtcactctcgccagagctaatttggataaaacttatcacggtcaatcatnnnnnnnnnngtcaatcatatcgggttcgttattctaa

SEQ ID NO: 316398 - DNA, 183 bp, Proteus mirabilis; identical to SEQ ID NO: 298826

SEQ ID NO: 316399 - DNA, 624 bp, Proteus mirabilis
atgataggacaaagtcttgaacagcaaggcgttaccaaagaggtgatccctccttactactcggttaaagaggtggtacttccctttaataaattctcaggtgtcgatcctattttagggcctgaaatgcgatctaccggtgaagtgatgggggttggtgctacttttgcacaagcttttgctaaagcgatgttaggtagcaattccaccatgaagaaaaaaggaagagcgctactttcggttcgtgaaggtgataaaaaacgtgtcgttgatttagcaactaagctattgaaaaatggttttgagttagatgcaacacatggtactgccattgtcttgggggaagccggtatcaatcctcgcctagtgaataaagtgcatgaagggcgacctcatattcaagatagaattaaaaatggtgagtatgactatattgtcaatacgactgccggtcgccaagctattgaggattcaaaactgatccgccgtagtgcattacaatataaagttcactatgacactacattaaatggcggatttgcgacaacactgtcattgagtgctgatcctactattgatgttatttcagtccaagagatgcatgcaaagataaaaaaatcttaa

SEQ ID NO: 316400 - DNA, 1206 bp, Proteus mirabilis
  misc_feature (1188)..(1197): n is a, c, g, or t
gtgcaaatagaagagattgttcgcctagaagagcaagtggcacaacttggtttagctggtctaaatgctgatttcttgcgtcaattaaaacgtaaaggttttgctgatgcgcgcctagctaatatcttgaatgtgaaagagcaaaccattcgccaattaagagaacaatatcaattacacccagtttataaacgggttgatacttgtgcggcagaatttgctacggataccgcttatatgtactccacttatgaagaagagtgtgagtcggatccaaatcaagacaaacctaaagtgatggtcttaggtggtggtccaaatcgtatcggtcaggggatagaatttgattattgttgtgttcatgccgctctagcattacgggaagatgggtatgaaaccattatggtcaattgtaatccagaaacggtttcaacggattatgatacttccgatagactttattttgagccagtcacccttgaagatgtattagaaatagtacggatcgaaaaaccacaaggcgtgattgtgcaatatggtggtcaaacgccattaaaattagcaagagctttagaagctgaaggggtgcctgttatcggtaccagtcctgatgcaatcgataaagcagaagacagagaacgtttccaaaaggccgtggataagttagggttaaaacaaccagaaaatgccacagtgacgacattagaagaagcggtagataaggcaaaatctattggttacccgctggtggtacgtccatcttatgtccttggtggacgagcaatggaaattgtttacgatgaaattgatttacgtcgttatttccaaacggcggtcagtgtttctaatgatgctcccgtactgttagaccgattcctagatgatgccattgaagtagatgttgatgcgatttgtgacggtcagcaagtggtgataggcggtattatggagcatatcgaacaagcgggtgttcactctggagactctgcttgctctctacctgcttatactttaagccaagatattcaagatataatgcgcaagcaagtacgtgaactcgcttttgaattaggcgttaaagggttgatgaacgtacagtttgcggtgaaaggtaatgatgtttatcttatcgaagtgaatcctcgcgccgcacgtacagtgccttttgtctctaaagcaaccggtgtnnnnnnnnnntgccattag

SEQ ID NO: 316401 - DNA, 177 bp, Proteus mirabilis
atgatcttttatatcaaagacggtaagcatgtatttaccttatctggctcacctgaagctaccgaagcatttgaaaaagtagacaagctacttaaatcaagcaaaagaaaacttggtgatgagttatacgaatctttctctatcacacttaatgatatgcgccctgaataccagtga

SEQ ID NO: 316402 - DNA, 657 bp, Proteus mirabilis
atgccaaataccttgagcacctcaaatgaccatcagctatcactaagtaaagagcatgctaaagatggcgtacagtcactcaaatggcagtatcaaccccaatcaacattaacacttaataatgaagttaattatcaagatgataaaaatacagcaacaccactcacttttatgatgtggatttacaatgaaaaaccacagtcaacgccccttacattacaatttaaacaaaataatcaagtagcattaagttttaaaacggaactgaatttcacaggttggcgaggtattgcagttccttttcgtgatatgaaaggctcagcaacaggcaaattagataaattagtcattactgcaccagatcaagcaggtacgcttttttttgatcaaataattatgagcgtacctttagataatcgttggcctattcctgactatcaaattccatatgttaataatgcagtaaatacaatggtgagtaaaaattggagtgcattattgatgtacgatcaaatgttcacagcgcattatcctacattaaattttgcgactgagtttcgtgatgatcagcctgaagtggcatctatttatcaacgttttgaatactatcaaggtgtcagtcgtgataaaaaaatcaccgctgaaatgatcgactaa

SEQ ID NO: 316403 - DNA, 237 bp, Proteus mirabilis
gtggatcttgagcaaattaaaaaaggtaatcaatcaataacaggaattatgttagaaagccatattaatgaaggcaatcagtcatcagagcagccccgtagtgagatgaagtacggtgtttctgttactgatgcatgtattagctgggaaaccactgaatcggtgttaagaaatctgcatcagcaaatttcgccagttttagcacagcgtgcagcgcaactaagaaaagttagctaa

SEQ ID NO: 316404 - DNA, 588 bp, Proteus mirabilis
  misc_feature (559)..(568): n is a, c, g, or t
atgtattattccttagtaaggaaggcattgtttcggctagatcctgaacgtgcccatgattttacctttcgtcagttaaaacgcttatctcattccccatttcaatttcttattcaacaatcacttcctgccaaacccgtttcttgtatgggactttcatttaaaaatcctctcggtcttgccgccggccttgataaaaatggtgattgcattgatgcattaggggcaatggggtttggctttattgaagtgggtactgttacaccacgagcacaagtaggtaatgacaaaccgcgtctctttcgcttagtagaagctgaaggcttaattaatcgaatggggtttaataatttaggggttgataacctaatagagaatgtaaaacaatctcaatatggtggtgtgctgggtattaatatcggtaaaaataaagatacccccgtagagcaaggaaaagatgattacttaatctgtatggaaaaagtttacccttatgcaggttatattgcgattaacatctcttcacctaacacccccggcttacggacactccaatatnnnnnnnnnngatttattatctgcgattaa

SEQ ID NO: 316405 - DNA, 267 bp, Proteus mirabilis
  misc_feature (230)..(239): n is a, c, g, or t
atggcagtaactaagcttgtgctagttcgacacggtgaaagtgtatggaacaaagaaaaccgttttacaggctggactgacgttgaattgtcagataaaggccgtaatgaagcgcaagaagcaggtaaactgctgaaggctgaaggttttacttttgactacgcatatacttctgtactaaaacgtgcaatccacactctgtggaacattcttgatgaagttgatcaacnnnnnnnnnngtgcattacaaggcttaaacaaagctga

SEQ ID NO: 316406 - DNA, 483 bp, Proteus mirabilis
atgtcaaatatagcaacacaaaagcaaaaaacaccagataatgatgaatatacagacgctcttagtcgttgggagtcatgtaagccaccttacacaagtacacacataagaatctgtgttactgctgtcaaaaccattttaaagcatatcaataaaccacgtcgctctaaatatgaaaaagagcactacttgcgtattgattttagtaaggcgggtaaggttaccatatacgcggaatatcctaaacacatggatataaaaggccagaaattaggggaatggccagaactatcattaccgatagcaagagagaaagcgaaagcattagctgaagaagggctaagagctgaatctgtttatcaactattagatctttatgaaaaagatttagcagggaaagtcgaacgctcaaagttaagtgaaaatagtttttatacttatcgttgcagagtaaaacaaccatgcattagagttatttgctga

SEQ ID NO: 316407 - DNA, 309 bp, Proteus mirabilis
atgctctttaattatgatattaatagaatactcagtaataaaaaagaaaagaaagtaaagtctaactttgatttctgggcattatctaagtcgaaagctgagattaaattataccttatagaaatgagaaaagcctggagtcagaaaaaatttcgggatggagtcaaagataagaaagtccttaatacatatatttcaaaaaaagccagtgataaattaaagaaaatctcaaaagaagaaaataaaaatatgagtgatattcttgaatttttaatattaaattcggatgaggttataaaaaaaatttga

SEQ ID NO: 316408 - DNA, 240 bp, Proteus mirabilis
  misc_feature (191)..(200): n is a, c, g, or t
atggatatgagtataagacaagcattactgaaaaatttcatggggaactcccctgattggtataagcttgctattattacttttttaatcatcaacccactgatttttttctttgttgaccctttcattgctggctggctactcgttgttgagtttatcttcactttagccatggcattaaaatgttatcnnnnnnnnnngggggattacttgctattgaggccgtcattattggtatga

SEQ ID NO: 316409 - DNA, 1077 bp, Proteus mirabilis
  misc_feature (66)..(75): n is a, c, g, or t
  misc_feature (938)..(947): n is a, c, g, or t
atggatgcgtccaatttagccccatcggcgaaatcaagcccgataaacaaacgagggttaattatnnnnnnnnnnattattttagcaatcgacgttgtactactgctgttattgctagaatttttaccctacgatccaaaagctaatgcaggtttagcgttaatggtgtttgtgggtgtgttatggctgacagaagctattcacgtaactattacagcgttgtttattccaatccttgcggtagtgcttgggttaatgaacaccaatgaatcgctaaaatcttttgctaatccgattattttcttattcttcggaggattcgcattagcaacagcgcttcatattcaaggattagatcgcttaatcgctaaccgcttactgatgattgctaaaggcaagctctccattgctgtcttgttactttttggggtaacggcattactctcaatgtggatcagtaacacggcaactgcggcaatgatgttaccgttagtgttaggcattttatctaacttagatattcgttcagaacgtaatactttcgtcttcgtactattaggtgttgcttatagtgccagtatcggtggtttaggtacgttggtgggtagcccgccaaatgcaattgctgctgctcaactaaatttagattttattacttggatgaagtacggtgttccaatcatgttagtgctattgcctatcatgtttattgtgatgtatctgatgctacgtcctaacctaaaacataagtttgatctgaaattagaagtgttagagtggaataacaaacgtgttattaccatgattatcttcttagtaacggtattttgctggatctttagctcctttatcagtagcgctttcggtggtgtgaaagatttagataccgtcattgccgcagttgccgtgttactgatccacattgagagtaatgccgnnnnnnnnnngggtgacgggtgtcgcaagttggagccaaattcaggaaaatacagagtggggcgtattaatgctgtttggtggtggtttaacactgagcgcaattttacaatcttctggtgcaagtttggttatggctga

SEQ ID NO: 316410 - DNA, 1212 bp, Proteus mirabilis
  misc_feature (1180)..(1189): n is a, c, g, or t
atggttgcagttagaagtgctcacttaacacctgcaggggagtttgccgttgataaatgggttaatagcttgaatttaactcatgcgaatgcggggagtgaaatcatgcaaacctgggaatactgtcatcgtactgttctgggccgtgaagatgcgcaactgttgctatggcgcggtgttgagatggttgaacttctttcgacactcagtatggataaagatagcatgagggcagcacttctcttcccacttgctgaagaagatcttattaaccaggaagttatcactgaacattttggtgaggcgatatggaatttagtgcgtggcgtaatggagatggatgctattcgccagcttaaagcgacacataccaacgaaactagctcagtacaagtcgataatgtacgccgtatgttattgtctatggtggaagattttcgttgtgtagttatcaaactcgcagagcggattgcccatttacgtgaagtgaaagatgccactgaggatgaacgagtcttagcggcaaaagagtgttttaatatctatgcaccattagccaatcgattggggattggacaattaaaatgggagcttgaagatttctgtttccgttatcttcatcctgatgaatataagcaaattgcaaatttactgcatgaacgccgtattgatcgcgaacagtatattgataatttcgtcagtacggtgcgtggttatatgcagcaagagaatattgaagtcgatatctacggacgtcccaagcacatctatagtatttggcgaaaaatgaagaaaaaaaatctcgcctttgatgagctatttgatgttcgtgcggtacgtattgttgtcgaacgcctacaagattgttatgccgctttaggtattgtacatactcattttcgtcatttacccgatgaatttgatgattatgttgccaatccaaaaccaaatggttaccaatctattcatacagtagtacttggccctgaaggtaaaaccgttgagatccaaatacgtactcgtcagatgcatgaagatgctgaattaggtgttgcagcgcattggaaatataaagaaggtgctactggtgcaacaaccaaaggcgggacgggaagttatgaaaatcgtattgcgtggttacgtaaattaattgcatggcaagaagagatggctgattctnnnnnnnnnnggtcatcgctgtattggtgctaa

SEQ ID NO: 316411 - DNA, 444 bp, Proteus mirabilis
  misc_feature (431)..(440): n is a, c, g, or t
atggaaaacacagcaccacaaacctctcttagtaaaggccttattttacttatggccgttgccactggcatggttgtcgcaagtaactattatgcacaaccgctacttgattcaattgcaaattattttcatatctctgccactttagctggctttattgtcactacagcacaattaagttatgccttaggtttaatgctattggttccccttggcgatatttttgaacgtcgttcactgattgttatcatgacgctgatttcagcgagcggcttattaattacggcaatggcacctaatatttggcttatgttaattggtactgccctatcaggtatgttctcggtcgtcgcccaaattctggttccttttgccgctacacttgctgcacctcatcaacgaggaaaagcggtaggtactattactgtctnnnnnnnnnngtag

SEQ ID NO: 316412 - DNA, 459 bp, Proteus mirabilis
  misc_feature (447)..(456): n is a, c, g, or t
atgagcaaatatgatgcaatacagcgatttaatctctgttttcaacaacttgaaacagaaatcaatgctcttaccgattttcttcgtcagttaaagcaacttccttctgcggtttttgaattacctgaggtaagtaaagaagatgaacatgatgagataacaaatgttacagtgtcacctagttatgatcttgatgctttagaactctctttaaaattaatgaccaatctctttatctatgataatgccccacatgtcagtagcaagcgtgcgatacgtttaccgggggtactctgttttagtgtcagcaatcctgtatttaagaatgtaaaaacacaagtagagagcattaattcattaaaaaaacagctttcagatattgtgacgaaagagtctggtatttcgaaagaagaacgttttgattttgtccataatcagctaaaaggnnnnnnnnnntaa

SEQ ID NO: 316413 - DNA, 1131 bp, Proteus mirabilis
gtgaaagtgttgactgtttttggcacacgccctgaagcgatcaaaatggcacctttagtgcacgctttagcaaatgataattcgtttgaggcgaaagtttgtgttacggcccaacatcgagaaatgcttgatcaggtattaaatcttttcgagatcaaaccagattatgatctcaatattatgaaaccaggacaagatttaacagatataacctgtcgcattttagaaggtttaaaacctgttctagcgtcatttcaacctgatgttgtgttagtacatggtgatacaaccaccaccatggcggcaagccttgctgctttttatcaacaaatccccgtcggtcatgttgaagcgggattacgtaccggtaatctctattctccttggccagaagaagcgaatcggacaattgccggccatttggcgatgtaccattttgctcccactgaaactgcaaagttaaatctggtgcgagaagcggttgcggataaaaatatttttgttaccggcaataccgttattgatgcgctattttgggttagcgagcgagtgatgggaaatcaaaccctgctcgatgaacttgctgtgcaatatccctttattcagccagaaagaaagatgatcttagttacgggacatcgcagagaaagctttgggggtggttttgagcgcatttgccaagcattagcagagattgcattggctcaccccgatgttgaagttgtctatcctgttcacttgaatcctaatgtaagtgaacccgtaaagcgtattctgcatggaattaataatattaaattaattcaaccgcaagattatctgccttttgtttatttaatgaaccacgcttaccttattttaactgattcaggtggtattcaagaagaggcgccttcattaggtaaacctgttcttgttatgcgcgatacaacagagcgccctgaagcagttgaagccggttctgtgcgtttagtaggtacagatactaaacgtattgttagcgaagtaacctctttattgacagacgaaaacgcatatcaccaaatgagtaaagcaacaaatccttatggtgatggtcatgcctgccaacgtattcttgaagcattgaaaaataatcaggtgacattatga

SEQ ID NO: 316414 - DNA, 930 bp, Proteus mirabilis; identical to SEQ ID NO: 297800

SEQ ID NO: 316415 - DNA, 381 bp, Proteus mirabilis
  misc_feature (355)..(364): n is a, c, g, or t
atgtcatcagtggtgcgtaaagtaagaaaagcggtgatccctgttgcagggctaggaacaagaatgttgcctgccaccaaggctatcccaaaagagatgctacctgttgttgataaacctttaattcaatatgttgttaatgaatgtattgcagctggcatcaatgaaattgtgctagttacacactcttcaaaaaattctattgaaaaccattttgataccagttttgaattagaagctattttagaaaaacgagttaaacgtcagttgttggaagaagtacaaggtatttgtccaagtcacgttactattatgcaaactcgccaaggaatagcaaaagggttaggccatgccnnnnnnnnnnatatagtgctgatctga

SEQ ID NO: 316416 - DNA, 681 bp, Proteus mirabilis
atggttacgttttggggaaattatgaggggatctctcaggacgcagcccacgccttcggggtaaaagaaaatggtaactccatattaaatcgcggtaacttatctattttaagttttcatgcgactaagacttattctactattgaaggaggtgcgattatttgccatagcgcagagatgaaagaaaaattagataaatataaaaattttggttacacaaatgaaacagaaatcgatgagctaggattcaatgcgaaacttaatgaagtacaatcagcatttggtttgctaacattagactatatagataaagcaatagaaaaaagaaaagaagtttctgatttttataaaactaatctaagcaatgtacctggtattacattacctaatataccaaaagatttaacttggaattactcttactatcctataataatagataaagacaggtatggtaaaacaagagataaactttatttagagttaaaagaaaataaaatattaagccgtagatatttttacccattaataactgattttaatatttataatcaatataaaacaaaaacccctaccgctgaaaaaatatctgaaaatgttatttgtttaccaatccatcatttattaagtaatgatgacttaaatagaataattaatgttattaaatatgactataaataa

SEQ ID NO: 316417 - DNA, 423 bp, Proteus mirabilis
atgtccacaacggatttatctctagagttgcaagataaaattaaacgctcaatcacccgcgtctctaaagttatttttccaaccaccaccaatcatcactccacactctttggcggaacggcattagcatggatggatgaagtctcttttattaccgctacgcgcttttgccgtaaacgtttagtgacagtttctacagagaaaattaattttaatcaccctattccctctggcaccattattgaattagttggtgaggtaatacgtgtcgggcgtaccagtctaacggtaaatgtttctatttttctcgaagatatgtatgccgaagggcgagaagaagtgatccacggtcaatttaattttgttgccgttgatgagcatggtaagccaacccctttattcgataaaccatcgcttttataa

SEQ ID NO: 316418 - DNA, 267 bp, Proteus mirabilis
  misc_feature (235)..(244): n is a, c, g, or t
atggatgagcacaaacaacgttatgtggtgaaattttatcgtcctcaacgttggagttattcacaaataaaagaagaacatgaatttgttttagcgctaaaagaggcacaggtttctgtcgcagcgcctatcgaggtaaaaggcgaaacagttcatctttctaatgaagggttttattttgcattattcccaagtattgggggaagagcatatgaaactgataatctatttcagnnnnnnnnnnctatttggtcgcgccaaaattag

SEQ ID NO: 316419 - DNA, 690 bp, Proteus mirabilis
gtgcccttttctgacatacctaataatagaaataaccaacaaggttgcagagtcccctcttcacctaaaccgcatatttcctcaggaagtagcggtcaactcactttccgtttaagaaaacccattattaatggtgtcagtcttaatgggcaatctcttgcacaaatgtatgccatggtaagtcacagcggtacgccaaaaacctatggttcagagcctatttctaaattagtgatcacctcggggatcattaccactaaagataaatgtatctttaataatggttcaccaattacctttgactttggtaatgtgggaaatacctctgattatctcaatgggcaaaactacaaaattactcgcaacatccccatcaaatgcgaagggggaagctttactgatcctaatagcagaataatgtttaaagttcagactggtagctcaggtattgcgagttttaattctaattaccttggtacaacaggctctgtagatagaagtaacttaggtatcgtattaagagataagtcaggtacgattatcccacctaaccaatatttttcagttggcaaactcaataatttcaacggaaattgggaagtaagtgcagcccccatcgccaaagcgggcagtaaaattactgaaggtgaattttcagctcatgcgacactcattgcggagtttatgtaa

SEQ ID NO: 316420 - DNA, 636 bp, Proteus mirabilis
ttgatagcttcatgtaatgatggactacctaacagcacattcctacaacattccaatttattaattgactattatgaaaaagcaccaaaagaattaaacaaactattacttgaaagaagaaatgaacacgaactatctttttgcccttactgtggcaatccaatgattcctgacactttggaccattttatccctaaaggaaaatggcctgaattctctatttttccaaataacttagtgcctcaatgtagaggattattaaatgcagaaagtaaggatatatctataacagttaaactgaaaaaagttatggaaactccatctgacgaccaaagcagggttattcttcatgcagaaaaattaaaaattaaatcacgcattattaattattgtaaaaaggacttcagacaatggacgaaacggttgtccaatgcaaaatttgatgtaaaagtagcattacagcaacgcttatcggaggttccagaactagatattggtaaagattggcagagcgccttttatgatgctttattaaaaaatgaagagattattaattacatgaattcattacaccctcaggttgaagaacatttgcatcaacagcccaattgtgcggtagatttagattttaactaa

SEQ ID NO: 316421 - DNA, 390 bp, Proteus mirabilis
atgtacgaaaaaaatatacggctaactaatttagatgcaattcaatttattgataataatatttcaaagattgaaggtaaggcttttataaatatagatccaccttattatgttaaaggtaagggcttataccaaaattactttgaacatgacgaccactatagattatttgaaagtgtaaaacgtataaaacatccttggattgtgacgtatgacgatacccctgaaatatgttctatctattctgagtatttaccaaaatcttttgggttaagttatactgctcaaaaaaaatacattggttctgaggtgattattcattctcctagcttgattaaatcaaaatttcagcctggtattacctttaatcaaattaaaaataaactatag

SEQ ID NO: 316422 - DNA, 315 bp, Proteus mirabilis
  misc_feature (239)..(248): n is a, c, g, or t
gtgctattaggtaattttaagagtatagtagacaatctttctgcctgtttagatattatcgtttttattatggaatcaacgctttctgctcaaaatatacgccaactccttgccaatgaaacaccgattattgatgttcgtgcgccaatagaattcaatcaaggagcgatgcccaacgcaataaatctacctttaatgaataatgaagagcgtactaaggttgttttaccattacctgnnnnnnnnnntttccttccggatttatttgctgtgctcgtggcggtatgcgttcacacattgttcaaaaatggttag

SEQ ID NO: 316423 - DNA, 708 bp, Proteus mirabilis; identical to SEQ ID NO: 298371

SEQ ID NO: 316424 - DNA, 747 bp, Proteus mirabilis
atgaaagcagggcgatacattggtgtgatgtctggtacaagtttagatggtgttgatgtggtgctggcagccattagtaataaactggttgctcaacaagccaaccattttttaccttatcctcaaaccttgcgtcaacgcattttagccgtttgccaaggccaacctgtgacgttgcatgagttaggcttattagatgcgcaactgggtgaactctatgcaaaagctattatggaattattagcgaaagcgcgattaagtgctgctgatatcacggcgataggatgtcatggtcaaacaatttggcatgagccagaaagtgatatcccgtttaccatgcaaattggtgataacaatagagtggctgccttgacaggaataaccactgtcggggattttcgtcgtcgtgatatggcatatggtgggcaaggtgcaccattggttcctgcatttcatcttgcagtattaggccatcctacagaaaaacgcattgtgttaaatattggtggtattgccaatatttcgctgctattacctggcgttgcagtgaaaggatatgacacaggccctggcaatatgctgttagacagttggaactgggttcataatcagacagcctatgatgataatgggcaatgggcaatgggcagcaactggaaatgtgaatacccaattattacaggaaatgctggcagatccctatttttctcgttcagcgccaaaaagtacgggacgagaatattttaa

SEQ ID NO: 316425 - DNA, 663 bp, Proteus mirabilis; identical to SEQ ID NO: 304087

SEQ ID NO: 316426 - DNA, 930 bp, Proteus mirabilis; identical to SEQ ID NO: 307575

SEQ ID NO: 316427 - DNA, 426 bp, Proteus mirabilis
ttgaatgaaagcggtaaaatctttggggtagaatgttttactacgattgtatctgttgaaaataatgagtttgctgtagatttatcttttttaatggatgtttccttcggtatttctaaagatggggatttaatgagagcacctgaccttagctcttcaagtattcccccttttatatctgataatataacaatagataaatcaaatggcatcaagataatccacggggggataactggattaccagttctttttggagctagtggcggaacggtgtccatttctaatatttcaggaaaatcatttgttattagtagttcttctggtgctttaataaccctgaataggatgaaagtaaaaccaacatcactaccgcgctctatgcaggttgcaattaaagcaattatttgtgagaagaaagaataa

SEQ ID NO: 316428 - DNA, 954 bp, Proteus mirabilis
  misc_feature (932)..(941): n is a, c, g, or t
gtgtatggacaatcaaatgcagttgggtacgctcaagatacttatggatttccagatgtgattgatggtgcaatgtattatgactataaagataatactataaaaaaaataattaaagctctcccttattcttcaggaaatgtaagtactggtcacgcgtgggctgcgtttgctaatgagtatataaggaaaacaggaagaaaggttttaattattccctgtgctagaggtgaatcctctattgttgaactatcaaagccattaaccccatcaaataccgtatatgataagatgattagctcattcaactccgcaatgtttgtcgcaaatagagatggtatatcaataggatataagtcatgtctgtttcaccaaggtgaaacagacatgacgctaggaactaaaaagcaggaatatcaagatacattagatcaactaattagagatatacgctcagatatggggctgaataagtgttttttatatcgagttggatgccctcagaatagaaaagaaacatcttggtatggtatacaaaccgctcaagattacctatgccagtcttacgactggatggtgatgtgttattcattgtgtggaacttttaccatcagcaatggattattgcgcgaaggagtgcattatactcaaaatggctataatgttatggggcatgaatcagctagtgctattgttgattctctatttaataaaaccccttcctcagaatttgaaactgaaatgtatggaactcctctgctaccacaagaccaaatatggagatatacatacgggcggctagttgttggttctgatggaaatttaacactactggacaaatcgaacaccggttattcatatagaacgataaatatttctagaatagaaatgctggacgataaaattaggctttacttacaaagcagagccannnnnnnnnngatgttgaattga

SEQ ID NO: 316429 - DNA, 327 bp, Proteus mirabilis
  misc_feature (261)..(270): n is a, c, g, or t
atggatattagaaaagttcaaagtattgtaaaagatatatactctggtgcaagagaagatggcagcagtgttacagttaacataactgaagatattgactctcttaataataacgataaaattctagtaataggttctagaaaatcaatcagttatgaacatagaaatgcatcaagctttatgtcagactattttgaaataattgaggaatcgaaccatccattaattcgactaatagataaaattaatatagccagctcnnnnnnnnnnagccagctctcaatggtttcctatttatggcttcaacttaatttacccagaacttga

SEQ ID NO: 316430 - DNA, 435 bp, Proteus mirabilis
atggagaagcatgatgatgatatgcctaaagataaaatacaacaagccaaacgttggcgcttgattttaggccaatacgctgatgatgctttagggcaagccacgtttaatgctgatgatcttaaaattgaacgtacactcgattttctttatcgccgtgaatatcagcgccgaggattacgtcaagagcgcggtcgccatggctctctcgatgcatcgcaacttactgccgtaaactggctaaatcaagctcgcaaactttttcccaatagcacatttgaacgtatgcaatcacaagctattgaacgttatcaaatcagtagctttcttaaagatcccaatacgctaaaagccatggagccgactaaagcgttagctaaaacactattaagcttacgcggacgaatgagcgaagaaacgcgagatccaatttaa

SEQ ID NO: 316431 - DNA, 213 bp, Proteus mirabilis
ttggatggtgtaacagattttgttcgtttatataatataaataattatagaattagtgtagacgataaaattgaagatcgttgtaaattacaaaaacttatgaatataatacagcatatcgatatagaatatagaaaaaatattcaaataaaacttttgatgaatactgtttctttaaatataaaagattgtcattctgcaatcctcatgtag

SEQ ID NO: 316432 - DNA, 405 bp, Proteus mirabilis
  misc_feature (325)..(334): n is a, c, g, or t
atgatgcaaaaaataatggaagtttcagtattacccataatgaatcgtgaattaactatgtcgagtcgagagattgccagtttaacgggaagtaatcattccgatgttaagcgttctgccgataggctttttgttgctcaaattttaacccagccattggctgagttcccttttgaacataacggcaatcaatatactgaatatcgttttaataaaagagactctctggtgttggtagctcgattgtcacctcagttcacagcaaaaatagttgatcgctggcaggaattagaatcaaaaatgcagccagtcattcctcaaacannnnnnnnnncctcaaacattaccagaagcattgcgattagcagcagacttagcagaagaaaaacaaaaattggaaagtga

SEQ ID NO: 316433 - DNA, 153 bp, Proteus mirabilis
gtgaaaggcaaaagagttgttattgttcatggctatactgcatctcccaaggataattggtttccatggttgaaagaagagcttggatcattaggagatgatgtcagtatacctatgatgcctgagcctaatcatcctaaccctaatgagtga

SEQ ID NO: 316434 - DNA, 723 bp, Proteus mirabilis
  misc_feature (681)..(709): n is a, c, g, or t
atgtctgtaactaacgttactgaactcaatgatctggttgctcgtgtaaaaaaagctcagcttgaatttgctaacttttctcaagaaaaagttgatgcaatttttcgtgctgctgcattagctgccgctgacgcccgtattcctcttgcaaaattagctgttgaagagtctggcatgggtatcgttgaagataaagtgatcaaaaaccactttgcttcagaatatatctacaatgcgtataaggacgaaaaaacctgcggtattttgtctgaagatttaacctacggtactatcactattgctgaacctatcggtattatctgtggtatcgtgccaaccactaaccctacttctaccgctatttttaaagcattaatcagcttaaaaacacgcaacggtattattttctctccacatccacgggcgaaattagccacaaaccgtgcggctgaaattgtgttaaacgctgcaatcgccgcgggtgcaccaaaagatattatcggctggatcgatgaaccttcagtggcattatccaatgcattaatgcaccatgatgatattaacctgatcttagcaacaggtggcccaggaatggtaaaagccgcttacagttcaggtaaacctgctatcggtgttggtgcgggtaatactcctgttgttattgatgactcagcagacatnnnnnnnnnnnnnnnnnnnnnnnnnnnnngacagtatctataa

SEQ ID NO: 316435 - DNA, 315 bp, Proteus mirabilis
  misc_feature (271)..(280): n is a, c, g, or t
ttggatggtttttttgatgattcttttaattacctaccaaatatttctttaaatgaagataaaatcaataaaattacttcacattctgatgaattaaaggcattgatcaacaaaaaagaaagtgaatcaataaaaaaacaattagcagaaataagaggtctatttaaagaactgactatttcacaaagttccttggagcttgaaattgcatctaactctttatccggcatgtcattactgacatttctgttatctaagacacgtgagttgnnnnnnnnnnacgttaaaggtcatgttacatcgttcggaaagtga

SEQ ID NO: 316436 - DNA, 183 bp, Proteus mirabilis
atggccgcgagcgttctattattagttcctggatttcctttaattaatgctgttgctgatatgtttaaaggtcatgttaatacaggactcgcacgctgggcgatggcgacgatgttaacacttgctacctgcttaggagttattttagcgatggcagtatgggagttaagagattgggcataa

SEQ ID NO: 316437 - DNA, 285 bp, Proteus mirabilis
atgcgaggacgtacttttgaaaatgcatttgtcatattggatgaagcgcaaaatgtcaccattaatcaaatgaaattatttttaacgcgaatgggagaaaatgtgacagtgattgttaacggtgatattacgcaatgcgatttacctgccaatgtaaactcaggattagctgatgcactaagtcgttttcaagctaatgatcgtgttggtgtcattaaatttaatgaagaagattgtgtgcgttctagtctatgtcagcatgtattagcagcatatagtgattaa

SEQ ID NO: 316438 - DNA, 342 bp, Proteus mirabilis
ttgccagtttcagattttaataaactcacttttgccattgctcttaaaggcaaccaatgtttaaaaatacaaaatcagctaaataatgctatttataaaaatttagaaataaagagccaatataagccagatctcaacctattagtgctgtgtgctcgtaatagcgatgatatacctgctcagttttgtcaacaatgtcatttaggtaaagatgaatggaagcaagttaaccacttaagtcttttacaattaacgataaaaaacactgataaatggagtgaagagcatattaaagcagggtgcgactatattaaaaaagttgtcctatctgcattaaaatag

SEQ ID NO: 316439 - DNA, 474 bp, Proteus mirabilis; identical to SEQ ID NO: 303835

SEQ ID NO: 316440 - DNA, 210 bp, Proteus mirabilis
atggaaaatgacgataagttaaatgaaaatggtttaaaattagattctgttgatgccacagagataattgtctttcttaatgatgaatttaatattcaagttacagaaggtgatgatccttcttatatgagaacaataaatagcctaacaacctttattttaaataaacagcgagaaaaacaagaaaaaaatgagagtaataataattaa

SEQ ID NO: 316441 - DNA, 840 bp, Proteus mirabilis
  misc_feature (824)..(833): n is a, c, g, or t
atgaaaaaagttaatgtcgcacttttgcagctttgtagcggaaaaaatataaaaaataatctggcgcaaatagagcaacagattaagcaactccccgattcagtcaagcttgtattaacgcctgaaaatgcattacttttctccagcgcaaaagattatcataaacatgctgaaattcaggggaaagggccattacaagatgcgattgctaatatggcgcagcgctataaggtgtggatcttagtgggttcaatgccattgattagccgagattctcctgagcagatcaccagtagtagtttagtttttgatgatgaaggggtgatccgcgctcgttatgacaaaattcatatgtttgatgtgaacattgatgatgaacaaggcgaatataatgaatcagccatttatcaacgtggtgaacgcttgactgtagtggatacacctgtggggaaattaggtttaacgatttgttatgatttacgttttcccggtcttttccaagcattaagagaaaaaggtgctgaaattatttctgtaccggcagcctttactcgtttaacaggtaaagcgcactgggagccattgttacgcgcgcgggctattgaaaatcagtgtattattttggcaccggctcaagtcggtacccatgatgctcgtcgcacatggggtcatacaatggcagtggatggttgggggaaagtattgaaaaagaaccctgatgcggtcagtgccctaacgctcaatattcgagtcgatagtttagaaggtatgcgtgaacagatacgggttgtgaaacataatcgctttcgcccgaaactgacacnnnnnnnnnnaagttaa

SEQ ID NO: 316442 - DNA, 144 bp, Proteus mirabilis
atgaatttattcgccaactggccaaaaaaattactacgtgatcaattacagcaaaaagcaaaacaggccatagataattggttaaataagcaagatgatagccccgaagttaaagcgcttaatcaattattgaaaaaaatataa

SEQ ID NO: 316443 - DNA, 141 bp, Proteus mirabilis
atggtcggccttccaggagaacaaggagtgatccctgcttcgtcaggtaatgattctgctgtttcaggggcgatacgcgaaggttatctttatggttcaaatgatgttcgacgtccagcaggtaaagccgtgggctactaa

SEQ ID NO: 316444 - DNA, 156 bp, Proteus mirabilis; identical to SEQ ID NO: 304992

SEQ ID NO: 316445 - DNA, 1047 bp, Proteus mirabilis
  misc_feature (122)..(131): n is a, c, g, or t
atgatttcatccgtttcgcaaattcaagaagtgatagcgatcccccaagaatacttttggttaccttgggcagtgcaatatttcttttttatcggcattgcgtgttgcgcaacactttatgnnnnnnnnnnactttatgcatgctggcaatgttggaaagggcgtacaggtaatcctcgtttagaagctgttgcggtttttattgctgttacggcggggatcaccgcccctttagcattaaccgctgatctccatcaaaccgcacgtgtttggcatttttatgcttatccaacaccttggtcgtggatggcatggggatcactattactgccactcttctctgcatttagtattttgtactttattgccatggtcgtgcgtttagtgtggaaacgtgaatataagttaacgcgttgggttgctttagcctgcgccttaacctcgataggtttattgctctataccggccgtgaagcttctattttaaaagcaagaccggtgctttatacctactggctgccgatattactgttttttagtgccatgcaagtattgcctacgctattagcattaggtacgcgacgagagcctgtgtatcagcgtgaactggctatgtggtttatcggatctttaatgttacttgctgtatgtacaggtttttggattgcgggggatactatttcaggacaagccattaggcaacaattggcaataggaagtttaggctggtggagtgcgataggggttattgccttatggatagtgtctgttgctatgggcggattaatggcaaaacaggcacgctcagtggcatttattactgtaatggcttttatttcaatgggattagcgtgggtattacgttggctaatgttaatgggaagccaatatattcccaaatataacattattaccaatccttatcagttcccgctgggtaatgatggattattagcgattgttggaacatttgggctttggatagcgttaaccattatattcagagaaagtattcgttgggttgtcaggagagtacagcatggctaa

SEQ ID NO: 316446 - DNA, 276 bp, Proteus mirabilis
atgaaggtaacacaaatccttttttataataatgaaaatagtattacagataatgaaataaaaaacctatttaatatctttgatactcaggtcattaataatagtagagtggatgttaatcttgagactgccaaaaatcaaataaataaactcgctgatgcagttaggaatggaagctcaatagatttagattatttagtaaacatcatgtttcatgatgatataaaaataagcttatatgcaactaatcagctctacttgatttttactctatga

SEQ ID NO: 316447 - DNA, 240 bp, Proteus mirabilis
atgatatctcaacctgaccatcaattaattacttgtgcaccaggatattgtcgttattatgtgaaaacacattttcctgatattgtaacattacctatccctctcccccctgtgtttttagaacagcttcatctaccttttgttttgttatggcataagcgtaatagccataatacaaaaattatatggttaagaaatacaataagaaaaagtattaaccaacaaacctccgatatctga

SEQ ID NO: 316448 - DNA, 321 bp, Proteus mirabilis
atgaataaaacatggcgtatgtggatggaaaccacaggcgagtggttacgtgcacgtggcgttgttatcgatattaaaaatggtgtcggtgaagttgttttatcaaagcccatcactaatgaggaaactcatgaatatttcgttggacattggctagggcgcaatgaaaacggtgagcgtgaaaaaaccagcaagatggataaagcaaggatgctttacatgatggagaaacatgaacaatggtgcattgagaagggaattccgatcatcattcctcgtaattctgaatatatgagtttgaaaagaaagcaagaagaatag

SEQ ID NO: 316449 - DNA, 288 bp, Proteus mirabilis
atgaatttacgcaatgaggcaaaagggcgtgaatgtcagattagaataccttcagtttgtaatggtaactctgaaacggttgttttagcccattacagaatgtcaggtctttgtggcgtcggaataaaatcgcatgacttatttggcgcttgggcttgtagtgcatgtcacgatgaagttgatagacgaacacgatttacggatatggagtatgcaaaacaatgtcacctagaaggtgttttgagaacgcaagccatattgatccaagaagggaagttgaacgtgtga

SEQ ID NO: 316450 - DNA, 357 bp, Proteus mirabilis; identical to SEQ ID NO: 297682

SEQ ID NO: 316451 - DNA, 633 bp, Proteus mirabilis; identical to SEQ ID NO: 297681

SEQ ID NO: 316452 - DNA, 249 bp, Proteus mirabilis
  misc_feature (143)..(152): n is a, c, g, or t
atgaaaaaggaattaataggtcgtacatcatcacggcaaaacgatctctatcgtgtagtaacaaataagattattgaagcattggaaaaaggaacagaaccttggcgtaaaacttggaatactgagaatgaaggtctacctgnnnnnnnnnngttaatgctgcaacaggacgatattacagtggtattaatgtcatgctcttatggatgggggcgattgaaaaaggagttaattcaaaccgttggctga

SEQ ID NO: 316453 - DNA, 150 bp, Proteus mirabilis
atgtcttatatatcaagagaaaagatagattacttgtccattggtcatcgactgcgtgcttatcgtattgcctcctcattaaaagctgaagatgtagctgaaagtttagggatctcccgtgccgctgtctatcgattagagagacattag

SEQ ID NO: 316454 - DNA, 1620 bp, Proteus mirabilis
atggactcggccaaaggcgtcatcgacggtttcgcagagggcgagattgcctgcattgacgacccgacggatgcgagcggttgcaccgttatcaacggcatcaaaatctgcgagtcccaactcaaaccgtcaccgctacctggtattccaaagctctgcaagaaggtccgagtcaaagccgattacgatttctataaggggcaaatggaatgctggaccgatccccagggtgagatccattgcccggtcaactcgggcggtaatctcaatagctgtaccgaattcgagaacaacccgcagtgcggatttatcagctccaagtgcgtggatggagccgaaggcgcatccggcacctgctacgtgcatgaagatacctatgactgcggttctgatgtcgcggtcccgacactggagaaggaaaccgaataccagtgcggtgggccgatccgctgcatgggtgacgattgtcttgacgtgacaaagacccagagcacggacttcgcacgcgccacggcactgctcaacgcggcgcagttcatgacccaggacatgagctgtaccgggctggacggcgacaaaaatcccacaggcgatgagaacgttatttgttccgcctttgccggtgaagccggcgaatgcaagatcgccgtgggcggggtttcggattgctgcgagaagccatccaatatctcgcttgccgactatctgaatctgatcgtggccgtgccaaagctcgacggtgccatcatggcgcttgggtcggaagccaacccatcggcgctcaaaggcgcctatcagatcctccgggaaccggtattggaaggctggacggaggttaccaagcccttcgccagttacatcgaaaatatgtctggcgcggtcgattccttctaccaacccgtggagcaattcgttgacgaattgattgaccagttaacggaacaagtcaaagaggtcatggccgatgtcatgaaatccctcgggcaagatgccgccacccaagaggcggctgccggaggtgcagggaaattggcccaggaaagcttgatggaaagcgccgcaacttggttgagcaccgccatgactatctacacggtctatgtcgtggctatggttatgatccagatgatttataaatgcgaggaagaagagttcacaatgaatgccaaacgcgccctcaagaactgctcctatgtcggctcttactgcaagtctaaggtgctcggagcctgtgtcgagaaacgcgaggcatactgctgcttcaactcaccgttgtcccgtattgtccaggagcaggttcgtccgcaactaggcatggacttcgggaacgccgagcatccccaatgcggcggtatcccgctggataagatcgcagagattgactggagcaaggtcaacctggacgagtggcttgggattctgcaacagaacggcaagtttccggacccgagctcgctaaacctcgacagcctgacaggagccggtagcgacttcaacattgacggtagccgtaagaacgcccaagaaaggacactggaacgcttgaacggcgtcgacgtagataaggcgcggcgtgacttggcgtccgagatcttcccggactgggacggctcgaattga

SEQ ID NO: 316455 - DNA, 264 bp, Proteus mirabilis
  misc_feature (240)..(249): n is a, c, g, or t
atgttgcctgatagcatgagaggatttgcacctacgataaagggtattgcgaatagcaatgctattgttacagtcaagcagaatggttttgttatttatcaaatttctgtacctccaggtgcatttgaaataaaagatctctatgccacatcaagtagcggtaatttagatgtcacaatcaaagagaataacggtaaaattacacaatttgttgtaccttattcaaatgtgcctattttnnnnnnnnnngtgaaggacgcttaa

SEQ ID NO: 316456 - DNA, 582 bp, Proteus mirabilis
atgaaaaaaaacgctctatttactgtctcactgttatctgtatttatttcattatcttgctatgctcatcaagatgttattttacattctgattcattatcagatgcaaaagtatctattaatgatgacacagggaaaacacaaattgaagtgataaatactaatcaagatggtaccgcccatatctattataatcgtcttgatgttggtaattttggtttatcattaaaaaataatgctgaagcagaattaattattaatgaggttgtttctaaagatgtttcaattctgagaggtgagcttgagttacaaggaaaaaaggcgacagtggttatagctaatcctaatggaatttcttgtcgtgattgttctttctctggaattaatgatattaaactaatttcaggtagcagtacagggaaattttctaagacattcactatagcagatataggttctagtgttgtttttgatatgagaaataaattagataaaaatgaacatagtcatattaatcgcaattataaagatatttcatctggaatgataaatattatctctaataaagccattttttgttaa

SEQ ID NO: 316457 - DNA, 591 bp, Proteus mirabilis
ttgttaaggacagaggcaggaataaatagtcgatatttaataataaaatcaaaacagggtaacgtttataatgatggtaatataaatactttgtcactaaatcatgagtcttatagcttaattaatgcaggaaacatagatataaatcaagatgataatttatatagaacagcttatgatgggacgaaacaatcaaaagtaatggtttatcaatattcttctggtcttaataattcatcatttaatgttaaagatagtattctatttatgaaagcggataggttgcttttagatagaacatttaatattgatgatagttatttatatggaagagtaggaaccataggaaccctaggaataggtaatatatcattgtcgtataatagtgtttttcatatcctcgctgaggatagtatatttcttggtggtaaaatccagggggatggtcatgttatattacaattaaatgatgataaagttgatattgaaggtaaaaacttgttaataggaacagagggattaagattagaggggggaacaaaatataaattaggtagatcaactattatagattatactgaatataaataa

SEQ ID NO: 316458 - DNA, 246 bp, Proteus mirabilis; identical to SEQ ID NO: 310959

SEQ ID NO: 316459 - DNA, 576 bp, Proteus mirabilis; identical to SEQ ID NO: 32318

SEQ ID NO: 316460 - DNA, 207 bp, Proteus mirabilis; identical to SEQ ID NO: 83866

SEQ ID NO: 316461 - DNA, 279 bp, Proteus mirabilis
atgaaaaagagaatacttcatctgcccgtaaaaaagatttacttcgatcagatcaaatctggagaaaaaccagatgaatatcgcctcgttacagactactggataaaaagactagaggggcgcgagtatgatgaagtccatgttaagtgtggctacccaaaggctggagatatgtccaggatagagattcgcccttggcgtggcttctcaaggagtgttataacgcacccgcactttggagattgtccggttgaagtattcgctatccatgtgaattga

SEQ ID NO: 316462 - DNA, 294 bp, Proteus mirabilis
atgaccaaatcaccactgtctggaacaaaaaaacaggcccgcaatccaactgacagaggaaaacaaggcgtaaaacgtagcctgcttacggatgccaacgggcttcctctgtcgctggttgttgcagcaacaaacacgcatgatatcaaactggtttgcagatacactcgatgtccttcagacggggcgtccgggacaaaaacggagactctgtctggacaaaggttacgatgcaggctggctgaaaacctatctacaaaaccacagttacgagctgtatatccagtcccgtaa

SEQ ID NO: 316463 - DNA, 408 bp, Proteus mirabilis
atgttgagacgagaaaaccaaggagatttgttcgatgaccaggtggtgttgccatcactggagtcggttcttaccggcatatcttccagtcagcgttgtgacgatagaacaacgtacttctccgctccggatgtggacctgagtttgtacgatcacatcattgtttgcctgtctggaggcaaagactcgattgctgcgtacttgcggctggtggacatgggtgttgataagtcaaaggtggagttctggcaccatgatgttgatggtcaggaaggcagttcgttgatggattgggccttcatgcgtgattactgtcgtcagctcggggaagaactgggtatcccaatgtacttctcgtggcttgagggcggctttgagggcgaaatgctcaaagacaatgcctattag

SEQ ID NO: 316464 - DNA, 186 bp, Proteus mirabilis
atggaagcaaaagtattcgattttactcacgtaaaagagataacagaatatacagtatcaggctctcaagcctacgaaatgaacaagttacttggtagtggggattggatactactaggagttgctagtggggtcgatgaggatggttatccattacacaaatattctttaggtcgaattaagtaa

SEQ ID NO: 316465 - DNA, 165 bp, Proteus mirabilis
atgagaaaattgttatttatttgtttatttactgtcatactttctggttgcgaaaaaaatcaaaccttagatggctctaatgttgagtcattacgaatatcgattgtagaaatgcgcaattcattaccgcttgaaggaagcaatagaattagccatgctaaatga

SEQ ID NO: 316466 - DNA, 570 bp, Proteus mirabilis
atgaatagcaaaatattttttttactcgtagcaccttgtcttttaaatttatcgctgtctacaaccagtcaagccgctacggtaactaatagttacgtttttattgagaataatgtagataatgaatattttattaccccgagaacaaccgatccgcgtttttcgggtgccaataaatatacgcgttattcaaaatcttcacagctcagtttaggttatatggggtataccaatacatccattcaggccaatcaatatgtcgatatttggctagaaaattctcaaatagataagccatttgtgggtaatcgatgtatgaggcgttattgtacagatgatagtggctattggcctgcgcaatatataggtaaagatggggcttataaaatagttcagacgaatactaacggtgaatcggcttatgctcgggggatatttagtgattcggcatacctgtattttcgccaattgcctatgatcccagtaaaggcgaatcttgccaaagtatcggcggcagaatgcttgcatcacatgaattcaatatcactaagtcagggcatatcacgttaa

SEQ ID NO: 316467 - DNA, 402 bp, Proteus mirabilis
gtgacatgtaacggaaaaggtgattttttgaaagtatccaatgaagatgctcaggctacggcgatctatctcctcagagctgcttcgcgcccagctttctggcgtgacgtcccattcgataagaaacttgaagccgtggacagcctgaacagcatagggcgatcaccatcagaactcactgaatggattaataaatacctgacagcagagcaaatcaataaactcgggacatcaattaggcaacgtcgcagaaggggatatggtgttggtaaaagcataactataagcgataaagcccacaggattttgaagcggttgtcagaagtcgatggttgcagtttgtcagaagtgatcgagaaacgcctagcccgagcttataaaaatacatgggaccataaatag

SEQ ID NO: 316468 - DNA, 276 bp, Proteus mirabilis; identical to SEQ ID NO: 25152

SEQ ID NO: 316469 - DNA, 396 bp, Proteus mirabilis
  misc_feature (329)..(338): n is a, c, g, or t
atggctgagaaaacacaatctgacaaattcaaagcggccaagaaaagcacattggtcagtgtttttgttaatatctttttatctatatttcaaatcacaattggtttcttctcacattcccaaggcttaattgctgatggtattcattcactgtctgatttaattgctgacttcgtggtgttaattgcgaataaaggcagtcaaaagcaacccgatgccgatcatccttatggacattttcgctatgagaatgccgcttcattagtgttagggacgattttattgattgttggtttgggaatgatattttctgctatccataaaatgtnnnnnnnnnnccttcaatcattcctgatgttcatagcatcgcgctttatgtggctttattggcattag

SEQ ID NO: 316470 - DNA, 510 bp, Proteus mirabilis
atggctcaggtgtcacagaacgtctatgacactgcaaccggtaaatggctgttggttccccaggggagtcgccttgtcggaacttattccagtgatgtggcatacggtcaagaacgtgtgttggtggcatggcagcggatcgtgtttccggacggcaaggcaatggatattggagctatgcctggtgcggatggtgcaggctatgccggctttaaggatcgagtgaacaaccattattggcgtttgtttagctctgctgtcctgatgtcagctgttacggcgggtgtcactcttagtcaagatcagggacaagacgatggggatggtgtcagcgcaagccaagctatgagccaagccttgggtcagcagctaggccaagttaccgcccagttgatcgcacgaaacatgaatattgcaccaactatcgagatccggcctggctaccggttcaatgtcatcgtgaccaaggatatgacgttttcaaagccctatgaggcctttgattactaa

SEQ ID NO: 316471 - DNA, 780 bp, Proteus mirabilis
atgaacaagaatttagcagctaaaactgtattggtgctggccatgatggccggcatcggccaggtcaatgcaggtatcccagttattgacgccgcaggactggtacaaaacaccatgacggcgatggaagccgtgcgtcaaacaacccagcaaattcagtcttatcaaatgcaattgcagcagtatgaaaatcagctgcagaacacgatggcccccaccgcttacatatgggatcaagcccaaagcacaatgaacaatctacgggcctctattgatacgctgaactactacaagaaccagttgggcagcacacaagcgtatctggataagtaccaggacgttgctttctatcggtcatccccttgtttcagttcaaccggatgcacagagcaggaatgggaggcaatgaaagaaaatcaacgtctggcgtcagaagcacaaaagaaagccaatgatgcagttttcaaaagtttatcaattcagcaggactcccttgcttcagatgctcaaaaactggttcaaatccaagcatcagcccaaaatgccgatggccagttagcggctattggttatgccaatcagttggcaagcgcacaaacaaatcagctaatgcaaattcgcgccctccttatatcacagcaaaatatgattgcgacccaatcagccactcaagctgacaaagacgcaagaaatcaggccagcgaagaaaagttcataagcggaacatataaggcgaccaacgacgcaggctggtctagtaacgacttgctcgggagatag

SEQ ID NO: 316472 - DNA, 234 bp, Proteus mirabilis
atgttaaaaaacacttttattatttttatttgcatgatggccctatcaggttgttttagaaaaaacgtaccagaggccacagacgaaacatgcaatgaaaagtacagagcaaccattgaagacaatgaaataaaagaagcattagcaacaaaatgtttctctcgcggctcatacaaaatgagtaatgaccctgacgtatcagttacagacatgctcaacgacaaaagaggatga

SEQ ID NO: 316473 - DNA, 1665 bp, Proteus mirabilis
atgagaaagactatctttttatttctaattcttttgtcagagtttgctcatgctgaagtgacaaacgaaggattgatgaaatcattccttgaaaaattcaaggcaaacgcggctggctggggcgacacaattacaagtcatgccacatttttgttttgggccctagctactatcagcatggtttggacatttggcatgatggcgctacgtcgtgctgacataggtgaattctttgctgagttcatcaaatttataatgttcactggttttttttggtggctattagaaaaagcgcctgttttagttgcatctatttttgacggattagaacaactggcggggcaagcatcaagactaccaaaacttaaccctagcggcataatagatatggggtttattttatttggaaagataatagacaacactccattatggccgacaaatgcaattgcttacctgctaattgggggcattcttggaatcgccatattggtaatcctatccttaattgcaataaacatgctcatgcttctaatatccgcatggattctagcttatggtggaattctgtttcttggtttcggtgggagtcgttggacttccgacatggccattaattattacaagacagttttgagcataggcattcaactatttagcatgataatcctggttgggattggacagaatataatcttgtcctactcgaatgccatgagtgcaggtgaagttaaagaaatagccgttgtcgctgtctgcacccttattttgtatgttttaacaaacaaaatcccaccccttttaggggggcttgtcaatggttcaagtattggcgcatcacaaggattatccacggctggggctggggcactatttactgcagcaggtgcagcagctgctgtagcaagcatggcagcgtcggcagccgtagccggtgcaagcaatgttgcaggcggaatgcaggccattatgaatgcagtgtctaaagcgggaagtaatgtcgaggctggttctgatctcataagcaaagcaactaacgctgttgccagtgctggatctttcgctgatgccgcaggctttggctcaagctccactgcgagctcatcaggctccagctccgacaccacgagctcatcaggctccagctccgacaccacgagctcatcaggctccagctccgacaccacgagctcatcaggctccagctccgacaccacgagctcatcaagctccagcgcatcaagttcttcaggtaagggttcaacgagcaaaaaagatggcatcggctcaaaactggcgaaagctggaaaaattgctgtcgaggcaggttcaatccttggtagcggtatagaccaaggattaacggataaaacacatgatttgcttgataaaggaaaagaccgagcatctaactccatgatgggtaaattagctcaggaaattaaaaaccctggggccaatgctcaagctaggctcgacaatcaagccatttctgaagcaaacgaaataaaaagcaaccaggctcgatctgcagcggccaatgaagcaagagaattcattaactcaataaacaatggtggcaactccgaatcttctactccaaacgaaaattctcttagtggagaaatggaatcagagattgcagcctttcgggatagaaaataa

SEQ ID NO: 316474 - DNA, 486 bp, Proteus mirabilis
atgaaggaaaagtattttttaattgcggccatttcattggccttatcaattccagtttttgcggctgaccaagatgattgtgctatctggctctgcttgccgacaggcttcccaagtggttgcagtggtgctaaatcagccttcaaaaaccgaattaaacatttaaggccgcctcttcctgatcttatgtcatgcgttgtggatgctcctgatggaacaatgcccaatatggattatcagatgggtgttgtttcatatattcccgcatctcaaaaatgcgtgaaatatgaaataacaggatatggcaacacaggccctcaatacagctgcacacagtatgaggaaataccagctcattatgtagatggcccatgtattccatcttcatatagcggaacaggccagaatggttgcactgcaacccataattacatcactgtttatcaagacggtggggtaattggcgaaacttactattggaactaa

SEQ ID NO: 316475 - DNA, 1428 bp, Proteus mirabilis
gtgtggcttttcgatatcattaagaacggcacactggtcgataaccagtcctattttgtcagcgaaggcattttgaaaaatagacgtttaggaaagtcgataacccttagaaccaaatcaaaagggcagtggacctatcctcataacgacgagtctgcaatttggcactttttgaattcggtatctcgtgatgtcgaaaaaacgctgaatgataatatttccgatgctttaatactcttcaatgatgaagattacgaacacaatacagatggcggtttcatcgatgtctcaggtacggatgccagaaattttaatctcgacacgggcaatttaatcggatttgttaagcgaggagattactctctgaagatcagctcacgttttggtgatgctttccttcaatacatcattgcagatgccgatggatttctcgaattagaaaacattggaggagaaagtcacgcagacggttacgaatggcttttagcatatctatggaacattaagtttaagagagcctaccgcttgggcttgccaaagacttatattacaagaaatgatcgtatttcccgcgtaaggggaactataaatgctacagattatttccagaataaatcatctggaaaatatttatgctcgtaccgagagcacagctacgatagccctgcaacttcactttttataaaagcttatgaagcagttgcacattactcattttgtcaccaaacacgaaatatctatagtgcatttctgactgccaatcaggggataaaaaggtcacagcaagaaattttgaggacttctcatttcaccaatcctttctacaatgattataacgtgctcattgacttatctaagcaagttattggccggaagggctctgattttgattcgcagcaggattcgagtgctttcttttttgatatttcgatgttgtttgaatatttcattcgtaagctcatcaagcgagatgggttacgcctgctaggtaagttcgagctatgtcaggaaatagcatctggtgcgctcagcggttatatgagaaaacttgaacctgatcttgttatagaaatcgatgagagattattcgtatttgatgtgaagtataaagcatttgattcacaatttggggtgaagcgtgaagatctttttcagctacatacttacatagggcagtatggaaatattgccgcaatcaaggggtgtggatttatttaccctatatcagaagaacgatgggcttcacttaaccttgaaaaaacacagggggtgatttcagatattattcaccagcaagggcaagagataccgttccatgtgctttttctaaaaatccctgaagatacttatattgattttaataggaaaatgaaagagcagtgtagcattttcattgatgccctttattctaaggttcttaatcagtga

SEQ ID NO: 316476 - DNA, 1002 bp, Proteus mirabilis
atgggcagaagcagaagtgcaaagaacaaggggctaccgcctaacttgtatttgcgtaaagggatttactattacagggatgtaagaactaaaaaggaattttctgttggctcaaacaaatcattggcaataaccgaagccatacaagccaatttagctatttataaacctaaagagccattagttgacagaattaataatgttcactgtgtaacattgcatgagtggcttgatacttatagggggaaggtaaacagcagggggttaaaagagaagacgctctacgattacgaatcaagaataaagttaatcaaattacactttaatgactgtccaattgagaatgtaacaccaagagatgtagccacatttatttcagagtaccctaaaaaggcaatggcaaaattactaaggtccactatgctagatgcttttaatgaagccattgcggatggtgtgataaaggaaaatcccgtttccgtgacaaagccgccaaaaacaagcgttcagcgatcaaggttatcgctagaagagtttaaatacgccttggagcacacaaatgacaaatataggcatatgtttctactagcggtccttacagctcagcgcattagcgatattatcaatatgaagtgggatgatataaaaaatgataggctgtatgtcacccaaataaaaacaggttctaaagtagcaataccactctcattaagacttgagtctattggttattctattaaagatgttttaaatctcatgaataggaactcagataaaatctgtggcaataccacagcaaaaacattaagaggtaagtttatcgaagccctacctgagtatttggaaaataaaccaacatttcatgaaattagaagtttatctgcaagattatatgaagaagaaaaaagtgctgagtttgcaaagaaaatacttggccacaaatctatgagaatgacagataaataccttgatgatagaggtaatggctacgttgaattgtga

SEQ ID NO: 316477 - DNA, 2004 bp, Proteus mirabilis
atggtgcccgttgcgacattgcctgctgcagcaattctgatgggaataggctactggattgatccggtaggctggggaaacgataatgcgctagctgctttactgatcaaatcaggtgctgccattatcgataatatgtcagtattgtttgcgataggtgttgcttatggtatgtcaaaagacaaagacggggcggcggccttaactggctttgtcggctttttagtggtgactacactttgttcacctgctgcggtatcgatgatcaaaggtctaccacttgcagaagtgcctgtggcttttggtaaaataaacaaccagtttgtcggtattctggttggggtactttcagctgagctgtataaccgttttagcagtgtcgaattacctcgtgcattatcattttttagtggtcgtcgcttagtgccgatcctcacgtcattcttgatgattatcgtcgcctttattctaatgtatatctggccggtaatttacggtggcttagtgagctttggtgaaagcattaaagatatgggggctttgggcgccggtatttatgctttctttaaccgcctattaattcctgttggtttacaccatgcgctgaactctgtgttctggtttgatgtggcgggtattaatgatattcctaacttccttgctggtcagcaagcgattgatgcgggcttggcaacggtcggtgtgacaggacgttatcaagcaggtttcttcccagttatgatgtttggtttaccaggggcagcactggctatttatcattgtgcgcgcaaagagcataaagcaaaagttgccggtatcatgatggctggggcatttgcggcattctttacggggatcactgaaccgcttgaattctcctttatgtttgttgctccagtgctttatgttattcacgcattcttaatggcgatttctgtttatattgccgcaagtatggagtggatttcaggctttggctttagtgcgggccttgtggatatgttcttatcttcacgcaaccctctggcggttaaatggtatatgttgattgtgcaaggtatcgcattcttcttcatttactatggtattttccgtttcactattactaaatttaacctgaaaacaccgggtcgtgaagatgaagtggcgggggatgaaaccgcagacggctatgatgaagatatcaaagccgtccccactaatagcaaagaagcagtgcaacaagaagcacgtcaatatatcgctgcagttggtggctcagataacttaactggtattgatgcttgtattactcgtttacgtttaaatgtaaaagatgccagtgtagtcaacgatgcttacgcaaaacacctaggtgcttcaggggttattcgcttaaataaacagagtgttcaagtgattgtgggcacacgggctgaaattgttgcaagtgccatgcgtgatgtattagcacaaggcccagttgccgcttatgctggtagacatacagataacgcggtatcgacagaaaaaacatcagaaaaacagactaataatgatgccaaagtcattcttgaaatggtcgcgccatttgatggtgaagtggttgcattaaaagatgtgcctgatgaagctttctcaagcggtgtcgtgggagatggtcttgctattaaacccacatcaaatattgtgatggcacctgctgccggtacggtagtaaaaatctttgatactaaccacgcattttgcattgaaacggataacggtgttgagattatcgtccatatggggattgatacggtcgcattaggaggaaaaggctttaaacgtctggttgaagaaggtacagaggttaaactcggccagcctatcttagagctagatcttgagtatttaaacactaatgctaaatcaatgataagtccggttatcatcagtaatatcgatgactttgataaagtgagtgatattgcatccggtcaagtgacggcaaataacaccataatctataaagtattaaaataa

SEQ ID NO: 316478 - DNA, 807 bp, Proteus mirabilis; identical to SEQ ID NO: 313465

SEQ ID NO: 316479 - DNA, 201 bp, Proteus mirabilis; identical to SEQ ID NO: 308954

SEQ ID NO: 316480 - DNA, 900 bp, Proteus mirabilis
atgaaaatcgtaaaaaggatattattagtattgttaagtttattttttacagttgtgtattcaaatgctcaaactgacaacttaactttgaaaattgagaatgttttaaaggcaaaaaatgccagaataggagtagcaatattcaacagcaatgagaaggatactttgaagattaataacgacttccatttcccgatgcaaagcgttatgaaatttccgattgctttagccgttttgtctgagatagataaagggaatctttcttttgaacaaaaaatagagattacccctcaagaccttttgcctaaaacgtggagtccgattaaagaggaattccctaatggaacaactttgacgattgaacaaatactaaattatacagtatcagagagcgacaatattggttgtgatattttgctaaaattaatcggaggaactgattctgttcaaaaattcttgaatgctaatcatttcactgatatttcaatcaaagcaaacgaagaacaaatgcacaaggattggaatacccaatatcaaaattgggcaaccccaacagcgatgaacaaactgttaatagatacttataataataagaaccaattactttctaaaaaaagttatgattttatttggaaaattatgagagaaacaacaacaggaagtaaccgattaaaaggacaattaccaaagaatacaattgttgctcataaaacagggacttccggaataaataatggaattgcagcagccactaatgatgttggggtaattactttaccgaatggacaattaatttttataagcgtatttgttgcagagtccaaagaaacttcggaaattaatgaaaagattatttcagacattgcaaaaataacgtggaattactatttgaataaataa

SEQ ID NO: 316481 - DNA, 441 bp, Proteus mirabilis
  misc_feature (426)..(435): n is a, c, g, or t
atggccttcattcctttaagaccgattccaattaaagatcgacactcaatgatatttattgggatgggacgaattgatgtaaaagatggcgcttttgttgttattgatgaaattaacggtgaaagaatgcttattcctgtaggatccttagcatgtattttattggaacctggaacacgtattagtcatgctgcagttaaattagcagcaaccgtaggaacattactaatatgggttggtgaagcaggtgtgaggctttattctgttgggcaaccgggaggtgcccgatcagataagttattgtatcaagcaaaattagcacttgataatgatttgcgtttgaaagttgttcgcaaaatgttcgaactaagatttggtgaatcggctcctttaaaaagaagtgtggatcaattacgtggaatcgannnnnnnnnnagttag

SEQ ID NO: 316482 - DNA, 1704 bp, Proteus mirabilis
atgagggaaacttcattaggaattcaaaaatatgagctggtacaacttacagagagactggagttgttacttaatagtgaaggaactcaatatacagagattattgaaccagaggtttatggcctatctgacgaaatgctgactctacttcaaagttcgttgacagcatcgtccgatacaccattttcagccattattcagcagttaggtaacgctgattgggttcatagtggaacaggttatattaaagataatatttgtccattttgtcaacaaaaatttgattctcagcatcttcttcatgaattgacactcatgtttgataaatcttatgaagatgctctggcaacgcttacccacagtcagacagtcatttcccatgaattagacttattggagtcattccatgagcatttacgacaacaccctgtagttagtgatgatcaccaagtttttagtattattaaatctctgcaacaaactttacgtaataatctacaatcactcagacaaaagctactacagccttcgcaatccatacaacctgacgttattacagatatacgtcagcatttgaaccagatactggtaactttaaatagtaacattagagacaataatcagctggcagccaattttagtcaggagcgagctcgcttggcggcagattcctttgcatatcttagagaagtgagtgatccttatttgcgtcaatgtgatcaggaattagcagaaatacaacaacaattgcaagctgagataaatcaagttgatttattgagagatgaagagcgagcactttcggtcgaaactactcatcttatagggcaattatcagttatacagcctacaattgataacattaattataatctgacacaattagggatcaatgatttcaatattatttgtcatgatgagagcttgaaactatatcgcttacatagacaaaaccagccagatgattctgaggtctttaaatctttgagtgaaggcgaaaaaacaatcatatctcttctctatttcctagaatcatgcattggtcacgtacctgatagccagacaatacaacctaaactgattgttattgacgatcctatttccagcctgtcacataactatatttatgaagttgcttcgatgataaaacataaattaattttaccgaagattgcgcaacacattgttatattgacgcataatatatttttctttcaagagattctactttcagtttataaacgactggctcccgaacgtacaacaccaaaggggtgtgcactttatcgcatcattaaaggagaatatagtgattgtatcccattatcgatgcacgacatgctgaatgagtatcaggctttatggcaaaccatacgggatgtccgcgatggaagaagtttaccggtagtattacctaatacaatgcgaaatattcttgagtactatttcagtttttcttgcaaacaggaaaaactggataaagcgctaaataagctagcagttgaatattcagcaggggaatatgactcattttatcgagcaattaaccgtcattcccattctgatggcagaaatatcatggctacaggagtgattaatgtagaaatgtatttccgtttatttcagaaaatttttgaagaaacgaaggattctgatcattacaacacgatgatggggattactgttgagcaaacagaaggttga

SEQ ID NO: 316483 - DNA, 534 bp, Proteus mirabilis
gtgtacagcggtgaagtcagtacgcagcgtgacagtcagagcgtcagacgcagcgggcaggctgcgggggcggcagccgatgccgtaccggaaagcgtggaccgcaaagcgaaaacccgttatccggcgccgttaccggtcttactgacccgttatgccgcccagagtctgtatgcaccgttaagaacggtggagccggtgtccggcgtacaacctttgccactgaccttaccaaaaacactgacagcactctacccgtctgaaccactgatcgcgcggccgctggccggctggcaggcggcggagtaccgggtggtggcggtgaaactgaccaatcagtccgctcagaaagtcgtgctggatccccgtcagttgcaggggcagtttgtcagcgccacgttccagcatcagtggctggacgcgaagggcacaccggaggataccaccacagtgtatctggtgatgaaaggcaaaccggataaggcgtttcctgcggagccgcctgtccggaggacgggagggaaagcccgatga

SEQ ID NO: 316484 - DNA, 489 bp, Proteus mirabilis
atgttagaaggcacggtagaaactgctgcagtgatgttaccttttaatgataaagattttgaattaaccattttttcagaagatcacttgatgttattagtagcacaatcccatcctttggctaaagataagaaggttaattttaaacagcttattacagagcggtttatctttttttcagaagattttcgtattaatgatttggtacgtagtgcttgtgggatttataacactgaaccacaaattgtggggagaagtaatcatttagatttaattattgcaatggttaaagccggtgtcgggatcacactgttacctaatagcatgtgtaataaatatcctatcgatgatttagtggttattcccattacttcctctaggttatcttatcaattagctttagccaccaatcaaaatagttatcaaagccgtagttgccaagcatggaataaattagcaatagagaaattaatgaaagagaatatttaa

SEQ ID NO: 316485 - DNA, 420 bp, Proteus mirabilis
atggatattcgtgttttacgctattttattgaagttgttcaattaaatggatttagccgagccgctgatgctttatttattacacaaccagccattagtcgcagcattaaaaaattagaggatgaattaggcactgttttattaataagagaagtggatggggtaaaattaactgatgacggtgctattttatatgagcatgcaaagcagatcctcgctcaatttaatagtatgaataaagcattaaatgataaagatgaacctttaacaggcgccttaaatgtcggattacctcctgttatagcctcaacctattttgctgatattatcatggcgtttagctctcgccatcccaatgttgatggaagatgcgatgttagaaggcacggtagaaactgctgcagtgatgttaccttttaa

SEQ ID NO: 316486 - DNA, 270 bp, Proteus mirabilis
atgaatagaatagtatttgtttttgctttaatcatatcgtcattaacctgttttaaagcatattcagcgtttacgcttaatggtactcgctttatttatgatgaaggtcgcaagaatatcgcgatagaagttaagaataatagtgataaaacctatggtggccaagtttggattgataatcttaatgggaatgaagtgttctttattcctgcacctaatttattcaaaataactggaaaaacaattaatccgcttgctatatgtaaatga

SEQ ID NO: 316487 - DNA, 423 bp, Proteus mirabilis; identical to SEQ ID NO: 25058

SEQ ID NO: 316488 - DNA, 603 bp, Proteus mirabilis; identical to SEQ ID NO: 25057

SEQ ID NO: 316489 - DNA, 1032 bp, Proteus mirabilis
atgactgttagaaaattaccatcaggcgaatggattgccgacttttatccagaaaatagagaaaacggcaaaaaaggtaaacgagtacgtaaaaaatttgctaccaaaggtgaagcgcttaattatgagcgttatatcatggataagatcgaagggaagccctgggtagaagagaaaaaagaagataaacgcctgatgatagaacttgttgatacatggtacaactctcatggaataacattaagcgatggtaaaaagcgtttatccgtaatgcgttgggcttgtgaacaaatgggaaacccattagctagtgaattcaccgcccaattatttgcaaaatatcgtgaacagaggctatctggcaaattatctcgtacaaatcgtatagataaagttactccaagaactgttaatcttgaactagcttatttcagggctgtttttaatgaattagaaagattgggtgaatggaacaccgaaaatcctataaaaaaaatccgagctttccgtacagatgattctgagatggcatttctaacacaaaatcaaattgaattattaataaaggaaagtaaaaaaagcacagctaaagatttagaaattattattaaaatagcactatccactggagcacgatggtcagaagccgaaagtttgacaagttcgcaagtcacaccttacaagataacttttattaaaaccaagggaaaacgtaatcgaacgatacctattagcaaagaactgtataaccaaattccaaagaaaaaaggagccctattcaccccttgttattccgcttttcgatcagcaatgaaacgtacaggaatagagctaccaaataggcaatcttctcatgtattgcgccacacctttgcttcatacttcatgatgaatggtggcaacattctagtattacaacgaattttaggtcatacagatataaaaatgactatgaggtattctcatttttcaccagaacatttagaagatgccgttagatttaatcccttgaaccattccttacaagaataa

SEQ ID NO: 316490 - DNA, 963 bp, Proteus mirabilis
ttgcgtacctatcggcgctggtatagtggtggacaggtcaaggcagataaaagaccggaggcggttcgtcctgagccagcaaataaactgacgcaagcggaacaagagcaaataattgaggtgtgtaatcggaagcagtttgccagcttacccccatcacaaattgtgccgaccttgttagatagtggcgaatattacggctctgaatcaacgttctaccgagtcttaaaagcgcatgggcagctccatcatcgtggccgcagcttagcgccgaaaggttcagtgttgccaacgacttataccgcggcagggccgggtcaggtgttttgctgggatattacgtatttgcccagcacagtgcgtgggcagttttactacctgtacatgttggaagacttgttcagccgcaagattgtcggcaacgaagtgtatgagcaggagtcaggggaacatgccgcgaagctgttagagcaaacgctggtacgggagaactgtttgcacagtggtgtagtgctgcactcagacaacggcgcaccgatgaaatcgcaaaccttgcggataaaggcatacgagcttggggtgaccacctcatacagcagaccacgagtcagcaatgataacccgtttgcagagtctctgttcagaacctgcaaataccgaccagattggccatctgcagggtttaaaagccttgatgaagcaagaagatgggtcctgaaatttacgcgctggtacaactacgaacataagcacagtcaattgcgttttgtgacgccacaccagcgtcatacaggtcaggataacgctatcttggcccagcgaaaagcacgtatcgaggcggctaaagatgcaaatccaagtcgttggggaaagcgcgaagtacgaaactgcacccccgtgggaccgacaacgttgaatccagaaagagagcagactaaaccaatagaaaaacaggccgcttaa

SEQ ID NO: 316491 - DNA, 501 bp, Proteus mirabilis
gtgccgagttacagtgaagagcgtaaacaagagatattgagcaagttattgccaccattaaatatgaccgtggcagaagtatcacgcaatgaagggattgggctgcaaaccttgtataattggcgtgataaagccaaacaacaaggtcgccctgtgccgggaaataaatcaacaccagaccaatggtcagcagaagctaagtttgccactgtactcgaaactgccagtttgaatgaagccgaattgagcgagtattgccgcgctaaaggcctgtacgttgagcaagtgaaggcctggaaagcagatgcactcagaggctttatgagttctcgtgagcaggagcttgaagccaagcggcagcgacaggcagacctgaaagaaatcaaacagttgaagcgtgaacttcggcaaaaagaaaaggctctcgcagaaaccgctgcaatattggtgctgcgaaaaaagttaaatgcgctttgggagaacgaccacgaggacgattaa

SEQ ID NO: 316492 - DNA, 327 bp, Proteus mirabilis; identical to SEQ ID NO: 308393

SEQ ID NO: 316493 - DNA, 330 bp, Proteus mirabilis
atgcgtgcaggacgattacgccacaccattaatattcaaaaatcagtattagcgcccgatgccatcagtggtagtgatgtgatttggacggatcatgcgacaaaagtacgtgcagcgatcatgccttatcaagggcgggaatattttcaagcccagcaagtacaaagtgaggccacaacacgaattcttattcgctatatcgctgatattgatacttcgatgcgtattgtatggggtaagcgaatatttaatattatttcgattattgacccttatgagcgtcatcgtgagcttcaattaatgtgcaaagagggcgtgaatgatgggtga

SEQ ID NO: 316494 - DNA, 198 bp, Proteus mirabilis; identical to SEQ ID NO: 14560

SEQ ID NO: 316495 - DNA, 339 bp, Proteus mirabilis; identical to SEQ ID NO: 30181

SEQ ID NO: 316496 - DNA, 327 bp, Proteus mirabilis; identical to SEQ ID NO: 308393

SEQ ID NO: 316497 - DNA, 330 bp, Proteus mirabilis
atgcgtgcaggacgattacgccacaccattaatattcaaaaatcagtattagcgcccgatgccatcagtggtagtgatgtgatttggacggatcatgcgacaaaagtacgtgcagcgatcatgccttatcaaggacgggaatattttcaagtccagcaagtacaaagtgaggccacaacgcgaattcttattcgctatatcgctgatattgatacttcgatgcgtattgtatggggtaagcgaatatttaatattatttcgattattgacccttatgagcgccatcgtgagcttcaattgatgtgcaaagagggcgtgaatgatgggtga

SEQ ID NO: 316498 - DNA, 474 bp, Proteus mirabilis; identical to SEQ ID NO: 308979

SEQ ID NO: 316499 - DNA, 474 bp, Proteus mirabilis; identical to SEQ ID NO: 52832

SEQ ID NO: 316500 - DNA, 303 bp, Proteus mirabilis; identical to SEQ ID NO: 315276

SEQ ID NO: 316501 - DNA, 348 bp, Proteus mirabilis; identical to SEQ ID NO: 6026

SEQ ID NO: 316502 - DNA, 363 bp, Proteus mirabilis
ttgctaataagaatggccgttttcttttcatttagagaaaatattaaagcaataaaattaaaaaaattaacaccagaaaatccgataatatttaagttttatgatacaggaattacctttaaagagcctcatcaacatggatcattatattggcaagcttttactttgattgaattgacaaatgattatctatatttaagcttatgcccagaaaacacagagaaaggaaaagagactgcaggtatttcagatctttttattctgacggaaaatctaagtaatgtcgatagcctgatttcattattatctcatgaatattttcttagtagttttacttttcgtgataatcgtaaaaagaaatag

SEQ ID NO: 316503 - DNA, 363 bp, Proteus mirabilis; identical to SEQ ID NO: 316502

SEQ ID NO: 316504 - DNA, 258 bp, Proteus mirabilis
gtgcagcgcaatgggcaagttaaaacgcgcatttgggtgaaatcattatcaggtaaaaaggtgtctgcctttaaacaagtaacgggaaaaagtgcagcattgaacccgaatgatccgttttattggtggtttgtcgaatttggtaccgccaagatgcccgcacaaccgtttatgcgccccagttttgaagcgaaaaaggaagcgacggctaaagtgattgttcaaacacttaaagaggatattgaaaaagcaaggtag

SEQ ID NO: 316505 - DNA, 327 bp, Proteus mirabilis; identical to SEQ ID NO: 308393

SEQ ID NO: 316506 - DNA, 252 bp, Proteus mirabilis
gtgatttggacggatcatgcgacaaaagtacgtgcagcgatcatgccttatcaaggacgggaatattttcaagtccagcaagtacaaagtgaggccacaacgcgaattcttattcgctatatcgctgatattgatacttcgatgcgtattgtatggggtaagcgaatatttaatattatttcgattattgacccttatgagcgtcatcgtgagcttcaattgatgtgcaaagagggcgtgaatgatgggtga

SEQ ID NO: 316507 - DNA, 186 bp, Proteus mirabilis
ttggaatacgccacacggggaatattttctacctatcttattcaactaggtaaaaaaataaaaaataaagagattatttttaaagatatgttggaaatactctctatcggtcatcattccggtgcagatactttactgggattatggattggttatcaaattaaacaacaacagcgtatagattaa

SEQ ID NO: 316508 - DNA, 420 bp, Proteus mirabilis
atgaagatgaaccgggaccatacggttccactatcggatgaggcaatctcaattctggaaatgatgaagtccctcagtggtagccgggagtttatctttcccagtcgcatcaagccaacccagccaatgaacagccaaacagttaatgccgtactgaagcgtgctggtttaggtggcgtactcgtttcacacgggctgcgttctattgccagcacagcccttaatgagcaaggctttccgcctgatgtcattgaagccgcacttactcatgtggacaaaaatgaggtacgtcgcgcttataaccgcagtgactatctcgaacaacgtcgcccgatgatgcaatggtgggcggattttgtaaaatcagcggaaaagaagattaatgataattcagtgattaaactgaaatttacctcgtag

SEQ ID NO: 316509 - DNA, 4971 bp, Proteus mirabilis
atgtcagatttaaattattcatcaggtaataatgggggggaaggagcgtccgtatctccaggatattctcttgtaaatattcctgcgtggcttgactctcctccagatgaagaatttcccgctttacctattaatactcgtctgcagaccctgccttttggtgagcttacttgggaaaattttgaacgtttaatcaaacgtattgtctctcgagaggaaacaataactgattgttggatatatggagttccgggtcagaagcaattcggtttagacattcttgctacagcgaatgatgattctgattattttgtttgttatcaatgcaagcgtgttaggaattatacatcggatgatataaagaaagctgttgataaatttctggaaggtaagtggcttaataaaacaaaaaaactcgtattgtgtgtttcttcaattttgagtagaactgaatgtatcgatgaagtcaataatcaaattaaacggctttctttatttaacattatttttgaggtctgggatggtgctgaaggaggcgttcttgctgaaaaactaaaagtatatccggatttagtggacgattttttttctagagaatgggttagacattttaacggagaggatgctgcaagtttactaggggaaaggctgcaaggattggagctaaatcaactgcgtcttcaacttaatgatatctacaagaccttattcctcaggcatgacccaggacttcgtttgggttcgcaaagaccctcttctcttatatcccgttatataccaccgactgtaattgaatctagaaacgttatgtcttcagacatggtttcggaagaaaaagcatatcggcaatatgatgatggtactgtaaatagtgattctaaaccaaagcaatattctaggaataaacctgcaggaacacaagaaattaatgtttcattagatgagtggtttacaagacagcatcggagtgtgattctcggtgagcctggctttggtaaaagtactttactgcgtgttatggcattgcaactactttcaacatttgatgaaccaataaaaacctcgtggaacaacttattgcctgtatggatttcatttgggggttttagttctgctttgcaggcaaacccgctcctgagttttgaagactattttgataattggttacatcaaaatgcggcagatgatgttcgtcctctatttcgccgagctataaaacaaggtggtatgcttcttcttgttgatggattggatgagggacaagatattgatgttgcaaagcaagctatggataggattagttctttcttagcaattaggtctatacccgcagtgttcactagtaggccacggggctatgaaagagtacgcccggatgggaattggccagttgctaaattaagtgcctttgataaaagtcaaatagagcaatttgcaaatatgtggtttgagtatcttgagttaccggatgcagggccagttgaacggatttcagaacgcgtacagcagcgcacgaatgatttccttaaagctacccaagtgaactcgagaataattgaattagctcagactccgcttttttgtcaacttcttatagacatatttagattttctcatcatttacctgagcaacgcgtaaaagtttatgaaaaaataatagagttattgatttctgaccatccctcagcccgttctcaggctgcaggtatttctgggaatatgctcccccgttctgaagatatgcgtgaaatgctaatgaggttagctcttgatattcaagagcgcggtggtgcaggtgttgtttcagtagaagcctgtcaggattcattctgcaattttttaactgatgatattaatgggcctggtcttaagaagtatgatgcaaagtatcaggctcagattataacagattatgctttatctggtttaggattaatgattgaacggtctccaaatgaattgggattttttcatctcacaatccaggaatatctcgctgcccaagctatgctccgtaaagaagaagaagaacaactcaattggcttattagggtttggaatcttcctcaatggcatgaggttatccttgcatggtttagcatacgtggaatggatcaaggaaagggagcaaatcaacgcgcgattgattttttaaaagaatcggtaattactccatgggaaaatattcaattgctggttcttagaacagaactggctgcaaatgattttggactatctccaagggaagctcgtgctactattgagcaagcagcaaaagaaatagaaataaccccttttagaaaaattaggttagtactttcaggatatatcgcgcaagggcttcgctcgtcttctgtgaatagtatctgtgaggcttatataacaaaatggacacagaccagagacgaatggtgtaaagccaggctttttcgtacattatgtggttggaagccctcaggcgatttattacaagccttaaaattgggtttgcatgatgaagatctcaaatgccgctgggcttctgcagaaagccttgcaaaactgtactctggtaacgatgaggtaaagaatgagctatcacaaaaagttaggatgtggcctgacttagagatacgagcagcagcgttatactgcttgtggaagggatggccaaactatgaagctcttaatgaatatgctgaagttgcaagtaagtcaatttgccaaagttttgctatagctggtgtattaattaaaatttcaaagaatcaacatagtgatattgatcttgaaaagatctgtcaaatgtattttacaagaactgttgactatgacttagaagggatatgctgcgagttattagttaaaggttggggaggtgacgagaaactaaaagagaaagtattaattgaattggatttaaaatttaaccagggtgtatttgaagttgaacgctttatttcttttttggtacgcgcgtggcctggagataatgatgttgccaatcatgtagttcgctatgtcaaaaaatatagtatcgccatgatgcatggaagtggattgtggcaggctattatatccgggtttggtggaaataaagaattaattaatgctataagagatgtattaatagagcgaaaagagaaatataaagctatttattgggggccggatacgaaaaatgcttatcttgcaatcggtgatgatgtagcgaaaaaagagatgcttgaagcatattctcaagttgatagtatcatggataaacattggatatgttcgacacttatgactgggtggaaaaatgatccggaggttcaacgatttttttctctagaatttttaaaaccaccggttgagaatgccattcttgccaattgggtgcatgtttttataaatgacaaagatgctagacgttcgtggttgcttggcgcaattactacaggtaatgataggggcgtcttatcagctgttggtcggttacttgatgagtttaatgatgaagagtgcatagataccgttaaggatattttaaccaaaaaaaaatacaactattattcagaaattgatataaagaatagacttattgaaattgtacctaaagatccagttgtcaaacaatgggtgatgaattcttttgaagaaattgatagtttgtctttatcttcaatagcgataggttatgaagataataccactgtaagagaaaaaatattaaatgcgttatgtccaattcattcttatgctagaacggaaatatttcgaattattcgagagcacttgatgccttcagaatctatcatgcgagtgacctcaagtatttttgtagaaactaagcccttgattcgtacttcaggtctcattgcgaggtgtattgcaattcagcattatccagatgattttttattgtttaaacagatgttgtgcaaggaattagactcagtaggcatggtttatgaaatgcggaggcgtagcgcatttgctgctttattatttctaaaagagtacgattactgtgcggagtatctaagccgagaacaggggtcttccatgcattggttatttgatcataagcatgaagatattttatcagctcggatcttatttgaatcttgggatgcgttaaaaaacaacaaatatctttctaataaagatgttaaaatatcatggtctaattttattcatgatgggactgctagaggaagtttaaatgatcgttcttctagaggtcaacttgttgcctgtttgaaaaacatgtcaattaaagaacataattctcaaagcctttttttaatggccgatcttcttcctgcatcaaacgaattacgagattgtttggtcgagataatgagtcagcaaggaaatatttcttattatgttgaagaagaaaaaatagctattgctcaaagtatttatgcagaacaatttcatggtgatgctgaagcatataatgctttggaagagatctggaaatctctgaaattagatgaggatattcattcagaatatttatttaatgtgctttatgccttggctgttggatggccaaattcaaaattaattcaagcttacgttcaaataactgagcagccgaaagtatttttacatattgctttaatactttgtggtgtgacgggagatttagaaagagcacaggaatgtattgatgcgataataaaggaggctttacatgtaaatcatccttttctctctttatacatagaggcacttaacaaatggtcatatacagagtcagctgatattcttttgcaaaaattccttaaaggggagatgtcttcacatttcattactgccttgaaattacttacatctactgggcgtgcaagcgaagagtttcgcctaaatatggttggttattttaacaatcaatttaattccgatgcgataattaatgaaggtgtcgatatttttaatggggaagttgtttcagttatccagataattgtggatgaatgtatgctaatgaccctttaa

SEQ ID NO: 316510 - DNA, 807 bp, Proteus mirabilis
atggtaggaattgaagatgtgcctcagctcgaaggaatgtgggcaccactcgatgtccgtcgtgggctcaggcaaatgtttagacgttggctacccactactagtcatctgcgctctggtttcgggcaagtagaaatgttcgatgaaatagagctcctcgatttttgccagcactaccgactagagtattttggtgcagcaaaggatattgccaaaatctgggacgagtcaaaggaacgtattgccgatggaggtcctactttcagtgagctaactcgtctaggttggatagttttcgacggtggtcgctggattatgcagtgctcacctccgggcacgctttcgcacatcacttacccaagtccaagcacgcaaaaatttctacatgaactttctaaaatcaaacttattgataaaacctctaattttacacaaagtatccaaaatcaagcggccatgatattggatgaacagttattggagcgatacatcccggctagcagacctgactggcttgcaggacggacagacgcgtgtccactatgggcgggtaagatcagatatactctcctggctttgaagcagataaatatatgtaacggaccatgccggggattagggatggaggcggaaaaatgtgcgtctgctaatgataaatatgaatcctcacgacgtggagactggaaaaataaagcggctgccattaatatcctagagaaggaaataattgattttattgatacagggccgcctaagaacgcctactactcatcatgggaatcactgcatcgaacaataagtgattag

SEQ ID NO: 316511 - DNA, 591 bp, Proteus mirabilis
atgctcgaggcgatagctatatttgcaatggcttgcgccaaccctgagtcaacggtcgcggaagtattagcaccagttttaagtgcagaactctttgaagtagatcatcgccttcaggaggcttatgccgacaagtcaccagccccgcaagttcctggacgaggtgaggatgagtcaaagcaaacaagaatgcgccgtggatggtgtgcactgtttgctgctccatggaaacagcttaagtgctatcgaaattaccttgctgggatttcagagctcgcaacacatcaagtagttaaaggctctgagttcaagcacgtcatggttgtaatggatgatgctcttgctggtgggactcgctttaagtacgacacgatttttggtggtacgcagttaagtccaaatgacaaaaagaatgcaaagtctggtaaggagacaaccatcgaccggactttacgtttgctgtacgtgacttgtagcagggcacaagaatcgctcgctttagtgctttggtcgtccgatcctgctgcagcaatggctcgaatcaaggagagtcaatggtttgctgaagatgaaatacaaataatcacataa

SEQ ID NO: 316512 - DNA, 945 bp, Proteus mirabilis
atgatcgagcgttttcacatcaaccagccccataacctcttttatcctgtcagtcaactggcgatcggctttgctgggctctggcggacaactgaagtattcaaataccatcctgatcgcaatacatatgggcctggggcattaccgcacaattccgtactcgatgcgacagcttggttgcttcaaaataagccaacactccaatccattctcaaagatcgacatccaatcatactgattgatgagtcgcaggacacaatgaaaggtgtactggactccttgatgttcctagtcaaaaagcgggagggcgatttgactcttggtctgctgggagatcatcgacaacgaatttatatggatggtcatgccgatcttccaagcattgttcctgaaaattgggcaacgcctgagttacaaatgaatcatcgtagccaacgacgtattgtcactctgatcaataaaatctgggaaactgaactggaagggaggacgcaaccagcaaagggttcagcacaacatccccgaacagaaaaggctggcggaacggttcggctcttcttgggggatacattgcaaagtccagacgataaggtgctcagcgaacgctggtgtgctgaacagatgttcgaagttagtggctcggtagcctggaatcaagaacaatataagctgcttgcgttggagcataagctcgttgccactcgtagttcgtttcttgatgtgtatgaggcaatgtttctgttagatccccacaccgcagcgccatctggcagtggggacaacaaggggccttcaacagtacaaattttgcttaatgagcttgcgcatttagaagccagcgtcagtaatgaaggaattgtgaatgagttcaaggcaaccgaggttttacgacgttatggtgctttagacaatatacctgaggactcagaagcaagagcgtactga

SEQ ID NO: 316513 - DNA, 222 bp, Proteus mirabilis
atgaaaatcatcagtaaacgccaggcaatggccttgtaccgacagcatccaggctcccggctgtttcgcttctgtaccggcaaatataaatggtctggcagtatctgccattatgctggccgggaagttcaggacatacgtggcgttctggccgtgtttgctgaacgtcgtcaggaccgcaatggtccctatgtgattcttcgtagcgtgactctcaattaa

SEQ ID NO: 316514 - DNA, 366 bp, Proteus mirabilis
atgtacaatcattcaaaatccggtaccaagccggagagtcccgcctgccagctgtggggactcaaacgtgctattaccccctgctttggggctcgtctggtacaggaaggcaaccgggtgcattttctcgctgatcgcgccgggtttaacggtgctttcagtgacaacgatgcattgcgcctcgaccaggcctttccgttgatactcaaacaactggagttgatgctgattagcagcgagctcaatcccctctatcagcactgcgtcacgctttaccacaacggactcacctgcgaagccgacacactcggctcctgtggctatgtctacattgctatctatcctgagcagactgagccgcagtaa

SEQ ID NO: 316515 - DNA, 330 bp, Proteus mirabilis
atgcaaaccttatcatcacacccgacacgggcgactcagcccaatctgtcacccattgaaacctggcaacggctgctgactcatctgttatcgcagcactatggcctgacgttgaatgacacaccgttcagtaatgaaaccaccatccgagaacatattgatgctggagtatcgctcagcaatgcggtgaactttcttgtcgaaaaatacgggcttgtccgtatcaaccgaaagggattttcgtggcaagaacaaaccccatatatttccatagtggatattctgcgagcaaggcgctctaccggcttggtaaaaactaatgtgaaataa

SEQ ID NO: 316516 - DNA, 1404 bp, Proteus mirabilis
atggggagtgagttaacctcaatgagaatagctgattgtatggatgcgattatagactatcgaggaaaaacacctaataagacaaatgcaggtattccattaataacagctaaaattattaaaaatggacgtattcttgatgctactgaatttatttctgaagaggactatgatttgtggatgagaaaagggatacctcaagcgggagatgttgttcttacaaccgaagctcctttaggtgaggttgctcaattagatactcaaaaagttgccttggcacaacgagtgattacattgaggggtaagaaaggtatattagataatgattatttattgtatctacttcaatctcacatagttcagcatcagcttgatggtagagggactggtagtactgttaaggggatcaagcagtcagaattgagagaaataatcttaacttttcccgccctcaacttacaggaaaaaattgcacaacatttaaaaaatattgataaaaaaataaccctcaaccgccaaatcaaccaaactctagaacaaatggcgcaaacgctatttaaatcatggtttgtagattttgatcctgtggttgataacgcgctagatgccggtttttttgagcaagatttaggcttttctgaagaattactgcatcgagttgaagtgcgcaaagcagtacgcgaaagtgataattttaaaccgttatcagaggatattcggcggttatttcctaatgcgtttgaagaatgtgctgagcctgcattagggcttggtggttggatgccgaaagggtggatgagtaaaagtatatctgatgctatttttattaatccgaaagtaaatttagctaaagatactgttgcgaaatttgttgatatgaaagcccttccaactagcggatattcaatagaagaagttagtgaaaagcctttttcgggaggaatgaaatttcagaataacgatatattattggctcgtataacaccgtgcttagaaaatggtaaaactggaatagtagatttcctgtcagaaaatgaagctggttttggttcaactgaattcattattcttcgtggtaataaaaacatacattactcatatattgcctgtttagctcgatatgaatcatttaggcaacacgttatacaaagtatggttggttcatcagggcgccagagagttcagaatgggtgctttaatgactataaaattgcagtgccctctggcgaagtaatgaatagatttgctgatatagtttcaccttcgtttaaaaagttaacacagaatacaaatgaaagccgttcattaaccaaactccgagacacactcctcccaaaactgatctccggcgagttgtctttgagtaatctaaaaatagatatcccagaagaaactttaatctaa

SEQ ID NO: 316517 - DNA, 396 bp, Proteus mirabilis
atgaaattaattactgttgctgcgctcttattctctgcatctgccatggctgcggatcaatgcaaacttgatgatgcctgtatagtgtttaaaccagactctatagaagagaagggattctctgttaagtgtgagaatatttacttcgctgaattaaaagatgacttgtatgacagcaagaaattggttgtgaaaatgatagatccaatagacataaaaaataaatcgtcattaacaggctatagttttggggttatcaatatccttaatcatatatatggcggtgcaagaatagacattaacctttcagataatatttatttatctatagatgaatctcaagtcaatgcagcaaacgcactaataagttgcgttgattcgcttaaagttaagtag

SEQ ID NO: 316518 - DNA, 303 bp, Proteus mirabilis
atgaacgatattgagcgcatagaccacatgattagcatcttgcgagacatgaaaaaagatatcgcacgacagcaaaaattgagcgctgttaacagcttggaattgacaccaaagcaagcacagaaacgcaacactgatttgaactggataggcatggagcaaataaaacgccgtcacaatcttcactcatacgctgtagagattggaatcgcagactataaaggcaatgacggctacgagaaaatagaattaacagacggttggcatagattcaacttccagccaagaaagccatttagttaa

SEQ ID NO: 316519 - DNA, 327 bp, Proteus mirabilis
atggaatacacaaatacacgcaaacaatttaataaattcatttcaaatcacttgatggcttcggcattacaggcattgagaaataaaactcagtcggtggtcgctaaaacattaggtgttcatgactcaaccattctacgcagaactgaaaaatatcctgagatatgcgagacattagtcgcatcagggatagtcgattttgtgatggaaggtgagaggaaaatatcagaggaagaataccgctttttatggaaacaaataggtgaactgtcacagatgagaacaaaagaaaacgccccgattgttggagcaaccgaggcgcattaa

SEQ ID NO: 316520 - DNA, 348 bp, Proteus mirabilis
atgtctaggaaaataaaagtagattatagagttatattaacatttgatgttgatgttaaaggtgaaacgaatatttataaggaaatatcagaccttcttcagaaagaaggtctggttcaacaatttaataaaaaggatctcccttcaaatatttacactggaggcagaacggccgaaattacatatgaaggcgaatctctgaccgttgatgatgtaaaaaaaagaggagacaaaataagcgaacgttactgggtgcttgttaataaattctttgaagataagaaattagaacattcaatttttatttcaacaactcattcaaaaacaacgtcaataaagcatgagtag

SEQ ID NO: 316521 - DNA, 189 bp, Proteus mirabilis
  misc_feature (141)..(150): n is a, c, g, or t
atgcttggttctccatatactaaagaatattgttctttaataaggcaacaagtaaaaaatgaattacaaaataataaatataaaattgtttttattgctgcaagatttgatttagcaaaaaaaacatatggtgaagaagcnnnnnnnnnntattttcccagccaattacatataaaaagccagttataa

SEQ ID NO: 316522 - DNA, 435 bp, Proteus mirabilis; identical to SEQ ID NO: 22495

SEQ ID NO: 316523 - DNA, 195 bp, Proteus mirabilis; identical to SEQ ID NO: 76850

SEQ ID NO: 316524 - DNA, 1044 bp, Proteus mirabilis; identical to SEQ ID NO: 143258

SEQ ID NO: 316525 - DNA, 438 bp, Proteus mirabilis; identical to SEQ ID NO: 22496

SEQ ID NO: 316526 - DNA, 258 bp, Proteus mirabilis; identical to SEQ ID NO: 143246

SEQ ID NO: 316527 - DNA, 543 bp, Proteus mirabilis; identical to SEQ ID NO: 143245

SEQ ID NO: 316528 - DNA, 207 bp, Proteus mirabilis; identical to SEQ ID NO: 143243

SEQ ID NO: 316529 - DNA, 237 bp, Proteus mirabilis
atgcctttaattgcagggcttatactagcgacggctcctttaatgctggaaatggttacagataaacaaccacttccatcatgggcgtctgtggcggctgccggtataggtttttgctgttcaggtgttggggctgcttttacgaataccctttcagcaaaaattataaaactgttggcaggtgtttttgtggtagtgatggttatcctggtattaattaaactgattaattcctaa

SEQ ID NO: 316530 - DNA, 342 bp, Proteus mirabilis; identical to SEQ ID NO: 143285

SEQ ID NO: 316531 - DNA, 243 bp, Proteus mirabilis
atgccagctatcaaagtgatgactgatgagcgtaaacggaagttaagaaatttctggataaaatttaaattcaatcaagagcgctgggagaattatttatcgtatattgccagtaattgtcgatggatgatggaggatcgagataatgggcgaggggggacatggcgacgtaaaaatttagattatttaattacggaacgttgttatgttgcggttaaggaggaacgtgctaatgacaagtga

SEQ ID NO: 316532 - DNA, 456 bp, Proteus mirabilis
atgaccgccgctataaatctagataacagaatagtgattttttattttgcaatatttggatatttatctgaaactgtatctattcaaagaataaataaacacaaccatgtttatgatagaaaaatgcctcatatctataatttattaaaattagaagaaaaactaaagaaagagagggccatacaattggtgggtaataatggtagtgggaaaacattctttctcagaaatcttgcttttattaataaatatatatacatagatcacaatattagtcatcatttgataaacgatgaattcttagattacttgaataaatcagattcaaatgtgatcatatttgatgaatttgattgtaggtcgcttatagataagatagatataaataaaaaaataatattagtattgcatttagattgtcttaattctaaattagacattagtgagataatatga

SEQ ID NO: 316533 - DNA, 123 bp, Proteus mirabilis
atgcaatatagcattgtcatatattttaatttattgctacctattttattttttattcaaaaactattcttttattatctgtttattaccattgttaggtttattttaagtgaaaatacttaa

SEQ ID NO: 316534 - DNA, 489 bp, Proteus mirabilis
gtgcattgtccgacggggtatattgatccgtttgggttggagtgttgcccgacaagtcttattagtgaacaaaggcaggcaaagatcaatgagcttgcagaggctaatgcactcagacggttacaagaaatggaaagtatgaatcctagatctcacttccttgagagacatggtgctcaaacgtctttagaatcccagcttggacgagcaacgaatggagcgaatcctactacgggagttcagcagcgtacaccgatggcagcaactcgatttgatagtcatagagatcaattaaatgctatacaacgagcacaaactattcagcgacaatcaggtggcgctgtgactaaagttacaattccgtatggaagaagaatcggtgaagggtatagcaagacaggcccaacatatggcacttcgagtactgcaacagtgatcttaactccaaatgggcaaacaatcactgcatatcctgtatgggggcgataa

SEQ ID NO: 316535 - DNA, 441 bp, Proteus mirabilis
atgataagtgcaaaaaaaatcgttatctttattagtttattaattttactctggtattttcttcttgctcatgtcacattcttcaataaagatttactctttaaaaaaatagaaaacaaagtttaccaagcctacgtatataaaataaacccaataaatccaataggcatatatttatatattaccgaaactgaacctgtctatgttgtattatataaagatgaacaatatttaggacaaagttctccttttaccatgatttactcatactcacttcttcaatcaaaccctacattacctattgaaataacggagaaaaacaattcatctttagatgattcattttatatcgttattgcagatgaaaatatagataatgcatatgaaataaataaaaaaaataaaaaatggtggagcacgattttgcaatattttcactaa

SEQ ID NO: 316536 - DNA, 930 bp, Proteus mirabilis
atgcatgaattaggccattctctagggctaaaccatagctggaaatatataccaaataaaaaacataaagtattatattcatataaatattcaattatgagctatgattctgctgatattgaagaggcagattttggtggcctttatcccatgacctttatgctactagatatattattgttacaatatctctatggcgaaaatatgaccacacgtcttgaaaataatacctatggatttaattccaatacgggacgcgccgcttactctttaaataacatagaagataaattagtgagctgtatttgggattcgggtggaattgatacattagacttttccctatataccgttaatcaagtcattaatctcaatgaaggctgtttttcagatattggaggattacggagtaatatctctattgcctataaaacgattattgaaaatgcgattggtggtaaaggtgatgatactctcataggaaatccttttgataataacctaatcggtggtgatggcaatgatttattctatggcggtgatggcaatgatttattctatggtggctctggaaacgatgttatatacggagaattgggaaatgatgtgctctatggtgatgatggagatgatatgcttatcgattattatggtgctaatatgttagatggtggtaagggtaatgatcggatctgtgtagcatcaactgatagggggctaccaggcagaaatatcattctagggggagaaggtgatgatgaaatatatttgggtacaggaactcatcgtataactggtggacaaggaaatgatacctttaattttttctgttatgagggcgttgaaagcaatagttcaatttgggattttgaaaaaagcaaggataaaataacgttaatcactagagattttagaaaagtagatagttga

SEQ ID NO: 316537 - DNA, 276 bp, Proteus mirabilis; identical to SEQ ID NO: 309126

SEQ ID NO: 316538 - DNA, 864 bp, Proteus mirabilis
atggaacaagtaaaaaataaatgtaatagatgtaagctgacaactaatcatgatgttttatttgatgagatatctgtcggtgatcctgatgattataggtttgttgaaaattatcgtgtagtcaaatgttgtggatgcgataatatttcttttcgttatgagtttcatgatgaagaagctgcatatccaataggtgaggatgaatgggaagttccttctgatatagatatatatcctccactttcaattaataatataaatacaacatctctgcctaacacagttagaaatatttttaatgaaacttgtgcggcaatttcaaataaatctttaacattggcgggggtaggtctccgtgcaacaatagaagctgtttgcatagaacaaacaatttcagggaaagaattgaaaacaaaaattaataatttatctagtaaaggattaatatcaaaaaaggattgtggattattacattcgatccgttttattggtaatgatgctgctcatgagattattcaaccatcaatacaatcgttaaatgaagccttagcaataatagaacatatgcttcaatcaatttatatttttgataagagttctaattcattaccaagggtgatagaaaattacagtggtttcattaaattattaaataaatgcttaaatgattttgaaagtggtgtagaagtacctattcaggcattcttaaaaaaagaaatgagaagagtttcggaaaatattaaagaatttgaatctgaactggttagtgagattaaaaaaggaaaatatactaaattaaaaataggaaaatatgaaaaatatcaaggttcatctcaagatgtacagcattttattgttatctaa

SEQ ID NO: 316539 - DNA, 630 bp, Proteus mirabilis
gtgcatagagttatagaggaaatttcagaaggtaacgactggagaaatggtgagtttgctaaatttaaaacgaatcaaagtggtgtcccacctgagttatggtatcgaatgtgcattcctatggtttatgctcattgggaaggttttgttgttgatgcattaaaaatattacttaagcatttaaataccctaaatttgacgcattctgttttgccaacgaaattaatcgttttatctattggagatagctatagaacattaagcggtaaacaatcgttttcgcaacgaattgagtttacaaataagtttaaacgagtatttaactcagttgcaaaatttaaaactaaaattgaaaccaaatctaatcttaagagtgttgtttttaatgagttatgcgatatttttggctttgataccaatccatataatgagtatttaaaggaaatagatagacttgtgaatatacgtaatagtatagcccatggagagaatagctatgtagttactttagataatatcaatttatatattgaagctgttcaaaaatctagtgatctgttgttgatagatatagaaagctatttaactgaagaaaaatttcttgttgatgaaaaagttagtagtgagtaa

SEQ ID NO: 316540 - DNA, 243 bp, Proteus mirabilis
atgttttcttgtattgaatttccattttgtgtaaaaaccacgcttgcaccagtaggtttacccaattcaatcaacacatcagaagccgatccactctcaggtaaaacagttattggttggccattatcatcaaacgctaaaattttattggcgcgttgttccgtgtttggtaacgcattaataggcttatccttaactcgtaatgtcttactatcaatatccttaatacgattatcaacgtag

SEQ ID NO: 316541 - DNA, 177 bp, Proteus mirabilis
atgaagaaggctaccactgatccgacccctgaaacaaaaccctcattactgaaaaaatggggttggttaattacatcttatttgaactacatcacgcttcgacaagtcaatcttattcatggctttactaaattagtgttaatagtgataatgactatcattattgattgtaaatga

SEQ ID NO: 316542 - DNA, 363 bp, Proteus mirabilis
atgaaaaattgtcttgtagaatacaacgtcaatgtcccagtaaaaaatgtagcgcaattatccttttctatagataactgctctgttacaactgaaaatgatgctgagtctactacatttaaaatctctatactatgtcaactaaaaaactatcaatctattactgactcaactattcttgtacgagctaaatatttaagtatcctaggaataatatcattcttaattgatgaacccctagatgtatttggtcactcttctcataaaaaaataattgatagtcctccaaacctgaattcagatgctatttatattaaagaaaacactgattacactcaaactttaagtgattttctttgttag

SEQ ID NO: 316543 - DNA, 405 bp, Proteus mirabilis
  misc_feature (232)..(241): n is a, c, g, or t
atggaaatgattttactgtttctgattgtgggatgtataactggattttttgccggattgttaggaattggtggtggagccattattgttcctattgtgatgtatgttgttagccaacaagctatccctgcagatatggtaatgaaaatcgccctctcaacctctttttctgtcattatattttctaccgcctcttctgcttattcgcataataaacataaagcgattttannnnnnnnnnattttatggtcacaatttccgctcctcgccgtaggcactcttctcggtatgctagttgggacattcctagtacaaaaactctcaaataccctattgcaaattatcttttgtatttttatggcctataccatatatggattactgaccaagaaaaaagaagctga

SEQ ID NO: 316544 - DNA, 300 bp, Proteus mirabilis
ttgcgaggctactttgccagtgtttgtgctgattttgatgttgaactggttgaaatggatggggaacgggatcacgttcatttactgattaattacccgccaaaactggcgatatctaatctggttaacagccttaaaggggtatcgagtcgattacttcgacgtgatcgtcctgatattgcccaacgtgattactacaagggggttctttggtcgccaagttatttcgcggggagttgtggtggcgcagcaatatccattatccgccagtacattgagcaacaggaaacaccgagttag

SEQ ID NO: 316545 - DNA, 297 bp, Proteus mirabilis
atggaagataggatcttattctcatttcaaacagggctcttagtttttgcaacgcctctaatactttatttctcatattatagttttattttaggataccaaaaaaagttacaaagaatgaataataaagtagctggtatatgcgcaggaatagcaataattggtatcgtttttagctttttcttttcaatttatgtcggtctcaatttaacctctaaaggctattatagttgttataaatcatctgcttttgcaccaaatgaatatgttattgcaaaagagatgtgtaaaaaatag

SEQ ID NO: 316546 - DNA, 156 bp, Proteus mirabilis
atgaaagcaaaaattgtactaggtgcggtaattctggcttcaggcctattagcaggttgttcttctagcaacaacgcacaagcaaaagccgcttatgatgaagcagctcgtgctaatcagcgtctagataaccaagtaactacttataaaaaataa

SEQ ID NO: 316547 - DNA, 405 bp, Proteus mirabilis
atggaaaaagccaatcaaaatgcgctattagttgcacaatttctacgtgaccatgaaaaagtgaaagtgatccactatttaccttttgtagatgaaaatagtattgaaggtcaagtatttgctagacaatgcacaggcgcgggatcaacattctcctttgatattgttggtggtgaagcagaagcttttcgttttctcaatgcgatgaaaatatttaaattagcggtgagtttgggaggaaccgagtcattggcatgtcatcctggctctaccacacattcaggtgttcctatggaattacgccacaatataggtattcaagaaacaaccattcgtttatctattggtattgaaaatccttatgatcttattgctgatttatctcaagcattagatcatgtttaa

SEQ ID NO: 316548 - DNA, 168 bp, Proteus mirabilis
atggctggtattagtgcactaggagtaggcgccaagatgccgcttggcgaaacattgatgcaattagaggctgcggaaaataaacgccttgaacctttagacaaacagatgaaaagctacgatgcacaaattactgcatatggaaaaattcgtagccaattaggttga

SEQ ID NO: 316549 - DNA, 195 bp, Proteus mirabilis
atgtcaaaaaatagtgatattctcagtaatatcgatagagaggaaaatttctcatcggcttttatctgttttgaagattcacctctgatccatttttgtagtaatggttttgattatctttcttcacaaaattgtccagatacttttactcaattacgtattgaagaaatgctcattctattactttcttcctag

SEQ ID NO: 316550 - DNA, 717 bp, Proteus mirabilis
ttgatctcatctatattagataaggatatttcagtatactctaaaataaccttttttttaaaaaaatacgaactttttgatgaccgtacatcttactgggttaaaaatttaattgaatctagaaattctgtagcccatggaagaagagtttattataataaagctatttacccagtacagccattttttccattaatatctaatgacatttacccattatattttttacgtattttcatagccaaagtaattgcaaattatctaggaataaaatcatttgaaagtgattggattcaagtacatgcatttctaaatcctggtgaacatgctactaaaacttttctttcatcaaaacaattcgaacaaccacattcattatccggcttaaattcatctattatatttggagggcttaatgagttagtgttatctaaaaagataaaaatatctaactgtattgaattttacaaattctacctaaaatccaagattgacatggaaaaatttgtttacttaaattctcatgcattaagcttattattagatttaccaattgatgataatgtggctcaatttatctttactacatttaaattgattaactctagtggccataaatatcatatcaatttccgtgatttattttatgaccttgattttcataactttaaagcaaacaagcttgaagatctcattagctcaagagatttatgctaa

SEQ ID NO: 316551 - DNA, 123 bp, Proteus mirabilis; identical to SEQ ID NO: 308585

SEQ ID NO: 316552 - DNA, 186 bp, Proteus mirabilis
atggaaggtgttcaacttaggcttgcggagcctcatgaagcaaaacgattatggtatttaagaaataaagcgttacgttttggctgtcaacatgtctatccgcccgatatattagccgcttggactcctgatgaaatgcctgacggctatagacaatctattattaataattatctattcccgtag

SEQ ID NO: 316553 - DNA, 207 bp, Proteus mirabilis
atgggaaaaggatatgcaggacttattcttaaacagctacaatatgaagctaaacaaagaaattttgttaaattatttttagatgcaacgcctaatgcgatgctattttatttaaaacaagggttcactgttttagaagagcgagagtactattctagcttggctcaggcaagtttacactgttatcgaatgtatattgatttataa

SEQ ID NO: 316554 - DNA, 141 bp, Proteus mirabilis; identical to SEQ ID NO: 300062

SEQ ID NO: 316555 - DNA, 651 bp, Proteus mirabilis; identical to SEQ ID NO: 307889

SEQ ID NO: 316556 - DNA, 2811 bp, Proteus mirabilis
  misc_feature (2766)..(2775): n is a, c, g, or t
atgaaattaccggttttctccatttcaaacattacgagttcggtaaaaaaactcttttttgctgataaatctaaaattgcctcctttttgctatttttattggcattacttcccgctttgctcattatttggatctggtggtgggggccaacatttcgttatcaagattccataccgtttagcgaggtcaccacacgttggttagcaaccgtcgttattgtattgcttgttgtgagttggattggtctagcaacatggcgtcgagttaaaaaattggaagcattaaaacttgatgtcgaattggctgtagttgatccggtaagacaagatcttgattttcaaaaacgttatttaaactattggaaatcacaatttattcgtcacttaaatggtcatactaaagcggtttatttacgcccttggtattttgttttaggagctaaccaaagtggaaagcatagcttattaaaaaatacggtaaacccattagatattgcgcctagcgacaatattgttaacgaacaaaatattgcattaaatattcaatgtctattaaccgacaatgctgtactttttgtccctaatggtgatctattaacccaaccggcaaatcaggctgataaacctcaactttatcaccgtttgtggggcgatttactcaattggatcaaaactaatcgcccaagacaaccaatgaatggcatcgtcttaactgtcgataccctatcgttattaaccaatagtaaggagcaaaatagtcagctacttgctgatttacaaatgcgtattgaagaaatacgcatgacatttaatagtcgcttgcctttatatatcgtcttaaccaagctagatctattacgtggttttgactcaatgtatcaatcattagatgttcaacaacgtaatgaagtattaggtgtttctttcaaccaaaaagcaaaaagtaattggaaaaaggaattaaatcatttttggtcacaatgggtaggccaaatgaacagcgcattaccagaaatgatgctacaaagagcagaaggtaaccagcgtagtgatctatttagtttcgtgcgccaaattgaagggttacaacattctgtatgcacattaattgatgcattgctcatcaataatgagcaacataatatctgtttaagaggggtttatttaacttctgcattgcaaatcggtcaaatcgatgatgtgtttagccaaacagcgtccgaacaatatcatttaccgacagcacctcttactacatggccaattaatgatagccacccttattttactacccaattatttagtcaagtgctatttagtgagcctaatattgcagcagaaaaccattattgggttaaaaaacatcggactcgcctattagtcaccactgctgttagctttgtcggcttaatcgcaatttggaatggttggagccactattacgacaaaaactatcgtgctggagaaaacgttcttaatgaggtaaaagcattccgtgctattgagaacaatgctcaaaaagatactgatggtagcctacaattaccggtgctcaatccattacgtgaagcaaccttagcttatggtaatcatcgtgataaaaatgtgctcttttctgatatgggtctttaccaaggtcaaaaagttggcccacaagttgaacaagtctatttacaactactcaccgatcgctttttacctgcggttatgtctgggttgttaaatgaacttaacagtgccgataaaggaagtgaagataagttagagatattgcgtattatgcgcatgttagaagataaaagtggccgtaataatggcatggtagaagattttatggctgattattggagccaactgttcactggtcaacgtgaaaaacaactgcaactaaaagcccatttgcgctatgcccttgagcacacagattggaaacaagagcgtgaaaaaggatttgtttcagccactaaagcctttatgccttttgctggacctataaaaaatgcacaagcagagttaagtgtattgtcactttatcagcgtgtatatcaagccttacgcttaaaggctaatcaagagctttcagcgcctttaaatttacaacatcaaattggcccaagttttaatacggtctttacggctattgatgatgataaattagaaattccacaattcttaacgcgctcagggttattaaactattttatccgccaaaatgataaattggtcgagctaacattacttgatgcttgggttcttaatctaaccaccaacacacaatatagtgaaagtgatcgtaaagaaattcagcgtcaaatcagtgaacaatatcttagtgactatacggctcaatggcgtaatgccatgagcaatttagaaattcgtcaatttgattcaatacaagatgaaattaccgctcttgagcaaattattagtggtgaacaaccattacgccgagcattacaagttctacgtgataacacggttattccaactattgatgaaaatttaccacttgatgaacaaaaaacactgatggctgagccatcttaccgtttattaacccgcttagatcgcgaatttactcctcaaactgagatattagtcagtaaccaaggggaaaatttacagaatctgaatcaaaaactaaatgacttacatcgttacctattggggatccaaaactctccagtgccggggaaagcggcgcttaaagcagtttcgatgcgcttaaacgataataatcgcgacgctatttttgagctatcnnnnnnnnnnatcacaaatggcgaaaacattaccagagccgcttaa

SEQ ID NO: 316557 - DNA, 576 bp, Proteus mirabilis
  misc_feature (561)..(570): n is a, c, g, or t
atggagaagcatgatgatgatatgcctaaagataaaatacaacaagccaaacgctggcgcttgattttaggccaatacgctgatgatgctttagggcaagccacgtttaatgctgatgatcttaaaattgaacgtacactcgattttctttatcgccgtgaatatcagcgccgaggattacgtcaagagcgcggtcgtcatggttctctcgatgcatcgcaacttactgccgtaaactggctaaatcaagctcgcaaactttttcccaatagcacatttgaacgtatgcaatcacaagcgattgaacgttatcaaatcagtagctttcttaaagatcccaatacgctaaaagccatggagccgactaaagcgttagctaaaacactattaagcttacgcggacgaatgagcgaagaaacgcgagatgcagtaaaaaccattattcgtaaagtggttgaagatattttgcgtcaaattcgtaataactttcgccaatcattaaccggtcgtcgtaatcgctttagacgctcgttagtaccaaatagtcgtaactttgattgnnnnnnnnnnctttga

SEQ ID NO: 316558 - DNA, 1494 bp, Proteus mirabilis
  misc_feature (32)..(41): n is a, c, g, or t
ttgagcaaaatacacagccttggacttggccnnnnnnnnnngccttggacgtggcctgaagatttaattcccttaaaatcttcaaaacgcccactaaatgatgaagaaattgcccttattaatactattgaacaatttattgatgatctattacgtcaagggctatcacacattagtttaagtagcgcaacgcaattacatttacttaatatgtctgctcgtgccgagggtttacctcgtttagcctcttatttacgaacattaagtactcaagtcaagcggttagcagaaagacatttcactatggatgaaagtaatgtcttacgtctattagctcatatctcagcctatcttttccagctatcttatgcgacacctgaacaattaaaaacattacgaggacaacttcgccgtcaatatgatgataaaaaaaccagtctcgcgcttattcctattgatgcacattggtggacagcacaaagtggcgcattaggcacaacttttactttctgggataaagaagcaaaacaatttttacaagcgacacaagctcgccctaatcaacttgataccctatttaatcgctatagtgtttggcatagtttatcgttatggaaacaaactgcagataagctcatgcgccgacctttcttattacaagcgcctcgtatttctgatgaagggaaactagctactattggcgatagctttgcgcaaaatcaaaccgattttcttgatgtcacagattatcatcaactacaaacagaattaggtattcataactggcaagatttacccaattattttacggatcaaccagaaggatttctttcccctctggttttacatatcaaaagctataatcccttaatttggcatgaagtagagcagtgtgttatttgggaagtggtagataataatggaaattcggcctttttgcgcctttattgggaaggcgaaacgcaaaataatttagaagaattacgttttctcactaaacgagaattagaaatcgttgcgatcaccgtgcaacctgttcgacgtgatttcaatatcgatttattacccaccaccatttggatcaaaacagagcaaggcattgaaatgttttatctcgattttgaccaatttccacgtaagaaaaaacagtctggttttattagtcatattcaagaatatatggctaaacgtaagcgacaaacggcaatgcatcacagtgaacctacccttgcacaaaaattttgtcgccccattttatccgtattggaagcccaagcatgtacagggcgagaacaactttctgcaatgcaaaaagaacaattagagagaagcaaacaaattgctgacgatttaggtatgacattaatagctaaccaattaactcgttatctcgctttaactgctcgtgactctcaagctttattacagttaatttggctatgtgataatctgcaacaattacaaagcccgttacccattcaacttaatgaataa

SEQ ID NO: 316559 - DNA, 1374 bp, Proteus mirabilis
  misc_feature (1348)..(1357): n is a, c, g, or t
atggttgcagttagaagtgctcacttaacacctgcaggggagtttgccgttgataaatgggttaatagcttgaatttaactcatgcgaatgcggggagtgaaatcatgcaaacctgggaatactgtcatcgtactgttctgggccgtgaagatgcgcaactgttgctatggcgcggtgttgagatggttgaacttctttcgacactcagtatggataaagatagcatgagggcagcacttctcttcccacttgctgaagaagatcttattaaccaggaagttatcactgaacattttggtgaggcgatatggaatttagtgcgtggcgtaatggagatggatgctattcgccagcttaaagcgacacataccaacgaaactagctcagtacaagtcgataatgtacgccgcatgttattgtctatggtggaagattttcgttgtgtagttatcaaactcgcagagcggattgcccatttacgtgaagtgaaagatgccactgaggatgaacgggtcttagcggcaaaagagtgttttaatatctatgcaccattagccaatcgattggggattggacaattaaaatgggagcttgaagatttctgtttccgttatcttcatcctgatgaatataagcaaattgcaaatttactgcatgaacgccgtattgatcgcgaacagtatattgataatttcgtcagtacggtgcgtggttatatgcagcaagagaatattgaagtcgatatctacggacgtcccaagcacatctatagtatttggcgaaaaatgaagaaaaaaaatctcgcctttgatgagctatttgatgttcgtgcggtacgtattgttgtcgaacgcctacaagattgttatgccgctttaggtattgtacatactcattttcgtcatttacccgatgaatttgatgattatgttgccaatccaaaaccaaatggttaccaatctattcatacggtagtacttggccctgaaggtaaaaccgttgagatccaaatacgtactcgtcagatgcatgaagatgctgaattaggtgttgcagcgcattggaaatataaagaaggtgctactggtgcaacaaccaaaggcgggacgggaagttatgaaaatcgtattgcgtggttacgtaaattaattgcatggcaagaagagatggctgattctggtgaaatgctagatgaagtacgtagccaagtatttgatgatcgcgtctatgtctttacgccaaaaggggatgtgattgatttacctgcaggctcgacaccattagattttgcttatcatattcatagtgatgttggtcatcgctgtattggtgctaaaatcggcgggnnnnnnnnnncgcatcgttccatttag

SEQ ID NO: 316560 - DNA, 762 bp, Proteus mirabilis
atggcgcaacaagcaattaaaagagcaataacatattcggtcgtaataggtacacttctctcagggcataatgttattgcctcagaaagtgaaacgccactgctattcacatcagaaacacctgcattagtacccgcattcacagaagacgtggcaacacaagatacattaaattcaccatcagtgagtaagcaggaagttagcactaaactacaatcttggttaccaagcgaatataaaccactttactttaagcaactcgtggatgtttatcaaagcaatgatttagcactgatttggcaagatgaacaaattacaaaacaactagagcagcaactggcagaggttgccttaactggaattcaaccacaatttggacgttggttaacgctattagaaacagcacaattaacgccagaagcacgagatattattttatctgacgcttttttaggttatatcagctttgttgaacagattaatcaatcaggaacaacactgttatatcgcgctgcgatacaagcattaccggcaccaactgtgcaagctgtcgagcatttccaactcaatctacaacaaaataccttagggcgctttgtcgtctcctttgcaccctcacacccttactatccattaatgaaagaggaagtgcgcaaacagcttcatcaagaggttatttggcccgtcatggaagggaaaaattcattaaagccaaaccaatcggcagaagaagttattgcattaacacaatatttgtcttaa

SEQ ID NO: 316561 - DNA, 804 bp, Proteus mirabilis
atgttggcactttctgtcagacagccacttaatatttattattggctcattgcgatatcattagtttatatcagtttattgagttgggtacttaattcatggtctatgacagaaagtgcgcaccatattgatcagcaacagcaaaatacattatcggtctatcaggtgatgttttcgccacctaaacaatctactaccatgattgaaccgagaataaagatcgagtcacaacaaccacctattgcactaccaagaagtgagaacggtgaatttattgaagcgcccaaacaacccgcaaaaaagcgtcaacaacaaccggccccaataacacctaaagcgataaaacaggtaaaaaaacagccagtagtagacaaaacagtacctataaaactacctgatttaacaaatcacaacatagttcaaagtacatcacaaccatcagcagaaaacttaacacagcataccgcgagttcattggcagggagcagtcgtgcattaagtgaaaatggtattgggcagggagagtctgaaaatcactatatcagtttattgcgccgagaaattgagcgtcataagcgctatcctgcgcaagctcgtcgtatgcaagatgaagggctggttgttgtgcgtttttcattaaccgatgaaggctatatttcatccgttgtacttgagcagacctcaggggtggcatctcttgataatgctgcacttgccgcggtaaaacgggtaaaaccaattggcccgaaacctaataacttatctgatcctttaactatctcgttaaaatttcaattaaattga

SEQ ID NO: 316562 - DNA, 1587 bp, Proteus mirabilis
atgggttttgatttcgtgaccgaggggcgagcagggcaacgtcatgaagtcaatttagcgttagccacagattggaaaccattaccttggtttgcgatgaatattggcggtaaatatcattactatcatctgacggatacctttttaaataataaacggaagaatagggttaaaaattacgagaaaacagcccctatccgcggttatctgatctcttatcgacgagtattaaccccagaagagtatttactctatcgcgcggttaacaaaattgatgtcgatactttacctgacgagttaaaaaattaccgaaattctgctgagctgagtaaaaaaattagagactttcaacaagcggttttagtttaccctgaaggtggcgctttgctagaggaaatcaaggagcaggttgctaggccatatcttcagagaatacagcatgatatggagcatgaagattttcttcgtaataatcatggaaagatgcaaataaaaaacgctaaagccatcccgatgaaaagagagtttagcctttggttatttgatgaaaatggcgtactacttaagagtaagaatattttacttaatggttttcttgatatggaggaaaaagtccctcatccagtgacgggtgagttagtttatcgctttgaaaaagatgttattaatcctcaggcattttctctatcagaagatattcaagatccctacgcactggagcctagctatcagcatggcgcattttcccctttaatctctgccaccctttatgccaacgatatggtgcgtttttatggccgttatactgagcaattgcgtttgcctaacttatttgaagataccagtggtttttcaggctctaaagctcgctattatggttttaagttaaagccagagcgtgccaaaagcagtgagtttggtgtggttgttgattttacgcattggttgaatatagagcgccacgctgatattaaaattaattactttaaaacgaacattgaaaatgtatttgatagagatgctaattggcaaattagacagttagaaaaacaaatattagaaggtgtagagttacaagcccggtttgataatggatttattttctttgataccgcattagtgtatagccataaaaataaagtctgtgatgaaaatgctttttatgagcttgatgcatcaggattatcgggtattaaaaactgtatgacagggggataccctggcggatttttgcgcacctcaatgcagcctaaatactcagttaacctacatttaggcacgcgctggctaaatgataaattagaattaggtagtcgctggctctattcatcagaagttgaaaataaagatgaaaaatggcttaaagaaaatttacctaatagctattttggcataaataataatccgatgcgttgggcaaaagtatttactattgatgcttatgcaacctatcaatatagccccaatttatcttttgaaataacaggaagtaatttattaaatgaatattacattgatccgctgactcgttctggtatgccggcaccaggaagaagtttgcgattaggtgtaacagcccaattttaa

SEQ ID NO: 316563 - DNA, 291 bp, Proteus mirabilis
atgaaaaaaatatttatggttgccgttatatcttccttattagttggctgtaaggttgatttagaaacgaaaataaatacagataacttattgtctagtgagcaaaatattgttaaaggaaatattaatttcgaagtctcttcatgtaatgattttgaagactcaaggaaagagtctaaatcattgatagaattaaaaaataaagttcctgagattttcagagatgcggaatatgttgaatgttatttcattcgcccatttctcaatacctgttggtgttggcaaggttga

SEQ ID NO: 316564 - DNA, 210 bp, Proteus mirabilis; identical to SEQ ID NO: 297185

SEQ ID NO: 316565 - DNA, 294 bp, Proteus mirabilis
  misc_feature (254)..(263): n is a, c, g, or t
atgataaaagtaatgaggctcttccttcttataactactattggaataagttttttttcatctgcaggaagtactgtgacacttcaattttctggaaatataaaagccgcgacttgtaatgtttctggtagtaaaaatattaatattgatttgaaacagatgccagaaagtttatttaataaagtaaactctagttctgtttggaatgattttaatattaagttaatagattgttctccgggggtaaatcaagnnnnnnnnnnttttctggaacgcctgataatgcagatgtga

SEQ ID NO: 316566 - DNA, 219 bp, Proteus mirabilis
atgagatggcacaatatcgcgatttctctgctttctgatatcgaccttagaattatgggaattagtcttgcacagttaagacagatcccacagcgtatttttattgctggaggcgttgaaaatgttgctgcaaccataggcgcaataaaagggggatatgctacagatattgtcatcgatgaagtgacggcattagcattattggaattgagtatttaa

SEQ ID NO: 316567 - DNA, 297 bp, Proteus mirabilis
atgattggggctgtagccccacaacctgattttactactgcggaatctgccgctttgatcgccaataagttttcaggttgcagtattaatttgcatgtaccggctgtagtgtcaaatgcacgtttggcaatggagctacaagcagaaccaataatacggcgtaatttctctgctttaaatcaatgtaataaagctttgtttgtagtgggtaatactcaagatgacaatcctttgattacaacaggcgtactcaccacaaatgagatggcacaatatcgcgatttctctgctttctga

SEQ ID NO: 316568 - DNA, 1119 bp, Proteus mirabilis
atgtggccaactgttcaggttaatcaacataaccaactgcaaggcgaaacaaaggaaattgagcgcattttactgtttattggtaaaggaaaaaccaatattggtaaaactattgcggtcaatacgcaaagcgatttcgatgaggtgttaggaacgccagatagcccgttaaaaagtaacgtgttatcggctatgcgtaacgcaggtcaaaactggtcaggttatgtgcatgtattagcagaagatgccgaagaattggcatttgttgacgcggtgatggatgcacaagcggtcgccagttgtgaaggctacgtattagtgggtgatgcgacgaaagccgttattcaatcggctaaatccttacgctcggatttaattgctaaacatgggcgctggctgtttgccattttgggtgtcggtgcaacgcaagacgatgaaacgtggtcaggctatgttgaacgcttgtctgctttatcaaaaggggaagcggaaccctccattcaattagtaccaatgttatggggtaatgaaacgggagcattagcagggcgattatgtaaccgtgcagtgaccattgctgatagccccgcacgtgtcaaaacaggcgcattaaccgatttaggtagtgcgtatttaccgctcgacggtacgggtaaaagccttgatttagcaacactgcaagcattggaaaaacagcgttttagtgtgcctatgtggtatccagactatgacggcatttattggtctgacggtcgcacattagacgttgaaggcggtgattatcagtcaatcgaaaacttgcgtgttgttgataaagtcgcgcgcacagtgcgtattcgtgccattgctaaaattgccgaccgcagtttaaacagcaccccatccagtattgaagcccatcaagcctactttgccaaagtattacgtgaaatgtcacgcagtacacaaattaacggggtgagtttccctggtgaagtaaaaccgccaaaagagggtgatgtggttattacatggaaaaacaaaaataacgttgaagtgtatatcacggtgcgaacctatgaatgcccgaaagggatcaccattggcatcctgttagacacatccttggagaatgaataa

SEQ ID NO: 316569 - DNA, 174 bp, Proteus mirabilis
atgactgtaacacaacgaacaacgtcgagcgttaccttgaacgccgcccctgacgataaacagcaccattacgaagcgaaaaagtggcaggaagaaaacagtgaagcactgaagacacttaatcgctttcacgaggaacacggttgttttagcgatgagtacagaacattctaa

SEQ ID NO: 316570 - DNA, 396 bp, Proteus mirabilis
atgttaacaattccactatcactatgtgtacataacgatataggaataacggtctatcctgtcaaaacagattttgatactgatatagctcacagtaaattaaagaatgtttatattgttggaattaaaaataaagacaaaaaaattgtttgttctgcaatctttttgtcttctattgagaataataaggatggaaaattagctgaggttgttattgaaatattaaaacagcataaatcaactgaagaattagttaaagatataagttcaatgccaactggtaaaataatgtgggatgtgaaaaacggttctattaataatgttctatcggaatcagagataaacaaactatatttggatttttattttaaacatagtgtttctggtaacgcataa

SEQ ID NO: 316571 - DNA, 246 bp, Proteus mirabilis
atggataagattaaattagaaattgaacgttggttaaatgaaagccaaaatgacaatagaaagtcaagatctgagctggttacctacctagttgaaaatgtttacaaatttgtcaaatttgagagaccggaaggcggcggtttagatggcagagatggtcctgaacgccaaggtatagctaacgttgttgatgctgcaaaagattattacttcgatactttacaagctttgtctaacaggaaatag

SEQ ID NO: 316572 - DNA, 483 bp, Proteus mirabilis
atgacttcaaaagatgaattaatgaaactatttaatgattcttcagcaaatagagaaaaagggaagcaattagaggctgataatattaaagagtttcaagaggaaacaagaaagctgtttattcaaatgcgtgaatggcttgatggaacccctgtagaaatagaacggaatagaactcctattcacgatgatacaacaaatataaaaacataccctatggataccatggcaattattaatgcaggtaaacgcatggaattacgaccaacaacattatatttgatgggttcaacaggcgaaattgaaataaaattcacaggaacttctcgaagaaacttgcagtatagcctatatatgaaagattcttttggtggtgaaaatgaaccaggcatatggtcattggttaatacaaataacagacaatcagaacgcactccattaacaaaagaagtattctatagcctaatatcaaacctagcttaa

SEQ ID NO: 316573 - DNA, 252 bp, Proteus mirabilis
atgagagatatgcaggaagttttatcgcgttggggagcgtggtcagctaatgagggaaatagtatcgattactcatcaattgccgcaggttttaaagggttgattccaagttcaagacgaagccaagagcaatgttcagatgatgatggcttaaaaatcaataaagcggtattacatttaaagataaataatagttacttgtttgaattatcctttgcgttcaatggcttcaaaactcggtatttcgcataa

SEQ ID NO: 316574 - DNA, 306 bp, Proteus mirabilis; identical to SEQ ID NO: 297209

SEQ ID NO: 316575 - DNA, 363 bp, Proteus mirabilis
gtggcgggtgttctaacagtttgttatggacacacaggtaaagacattattcaaagtaagacatactcacaacaagaatgtgatgcgttattacaaatcgattttattaagacacaacagcaagtcgatgcattaatcaaagtatcactcgatgactacaccaaagctgctttatattcctttgcttttaatgtgggaacgaccacatttgctcgctcaacattacttaagaaactaaatgcgggtgatagagcgggtgcctgtgaagaaataaaacgttgggtatatgcgggtggaaaggtttggcgaggtcttgttagtcgtcgagaggcggagtcagcactatgtcatggaaaactttaa

SEQ ID NO: 316576 - DNA, 186 bp, Proteus mirabilis
atgaataaatccttagtttttaaaggtaacaaaatcaccccatttgataagggtgatggaaaaatctggtttaccaacaagcaactttcagaattgcttggatacaaagatgagtcatcagtaactcgtatctttaatcgaaataaagatgagtttaccgatggcatgtctcagacggtcaattga

SEQ ID NO: 316577 - DNA, 297 bp, Proteus mirabilis
atggccagtgcgattaattttcgtcttggcacattcaccaatggcattgatgcgtcaaagatggacggtaaacaagcctggcaagtcacctttactttacgtgagcatttatccgtacccgaaaaacgtgaaagccgttcagcagggcaagttaaatccaaaacacaaaatatgagtgataaaccaaaagccaatggcgaaggaacagcagagcaagaacaaaaattaaattggtttgaacgcagggtattaaaaccgttaaacgaggcattagggggaagtgatgaaacccattaa

SEQ ID NO: 316578 - DNA, 141 bp, Proteus mirabilis; identical to SEQ ID NO: 306927

SEQ ID NO: 316579 - DNA, 330 bp, Proteus mirabilis
atgaaagaatatcctgaatatgtagataataccataattaagtggtatgagtctgatataatatcagattttaaaatgcctattcctgatgaaaataaagatgatttagataaagctggttgtttttttgattcgaatgtttggaatgaaacattatcagaaaaagaagtagtacagactttaatatttaatgatgatatgcgttttatatggtcttctttatcaaaaagagctaatgaatttcgtattccatatatattttattacattttgactcataagataattgatgcttatagtggtccgaatgattgggaattgttaacataa

SEQ ID NO: 316580 - DNA, 210 bp, Proteus mirabilis
atgaaagcggtattctttcgaatgcgcgcccagacgtacggtaatgcggatcctgaactgccgggaattcactttcaccaccgtcgcacggtaagcgcgccggccgatccggttaattatccacggcaattcatcgggtatcccagacgagataaacggtatacggtcataaaaacggtacagccgtttcatgatcagactcagaaatga

SEQ ID NO: 316581 - DNA, 594 bp, Proteus mirabilis
atgctgacagtgctgatttttgtactgttagggatggcaacagtacatttcatatatgaaaaaataattttaccttcaattcgtttacattaccggaataaattatttgaagtacgagataaagttagagctgaattaattaacaatactgagcaaaaaagtgttgaatcggctaagttggttcatgacgcattaaataatgcaattaataggttgcatttgatgacattccaaaaccaagtaaaagcaagagctcggctttataaagatccatcacttcgacataaagtacaatttaaggttaatttgattaacagttcaaaaaatcaaactgtaatcagttcactaaaagagtcaaccagcattttaaataaggtactgatatttaatagttttatgctatttttatatgctttgccaatttttcttatagttacactgatcgcaagaatagtttcaagtgtagctagtcgtataaagcagtttctatctgggtgtagacggctggaagaagccgttatggtactaccagacagattgatgaaaaaactgatagactctgaatacgattgtgactcatacgtgagagtataa

SEQ ID NO: 316582 - DNA, 384 bp, Proteus mirabilis
atggtagccatagaaatggggaaaggtggtaaaaagagcggcaataaggctaaagtgacgatagctcaagcagtaagagatgttttgttacgtgctatgtcaactggtcaactggttccattaactttagctgctattgttgtaatatttttagttagaatgcctgcggaggcactgcccgcactattcgatcgtatattagatgctatgattgatacatcattgcttggttatattctattcgtattagtgataattatgtgggcatggcatgctagtgtaatgcggaaagcttttagtgctgaaaccactcgtttaggaaacgaaaagtctaagtatcagcaagatagaacaaagcatccactaggaacaagtgataaataa

SEQ ID NO: 316583 - DNA, 543 bp, Proteus mirabilis
atgaatgttattgaaactccactttctggatgtctaatcattgaaccaaagatttttggtgactctcgcggttttttcttggaagaatggcatcaaaagaaatataacgacataggaataactgataaattcgtacaagataatcgctctcggtcagcaaataatgtactcagaggtttacattttcaaaaaaataatcctcagggaaaactggttagcgttattcatggtgaagttttcgatgttgctgttgatctaagaccgaattcttcttcctttggtaaatatataggagtaattctttccggggataaaagcaatcaaatatatattccacctggatttgcgcacggtttttgtgtattaagtgagttcgcagattttcactacaaatgcacagacttctataatcccgctgatgaaggaggtatcatttggaatgataatgagctgaatatacaatggccagtaaaaaatcctatattatcagcgaaagatagttctttgatcacttttaaagaattcaaaaaatcactaatttag

SEQ ID NO: 316584 - DNA, 522 bp, Proteus mirabilis
  misc_feature (503)..(512): n is a, c, g, or t
atggttgagctagtacatataaaaacagacgcggcggctgaaattattttgcctactctgttaagtgtgatgtccttgtcgtgtcaggatagctttgatattgaaccgataaatgggcgaaaatatccgctgtcactttatcatgttgttttggcgaggtcggggtgcagaaaatctactgtttataaactgctcacaaaagcaatttcagaatttgagcaacaactcgaacaggatttctatattgaaaaagataattatgagcggagtctggtgctatggaatataaaatttagcgcattgaataaatgctatcaaaaagcgctgaatcagggaataaaagtgaatgaagctttattgaatttagaagagtgccttgttcaaaaaccagtagcaccaataaaaaaacgtttagtaatcaatgattcaacaagtgaaggtctggctcaggagttgggggatggatatcgcgtattgtcgctgatgtcagatgagacgggggnnnnnnnnnntgtcagatga

SEQ ID NO: 316585 - DNA, 1338 bp, Proteus mirabilis
atgggtactgtgatttctcttgaagtgtcaggtatggagctagtttcgagtaagaactcgctgggtatagatcatggaggcctgtttcaaaataacgatcatcacgtcaacccactagatgaagatcaaatagaggaaggcgaagactacgacactcctgatggcatcctctgtcgtactgtgttgcgtaagcctttggggcaagtaacttaccgattggagttgttgggctacaccctggaaaatatacgctatgaatatgaactcatggttaaagatgaaatagaatatctggaggacttcaatgtatcctttccagagtatgcaaagccaattagtaatatgatgagttttgatgagttcgttaattttataaaaagcgtaaacattagcgagctaaatgatgatgttattaatttaaaagatgagaaaaaagagcgtgaacttatcaggggacgatttaataatgatgagttattaaaccgaatacctaaatatgacaatctctttattaattcatggtctgaaaaatctttttttgggactttagttagcatactgcatccatactctgtaatgcgagttttggctgaaaatccaaacaataaaaatgaattcgtcacttgggattacggagaactggtttctgctggctatgcgaacataaaagatattcaggtagatgctcgcagacgtgacaagttcctgattgctaccgagggaagcaccgactcaaacgtcatcaagtacgcattgcgactattacgccctgatattgcggatttttttcacttcattgatatgagtgagggatacccgttcactggttctgggaatttggtgaagttcgcagccggactcgttaaaatcgacattcaaaatttgattgttttcgttttggacaatgattgcgaaggaattgaggcgtacaacaagatccgtaaactcgcattacctcacaatatcaactgtattcatcttcctgatcttcctcatttcaatcaatttccagctattgggccccatggtgttacccatgaaaacatcaatggcagggctgtagcgattgaatgctatctggatctaacattttctgaatatgacgaagcacaaatccggtggtcaagttacaaaaaggaaagcgatgcttatcaaggtgcgctggaaaataaagactattacacgaaaaaattcatgaaactaagaccagggagtaaggattttagcaaatatgatttttccaaactcgctatagtcttggatgaattaataaaggcgtgttcaaaaatctcatcagagattcgaaagaatgaagtagatgttcaatatccagactaa

SEQ ID NO: 316586 - DNA, 285 bp, Proteus mirabilis
atgaaaaaacgaacaaataggttttacaccgctgagtttaagcaagagacggtcgcattagtcaccgagcaaggttatagcgtgccaaaaacggcagattctttagggatcaccgataaattattttatagctggaaagcaaaattctatgctgagcaatctggtagcagcttgaattctgatgagagggctgagctattaagacttcgaaaggaaaataaagaacttaggatggagaaagagatcttaaaaaactgcctacatttcgcgatatcccccatctga

SEQ ID NO: 316587 - DNA, 594 bp, Proteus mirabilis
atgaaaaaagtattattgacagcagttgctactgcaattattggtgcatcatctgctttcgctgcaactgaaaatgcaggcggtggtcaagttaatttttatggtaaagtgacagacgtttcttgtactgtttcagttgatggtcaaggtagtgatgctaaagtttatttggcgccagtttcagtaaaagaagttcaagaagcaggtgcaaatacttatttaaaagcaaaaccatttgttattgatgtaacacaatgtcaaggtgttaacgataataccgctttaaacgttaactggactggtggtaacgtattaaatggtgcttcaggtattaatgctggttatttagctaacactattactggtgctgcggatggagctgaaaatatacaattagttttagcaacagatgctagctctaagttagaaaataaaatcgatcctaatagtgcaaagcaacctaaagcaacaacaactgaaattactgacggtagccgtttcacttatttcgtaggatatgcaacttcaacgcctaaagatgttacatctggtatcgtagaaagttatgcaacttacgaaattacttacgaataa

SEQ ID NO: 316588 - DNA, 702 bp, Proteus mirabilis
atgaaagcaattgttttattcttctgcttcgttttcagtacatcttcattagcgaataatattattgttaacggcacgcgatttatttatcctggaaatgaaaaagaaattaccgtgcaattaaataatacggcggataggccagcggtcgcacaagcatggttagacaccggtgatgcatcggaaactccagatacaataaaaacaccatttcaaattacacctccaatatcccgtctggatgcaaaaggtggtcaaacactacgcattaaattgatggataaaaatgggatcccacaagataaggaaagtttatggtggcttaatatcttagatattccaccaacagtaaaaacagcaggaaaggaagatcaaaacttcttacagctagcaattcgttctcgatttaaatttatctatcgccctgttgggttaggtagtcgcgaattagcaccagaacaattagttgtgaatactaatggcaataatctgactattaataatcctacgccattttttattaccattacaaaaatttcaactgatggcaaaaatggattaacggataaggcggtaatgttagcacctaaaagtcaaacgccagtggtattgaaaaaagcaattagagcaggtgaaagtgttgttttaaacaatatcaatgattacggtgcggatatagcagtaaaaacgactgctaaatag

SEQ ID NO: 316589 - DNA, 264 bp, Proteus mirabilis
atgaaacagcgagagttaataaataagtatagcaatacactctctgtgacctgcttcgtcaccgtatgtatgataccaacattttatgcatggagtgctgaaggcacaacctacgaatttaatagtgggttcatagtaggtagcaaagataatgttgatttagaacgcttcaacacgactgcaatcagtgaaggcaagtattctgttgatgtatatactaacggtaattggaaaggtcgctatgatttaaatgttgttcaataa

SEQ ID NO: 316590 - DNA, 2184 bp, Proteus mirabilis
atgttgagtaattttggcgttaattcagaaaaattaaatccacaattgaatgcgcaagagtctacttgttccccgttgaatgagtggaatgcaatgaaggacgtaaacgatactttcagttcttcgaacctacgtctagatatttcagttccacaaatttacgagcagcgtttatcacgtggttatgtcgctccgcaattttgggaaaaaggtattcctgcattaaatttagcgtatatagctaattattatgatagccatactagcggttctcaaggtcaaaatgatgccagtgcttatttaggacttaatgcaggtttatcggttgatggctggttactaaaacatattggtaatttaagttggcagcgttcaggaagtacgagttggaacagtaaccaaacctatctacaaaagccgattgctgatatcaaatcaaaagtgactgccggccagttttatacggatggtgatctttttgacagtattgggttacgcggggcaagaattgctactgatgacagtatgtatccagatggaatgacatcatatgcacccgaaattcgtggtgtcgcacaaagtaatgcattggtgactgttagtcagaacggttccattatttatcaaacctcagtaccacccggaccgtttgtattgaacgatgtttatccatcgggttacggtaatgatttaaatgttacggtgaaagaagcagatggtagtgaaagtagctttagcgtgccttattcatcgttagcacaactgttacgtccagggtttactcgttaccaagtcgctgcggggaaatcagatactgatggtttgcataatcgcccgtatattgtgcagggaacaattcaacatggcttaaataatatcttttcactctatggtggagtgactgcgtttgatgattatcaagcctatttaattgggacgggtgtaaatacgggtattggtgctgttgcagttgacgttacacaatcacgaacagcattgaaacaccgtactgataatggtcaaagttatcgagtaacgtttaaccgtttaattactgaaacaaatacgaatatctcgctagctgcatatcgttattcaacgaaagattacttcaacgtaaacgatgcattatatgcaattgattatgataaacgtggtattgcaattaacagatggcgcgaaaagaatggttttagctatacggtaaaccaaaacctgcctgaagggtttgggggactttattttactgggcgtatctctagttattgggaacgttcaggaacggaaaagcaatatcaatttagctataacaatcaatttcaacgagtttcttattctattaactttatgcgtgtttattcggacaataataatggaaagaaagatgaccgtattagcttaaatattaatcttcctctttattatggcgatagccgaagcacgacactaacatcaaatacaacgtttaataacgaaaaatttggctctactcagcttggggttaatggtgcatttgatgacgaaaataactggacttacgggctgaacactgcggcagcaaatggtggtaagtatagtatcgcaatgaacactggttatcgttcaccgtatgttaatactaatgctaactacagccaaggccagggttataggcaatatggcttaggcgctaacggctctgtcgttatacattcgggcggtgtggttcttacaccaaatacgtcagcgacgatggctttgattgaagccgaaggggctgaaggggcatcaattacaagtgcgccgggtgtgcgagtgaataaggggggctatgctttagcaccttatgttagaccttatcgcatcaacaatattgaaattgaccctaaagggagccctgaagatattgtgtttaataatacctcagaacaagtggttccatatgaaggcagtattgttaaagtaaaatttggcacaaaagttgagcgtaatcgtacctttaatgttgtacgtctcgataaaaaaccaatgccattcggcgctgaagtgactaaccagcaaggcgaatcaattggagtagttggacaaggcggtacagtatttattagtaatgaagaagcaaaaaatgcttatgtgaaatgggataacggtcagtgcgtattttctttggaagccggaaccagtaaggatagtgtatgtcgataa

SEQ ID NO: 316591 - DNA, 1008 bp, Proteus mirabilis
atgtcgataaatgtgattttacgtagtgggatagcgctggtgacagtgctatcaagtatacctgcatatgcggcatgtacggcaataaatccaactcctgttgttgtaaatatgcaaatgggaagggttattgtctcgccagatttacctgtcggtagtgttatcaaagaagaaccatttccaatgccatctaatgttggaacttacgcgatatgtgatggagaaacacctatgcaagctattgtgacagggagaggaatgactccaggagctaataaagtttatagcaccaacatccctggcattggtttgcgattcgaaagaattggttctatttctatgatttacccagatgtttataaaataaatggtaatcccgcacaaaaatttaaagtgagcttagttgactctacatttaaattacaagttattaaaattgcagaaaatacaggctctggaactattaatgcaggtgaatacactcggtatggctatgaagttgcttctggtggtacgcctgctttaattactcaattagacgcgaatgctattaccatcgtgtcaccctcttgcaaaattaccacaggtaaaaatcaagatgtgatcttaccgccggtgaaccgtacagagtttagaggtgtaggaacaacggctggtgaaaaacaattcccaattaatttactttgcaatggtgggatcagcatttcccctgattctattgccgtgaatatgacctttgatggaaccaaagcacctaataccccaataaataaaggtgtattagataatgcggcaaaaaattctatggctcaggggattggtgttcaagttctaacggataagaacaaagagttagaatggggcaaaatttataaggtcggtgagttaattagcgcgcaagataaagaaattcgtatgaattatatcgctcgttattatcagtttggctcaaaaatttctgccggtgaagtcgaagctaaaatgttattcaatattacttatgactaa

SEQ ID NO: 316592 - DNA, 618 bp, Proteus mirabilis
atgaaaaactggttactgataatgctcctgtctgtgttgagctgtgcaaaggctaccgctgcgttggaagcaaattatgatgaaggtctggtcaattttgcagggaaagtcgttgatatttcttgtgagatttcagttaacgatcaaggtagtgatgcgaatatttatctagctcccatttcattatttgaaattcataatagtgaaggcggggcttatatgaagtctaaaatgtttaccattaaactatcacagtgtcaatcgattagtcataatggtgaagtcgttgatgctgatttaaataaaattagtgtagcgtggtcaaatggttacttggtacctaaaactaattttgaaacatcagggttgctaaaaaatatgttagcagatggagctcgaaatattaattttgcactatcgattaataataatacaacgttagatgcagataataagattgtgcctgctgatcctgctcagcttaaagtcattcctaaagtttccgataataaggatgctatatttcaatattatatcgggtatacaacaggatcgcctaaaacggtgacaacaggtttaatggcaagttatgccacttatgaagtacagtataattaa

SEQ ID NO: 316593 - DNA, 321 bp, Proteus mirabilis
atggacattcattattttattggaatcaagataaaagccaggcgaaaagaattaggactctcgggtgctagtttggccaaaatattaaatattagccaacagcaaatatctcgctatgaaaacggaatcaacaaaatacctttaaatcatctagttagtatagctgtcgccttaaagtgccccatagactggttctttcaaggctgtatttctgatgaggattattcaattcaagatagtaatatgggtatcaaaaatcaagagttaaaatatacagcagaaagcgttatcgtccataataaaatgcaatttaatatttga

SEQ ID NO: 316594 - DNA, 912 bp, Proteus mirabilis
gtgaatggtattactcgaatcgacttaaaacagttaagggtttttaaagcactcttaaaagagcgaaatgtgacacgtgccgccgcccagatgggcctcacccagcaagcggtaagtgctcaactgagcaaacttagggatacatttcaagatcacttattcctgcgctccgcacaaggtctcattcccacgccgctggctgagcagcttgagccaagagttaatactgtgttcgaaagcattgcagcactatcaccacccgaccagtttgaccctgccgaagtgtatacgacctttgtaatatctgcgacggattatgctgtggcagttatattgccaagattgatggcgaaggtaagaacccaagctccggggttaaaactgatcatcagggactttgaaagcgatcgactatatccgctcctgacatcgggggacctcgatcttgcattaacttttcctgcgttcgtccccgatggttgtcaaacgaaatggctgttctccgaacaccatatctgcgtaacaaggagtgattctccgatgcaaaaccagcaattcaccattagtgacatcgcagatttaccccaaattattgtctccccaacaagagcaaacctgatcggttctgcggatgactggtttgcaagcaagggctatagtcgaaacattgttatgtcggtaccgagtttcgccgctgcgccggcctgtatcgcctcaactgactgcatagctttcctgccttcacgcattcttccgaatccacttgttcgtccaatccagcttgatgattcaccgcccagcttcgatgtcattgccgcatggcaccttcgctcaaaccaggatccgctgcacaagtggatactttcacttctccagcaggaattcccggcgcaacagagtgctaaccaatag

SEQ ID NO: 316595 - DNA, 483 bp, Proteus mirabilis
gtgaggctttccctgctggagcatcagcgcgcgttgctcttgatagctgatttacttgagactcgcgcacaagagtttacgtacttggaaactctggacaatgacaagccgttgcgggaattctgtcaaatcgatactccgctggttgttgatcattttcgttatttcgcaggtgttgttcgttctcatagcgacgaggtcacacaacttgataaccagactctgagtttaattttgagcgagcctgtcggcgtagttagacaggttattccttggagtttcccttttttgatgactgcgtggaagttggctctggctctagaggttggcaacatgattgttatcaagccatcggagatgacctcaattaccctgcttactttgggggaaatccttaacgaagttttacctgaaggaaccgtcattatcgtaactggctacggcccggatgggcaagcactgcttgaccatctggggggataa

SEQ ID NO: 316596 - DNA, 402 bp, Proteus mirabilis
atggaaacctacgaaagactgaagcaggaaaccggagatgatgaacccatcctgtttatcgacggagttcacccgacgcagggcacgaaactggcttatggctggatacctaacggtaaaagcacagagatagaaacaccgggtagccggacgcgtcttaacatcatgggagctctgaatctgactgatatcggcaagacgatcatccgtgaatacgacaccctaaatgcggaaaatatcgcccggttctttatcgcaatacgggaacacttcaggactgcggcagaattcagagcagagatacggcgattttttagggaaatattaccggatattgccgggacgttgtcgcgtcgaattaacgataactttcaagtactgaaacctgcatcttcaagttaa

SEQ ID NO: 316597 - DNA, 1200 bp, Proteus mirabilis
atgagtcagttgagctatatggaaaagttgttggatggtgttgatgtggagtggaaggcgctcggagaagtatgcgacttcaagaacgggttcgcgtttaagagtagcttatttaaagaagttggtttaccaataattagaattactaatgtggatgggaaaaacatatccctagccgatgttaagtattttgacccatctgactataaggaaaatacagcttcctatgagattagcaaaggcgatattttaattgcgatgtctggtgctactacagggaaaattggcttttacgctcacgaaagccccgcctacctgaatcaacgagtaggtaagttcttacccaagccaaaaatccttaacaatagatatttgtatcactatcttctttcaaaggttgagcagatttatgtgattgcgggcggcggcgcacagccaaaccttagttcaattgcactaatggctaaaattcaaatccccatcccctgcccagataaccccgaaaagtcgctggcaatccaatctgaaatcgtgcaaattttggataaattcactgccctgacagccgagctgacagccgagcttaacatgcggaaaaaacaatacaactactaccgcgacaagttgttgagttttgatgagggtgaggttgagtggaaggcactagggaaaatcgcagaaataaatactggtcagaaaccatctgaaatcttggatacagaggcggagtttgattacatcaatgctgggacaactaggtctggatattgttctctgagtaattgtgagggcgatactgtgacgaccccatcaagagggcaaggtggcattggctttgttggttaccaaaataagtcattttggttaggtcctctttgttacaaaatacggtctatagataacaaagtgctaatcaataagtacctattttatattcttcagtcgaaaaatcagctgttattaggattaaaaaaagaaggtggtgttccagcagtgaataaatctgatttagctaagttagaagttccagttccttctgtaacagaacaggagcgaattgtggaaattttagataaattcgacacattaacaacttcactgcaagaaggtctcccacgcgaaatcgagttacgtcaaaagcaatacgagtattatcgagacctattgttaagctttccgaaatcagatgaggcggcttaa

SEQ ID NO: 316598 - DNA, 1233 bp, Proteus mirabilis
atgagtaaaacgctaacagaaatagcagcgctgttgcaagcgtctgacaaaaaagtgcagttgatttatgcttttaatggcactggtaaaacgcgcttgtcgcgtgaatttaaagagatcatcgcgccaaaaggtggtgggcaggatgatcttgacgaatcagagcaaacgccgctttcgcgccacaagattttgtattacaacgcgtttacggaagatttgttttactgggataacgatttagagaacggtagagaaccaaagttaagaatacagccaaacacatttactgactggattctgagggaacgaggcgataccgacattgtaaaaaatttccagagatatacaaacgacaagctaatgcctctctttcatgaggaagatgtcattatagctggcaaaaaaacgggtgagaaaacatatcctgaagtgacattttcttttgaaacaggctccgaaagttcaggaaatttaaaaatatctaagggtgaagaacggaacttcgtctggagtgtcttttacacattactgcaagaagttacgtcgattcttgaacagcctgatccggtcaaacgagatgatgataaatttgataaattggaatatgtgtttattgatgatccagtgagttcattggatgatacccatctgattgaattggctgttgatttagctaacttaatcaaaagaagctattactttgaagggcgcggtctaagatttgtcatcacgacacatagcccattgttttataatgttttatataatgagttaaataacgaccttaaaaatccagtagaaggtaaaaatcctacgtggttgtataaacgcaatcaatcagaaaagtacaggcttgttaaaaatactgacgaaactttcgaactgttcagttcgaatgatcatcctttttcttaccacctattcttattgtctgaaatacgcgaagctattaaaaatacgcaagtgagaaagtatcacttttcattcatgagaaatattttagaaaaaaccgctacttttcttggacatccgcgctgggaagatcttttgataaaaacagctgaaggctctcctgatccattttcaaacagaattcttaacttgtccagccactctgcacatgcaggggacgaaattacagatatcgaagaaaaagataaggaaaatcttgaagctctagtaaatcacttgtttagaacttatggcttcaagaaacaggagttacaatga

SEQ ID NO: 316599 - DNA, 747 bp, Proteus mirabilis
atgaatataccaaactctacttttcctattgtggcggttattcccgctgccggcataggtagtcgaatgcaagcaacctgcccgaagcaataccttaaaattggcagattgactatccttgaacatactattaatgcgctattaaaacatccacgcatttcgcaaattattgtcgcaattaacccagaagatgactatttttatcacctagctcttgctaaagataaacgaattattgtcgttaaaggagggggacaacgtgctgattcggtattatcagggcttcgctatattacagaacatcttgcgcaaaatacatgggcgctagttcatgatgcggcaagaccttgcctgtcctttagtgatttggataatcttattcaactcattgatgataaccatcttgatcctcaattttgtggcgggatcttagcctctcctgtgcgtgatacgatgaaacgtagtcatcaacaagataaccatattgaaaaaacagtggcaagagacacgctatggcatgctttaacgccacaatttttcccagcggccttgttaaaacaaaatcttgaaaacgcattggcacaaaacgtacccattactgatgaagcatctgcgatggaatttggtggatatgaacccttattagttaaaggccgtgcggataatataaaagtcacacaacctgaagacttggctcttgcagaatttttcctctctcgacaaattaccagcataaggaacacataa

SEQ ID NO: 316600 - DNA, 909 bp, Proteus mirabilis
atgaatgaaacacaattaactcatcttcagcaattagaagcagaaagcatttatatattgcgtgaagttgtcgctgaatttgaaaatcccgtcatgctttactcaataggcaaagattcttcggtgatgttgcatctagcacgtaaggctttttatccggcgaaattaccttttcctcttttacatgttgatacgggttggaaatttcgtgagatgtatgagtttcgtgataaaacggccaaagagtatggttttgatctcaaagtttatcgtaatccccaaggggcacaattggggatcaatccctttattcatggtagcgccaagcatacagatatcatgaaaacagaaggtcttaagcaagctctggataaatatggttttgatgccgcatttggtggggcgcgtcgtgatgaagaaaaatcgcgtgctaaagagcgtatttactcatttagagatagatctcatcgttgggatccgaaaaatcaacgtccagaattatggcaaaattacaacggccaaattaataaaggggaaagtattcgcgtttttccattatcaaattggacggagctagatatttggcaatatatctatttagaaaacatcgatattgtgccgctctatttcgctaaacaccgtccagttattgagcgggatggtaccttgattatggttgacgatgatcgaatagacctaaaagctggagaggtgatcacacaacaaaaagtacgctttagaacattaggttgctggccattaacgggtgctattccttcacaagcagacacattacccgccattattgaagagatgttaatttccaccagtagcgagcgacaagggcgtttaattgacagtgatcagtctgcttcaatggaacttaaaaaacgtcagggttatttttaa

SEQ ID NO: 316601 - DNA, 732 bp, Proteus mirabilis
atgagtcgattatcactttctcaattggtgttactatcgattgaagagcagcgactggcgcttgatgaaatcaaccaacaattagagcaaaaaacggcgatagagcgggtgatttgggctttagaacatcttcctaaccagtttgttttaagctcaagctttggtattcaagcggcagtttgtttgcatttgcttaccagacaatatcccgatatacctgtaattttgacagacacaggttatctctttcccgaaacatatcaatttattgatgaattaacctcttcactacaacttaatttaaaagtatatcgcgctgaaatatcttcatcttggcaagaagcacgctatggcaagctttggttgcaagggattgaaggtatcgaacgttataaccaaataaataaagttgcgccaatggaaaaggcattaaaggagttacaggcgaagacatggtttgcagggctacgacgccagcaatccaaaagtcgagagcatttacctgttttatccatagcgaaaggtatttttaagttactaccgatagtcgattgggataataaacaaatttatcaatatcttaaacagcataatttaccttaccatccattatgggaacaaggttatctgtctgtgggtgatacgcatacgacacgcaaatggcaagagggaatgagtgaagaagagacgcgattctttggcttaaaacgtgagtgtggattacacgaataa

SEQ ID NO: 316602 - DNA, 1731 bp, Proteus mirabilis
atgaaatcacaaactcaagcgcccttagtggttgaaggaaaactatctgatagtgaacgtatgaaaaaagagagtaatttcttacgaggcactattagtgatgatttacaaaatggtctaaccggtggttttgagggcgataattttttattaattcgttttcacggtatgtaccaacaagatgatagagatattcgtgccgagcgtgcccaacagctactagagcctcgtcatgccatgatgttacgttgtcgtttaccgggcggtgtcatcaccccaaagcagtggctaagtatcgataagtttgccagtgaaaatacgctctatggcagtattcgtattactaatcgtcaaacttttcaatttcatggtattttaaaaggtcatgttaaaccggctcaccaaatgctagcgtcaacaggccttgatgctcttgcaaccgccaatgatgttaatcgaaatgtgctatgtacctcaaaccctgaacaatcttcattgcatcaagaagcttatgaatgggccaaaaaactatccgagcatttattgccacgcacccatgcctatgcagaaatttggttagataaagagaaagtggcgacaacggatgaggagcctattttaggtgaaacctatttacctcggaaatttaaaacatcggtggtgatccccccttataacgatgttgacttgcatgctaatgacatgaattttattgccatcgcagaaaatgggcatttggttggttttaatgtgctagtcggtggcggccttgcgatgacccatggtgataaaaaaacctttccgcgtttagctagtgaatttggttatattcctattgataaaacattagcagtcgctgaagcgattgtgacgacgcaacgagattggggcaatcgtactgaacgtaaaaatgccaaaaccaaatacaccttagagcgcgttggcattgaaacatttaaacaggaagttgaacgccgctcaggggttatgtttgatatgatccgaccgtatcaatttactcaccgtggtgatcaaattggttggttaaaaggggttgataacaaatggtatctaaccttatttattgaaagtggtcgattaatcgataaacctaatgcgccgttaaaaacgggggttgctgaaattgccaaagtgcatcttggtgactttcgtttaacagctaatcaaaatttgattgttgctggtgtaccagaggcacagaaagagcagattgaggcgatagcgcgtcaatatggtttaattaatgatgaggttacaccgctgcgtaaacatgccatggcgtgtgtttcatttccaacctgcccattagccatggcagaagcggagcgtttccttcccgcatttaccgatacccttgataatatcatggctaaatacggagttagtgatgagcatattgttgtacgtgtaacagggtgtcctaacggttgtggtcgtgcaatgttggcggaagtcggactggtgggtaaagcccccgatcgctataacttacatctaggaggaaaccgcattggtactcgcattcctagaatgtatcgtgaaaatatttcatcacaagaaatcattgaaattcttgatactttaattggtcagtgggctatttcacgtgaactaaatgaaggttttggtgattttcttattcgcactgatgttatcaaacccgttgttaattcagccattgatttttatgaagtgcaggaggtgatatga

SEQ ID NO: 316603 - DNA, 456 bp, Proteus mirabilis
atggtcaaatattcttacctttatgaagcttctgaataccttaataacatcaatatacagcaacgcattctacttgattcgctgaaagagaaacggaaaaatagaggtaaaggtcctctttttactaatgttacgcaagtaaaacgcttgtgtatcgacggccttgaacgtcacacacaaattaaagctgcagtacagcaggtaatgagtggcaacaatatctataatttatttccagacgatttagaacaacaagccaaatataaaaaaagcctacttcagtttggtttcgctgtggctcaaggcgaatttattttgcgagatatcttatcctgtattgagcaatgttcaatccccgaaaaaactgttcgtttagttgatatgcccgaccaaaaagaagtcagtgcttggattatcgctgaacatagtaaagttggcgttgttgacatggagtag

SEQ ID NO: 316604 - DNA, 462 bp, Proteus mirabilis
  misc_feature (381)..(390): n is a, c, g, or t
gtgaaagtgttgactgtttttggcacacgccctgaagcgatcaaaatggcacctttagtgcacgctttagcaaatgatgattcgtttgaggcgaaagtttgtgttacggcccaacatcgagaaatgcttgatcaggtattaaatcttttcgagatcaaaccagattatgatctcaatattatgaaaccaggacaagatttaacagatataacctgtcgcattttagaaggtttaaaacctgttctagcgtcatttcaacctgatgttgtgttagtacatggtgatacaaccaccaccatggcggcaagccttgctgctttttatcaacaaatccccgtcggtcatgttgaagcgggattacgtaccggtaatctctattcnnnnnnnnnngcttttttattccattttgcgactctacagatatataaagttaaatctggtgcgagaagcggttgcggataa

SEQ ID NO: 316605 - DNA, 273 bp, Proteus mirabilis
  misc_feature (5)..(14): n is a, c, g, or t
gtgcnnnnnnnnnntaaaagtgcgatgggacaatctttagtcgctgctttcggtggtaaagataatatcagtagcttagatgcttgtattacacgcttgcgtattggtgtaaaagagattgataaggtcgatcgtgatgagctgaaaagactgggagcggctggtgttgtggtggttggatccggtattcaagcaatttttggccctaagtctgataatttaaaaactgaaatggatgaatatattcggtctataggtacaactgaaaaataa

SEQ ID NO: 316606 - DNA, 159 bp, Proteus mirabilis
atgcaagggcatttagcgttactgatgaaaaatagtttggctgatggtgttattgataacgaagaagagcagaaaataaaaatgatgctggatggattaatttcgcagatccgcacatttatgaatgcgtttgtttcgttgcatcaaaagagaaattaa

SEQ ID NO: 316607 - DNA, 438 bp, Proteus mirabilis
atgcctcataatgaacatgttacacttgttatcaagcataaggtttggcgcaataaaattgatgagtatgaaatttggttgaataagattatgccagttgcagaacgttatcctggacatttaggtgttaatattattaaacctaccgattttagtagtcagtattcaatactattgcgttttgataatattgatcatttatatatatggcaaaaatcattagataggcagcactatcttgctgaattagctacgttaattgaattaccggaaacgatggaaatccgacctggtgcagaattttggtttacaccggaaaacccaagagaatatgtagttccgaaatggaaacaatatattttatcattgtttattatattcccgatagttaatattgttaacagtatctcgaatatttatttccaggttttattatga

SEQ ID NO: 316608 - DNA, 378 bp, Proteus mirabilis
atgtcagtacaaatcagtccggaacagatacgcgagcaactggaaatcatggggtttgaggctcccgattttgcggttgccgcggcattatctgtagtggacagtattgataaatgtcttgatgaggcaggatatacggaagcagtaataacgctgataaaggtttattcagttattcttatcctgtctgcagctgatgttcgtaaaatcgcgtcagaacacgcaccctctggcgcttctgtttcatatcagtatttttctgatggcagaaaaacattgttaaaaatgctgtcttctctagatgccaatggatgtactaatagtcttcctattgagcgccctgtaggtatcattcagtttgatgtagttcgggggtga

SEQ ID NO: 316609 - DNA, 135 bp, Proteus mirabilis
atgttctttaacaacgatgatggcgagctgtgtattagctatcagaacggtgacgctgataaagcgtcaaccttctcagaaggttttgggattggtgtagaagatggcgtgcgtgacgtagccactttcgcatag

SEQ ID NO: 316610 - DNA, 699 bp, Proteus mirabilis
atggtaaacaaaatacgcttttttcaatatatttcgttgtgtgttttaggagtattatttttatcatttcaggttcaagctggtgtcggtttaagccagactcgtattattattaatggggatactaatacagcctctattagcgctagaaataataatgcacaaccttatttagtctctaactttataaccgaaaaactggatacctcatcaccacctttgagtggtatgtttgttattactccaaacattttcaggttagctccggaaagtgaaaatacaataaaaattcaaataataccaacaaatcttcctaaagatagagaatcactttattacttccactcgcgaaatattccatcaacaaataaaaatgaagatgggataaaaatagcgatggaaaatattatcaaggtattttatcgccctattaatttagcgataaacccaaaagaagccggtgataaattagttgtaaaagcaacgcctaatgggatcagtattgagaaccctacgccttattatattaatctttttaagattaccgttaaaaatgaaacgataaaattaaataaaattaataatatgatagaaccattttcttctaaaaactatgtggtaagtaataaaacaggtgctgttaatattcatattatcaacgatttaggcggagaaagtgtctacaataaaaaactttaa

SEQ ID NO: 316611 - DNA, 198 bp, Proteus mirabilis
ttgatcctaaaacactcaaaaaaggcaagcccgatcctgaaatatttatgtatcggatttgaagactcgattgctggaatacaatcgattaaacaagcgggcatgtatgcaattggcgttactgctgatggccccttaccagaagcagatttagctgttcactcattaactgaaatagatattcattcacttttttaa

SEQ ID NO: 316612 - DNA, 246 bp, Proteus mirabilis
atgtctccggttattccaaatggttcaacagtgaccgttgatacaggtaatacgcggattgtggatggcggtatttatgctatcgaacaagactcattatttagaataaaattgctctaccgtcagccaggcggaaaattaattattcgtagctacaataaagatgaatttcctgatgaatttgcagaaattgactccgttaaaattatgggacgcgttattcactggtctgtgatggcttggtga

SEQ ID NO: 316613 - DNA, 660 bp, Proteus mirabilis
atgaaaaagaatatttccctaatattatttttactattttccctcataacggctagccaagctgctggaataagtgtgggaggaacacgttttgtctatgacgataatctacgtgaaatcagtattccaattatgaatacagataaggaaaaaccctatttaattcaaagttgggtttcagcttatcaaggtgatgaaaaaacaccttttattgcaacacctccactatttcgtattgagccagatagttcaggcacggcgcgaatttcatataccggagcacctttggcatcaaaccaagaagtggtttattggctcaatatcaaatccattccaccgatggaaaaaagtccagagaatcaactccaattagtgattaattctcaatttaaattgtttctccgtgcccatgatattgaaccacttgattttgataaggtgaaattatctaaacaaaataaagggttagtaataaataacgatacgccgtatcacctgacaattaaacatatcttagtgggtgataaacgctacccatttaatgattttgttaatcctcaccaagaagtggtcttgctaaaagaaaatcatattccgcagaaagttaccgttcaatttatcaatgattacggtgcgactgtagataaagtattaaattaa

SEQ ID NO: 316614 - DNA, 1032 bp, Proteus mirabilis
ttggcagacttagagcggataacaaaagatgatgtatctctcactgaacaggcagcaaggcgtaaagctgaaattgaggcggaatatcaacaaaagatagccgaaataaaggctaataacgctgtctcaccgcaagatgacatcaaagggaaagtggatcctgttcagcaactcaaaaacgaacacgagcgtaaacttgcacttattcgtgagtttgaaacagaaaaaggcgctattactcagcgtggcttagagttaatgaatgttgctaatactcaatatgagcaagaccggttaaatgctcaatgggagatatggcgcaatcagagccaagccaatcaattcttagctgatgggttggacgcattaggacagcgctctactaacgtactcacagggctattaactcaaacacaatccattaacgatgctttccgtaatgtcgccttaactatcgtagaccaagccgttggagctctggtccaaatgggcatgcaacaggttaagaatatggttactgaaagtgccatgcgtaaggcttccaatgctcaagctatagcggaggctacaactactggcgcagcaattacaaatgctatggctccggcggcagcgacaaccagtattgccactatgggttctgccgctacatggggtatggcagcaatggcaatagctattccagctatgattgcgcttgctggtgctcgtaaaaatggtggacccgtaaatgctggctctatgtatagagtgggtgaaggtgggaagcctgagatattcaaagcatctaacggtagtcagtacatgataccgggtgataatggtcgagttattagtaaccgacaaataggtaaaggtggtaatggtgtcagcatgggtgatatgaactttacattccaagttcaagcacctaatggcatcactcaaaaggaagcgcaacaaatacagcaaatggtgagaggtacggtttatgacgtacttggtaacgaaatgcgtagcggtggtgctttggaaaaagtaagaagttggtaa

SEQ ID NO: 316615 - DNA, 270 bp, Proteus mirabilis; identical to SEQ ID NO: 300171

SEQ ID NO: 316616 - DNA, 513 bp, Proteus mirabilis
gtggatataaataaatatgaccgtgctctacagttagatattttaactgccttatatgattctttcccaaatcccttagaagatgatgaatatgaagaacttagtaaaaaattcagtaataaagatcatcttatagcaaatatgttataccttgagatgcatgggttgattgaaaaaccattcattcaaagttcaacacttgatgggatcgaatatatttttaatagctatacctgcttcattactgaaaaaggtattgattttttattagatgacggagggttaagcgcgatactgaaaatacaaacaattcgcatacatagtgattcaattaaagcattagaggatattattttaacatctaatgaatcaccaggcatgaaagctaacttgaaatcaaaacttcatgagcttcctgcaaacgccataacacatttgatgaatgaattattggtgaagggggtaatgaatcttcctgttgcaattcagataattcaaaaattcctccagtag

SEQ ID NO: 316617 - DNA, 330 bp, Proteus mirabilis
atggaagagtttaaatggcgacctgaaacagcttatcaggtgggtaatgagcctaaagtgaaagtagctaagtttggtaacggttacgaacaaagagtcaaagacgggatcaacaaccaactaaagacttatcaactctcatttgttaagcgtactgatattgggaaacagattgatgagttccttaaggctcgaggtgcagttgaatcattcttatggctaaccagtgatgataactctaaacgtaaatttgtttgccgtagctggcaggtaacaccaagagcgacggtgtggcagatagactgcacatttgaggaggttgttgcatga

SEQ ID NO: 316618 - DNA, 699 bp, Proteus mirabilis
atgagggatatacctcaagagatgcgcatagatgttgcagatttacagcaaaatgcaatgttagatttgtatgaggtcgatttaagtcgttttggtggtgatgtttaccggtttcatgacggcatgaatggcttattaaagcctattatttggcagggcttacgatatgagccttatcctgttcaggtcacagggtttagtgtaacagctcagggggcatcagacagaccaaaaatgacgtttgctaactttgacggaatgttaactgcgattaacaatgattatgatgatgcgctaggcgctgtcgttactcgcaggcaggttttagagcaatatctcgatgctgttaattttcccaacggaaacccacaagcagatccaaccagagaagccgttcaaaaatacgttgtcgaacagcgagaaagttcagactctgattttgtgacgtatatattagcacttccaacagaaacagataacgccctgatacctaggcgagttattcaggctgatatctgctcatggcgataccgaggatttgattgtggttatgatggaccacctgttgcagatgaaaaagaccaaccaacaaccgatcccttaaaagacaaatgctctcataaatacagcgggtgcaaattaagacataaagggaatatgccattcggcgggtatttaggctcaaataaattaggttaa

SEQ ID NO: 316619 - DNA, 246 bp, Proteus mirabilis
atgaaacgaattacattatcagaatggaataataaatatttcgctaaccctagaagtcaacggcaattatctcgctatataaaggaaggtaggttataccctgctccagaaaaggttggtagagaatatgagttagagccgtggacaattctaacaaatgacaaaatggtaagggaaccgcaatatttaatggagaaaattaatgggcagaagcagaagtgcaaagaacaaggggctaccgcctaa

SEQ ID NO: 316620 - DNA, 702 bp, Proteus mirabilis
atgaagacacaaatacagatcaattgccccgactgtcacagtcccagtttaaagaaaaacggcaaaaaaagctatggcaagcagaactatcaatgtaaggactgcaaacgccagtttattggcgatcatgccctaacttataacggctgtcactctagaatagaagataaaatacggctaatgacagtgagaggctgtggcgtcagagacattgctattatagcctcagttagcattggtaaagtgcttagcaccataggctcatctgtttataagattgcgcctaagaagcgctattatgaacgcttagaggttgatgagttttggacttacgtgtatcgcaagaagcgtaaagtttggcttatttatgcttatgaccgcgctaccaatgagattgtcgcttatgtctggggcaaacgtgacttgaaaacagctaagaagctaagagcccgtcttaaacaactgaaagtcagctatggctctattagcatggataactgggatagctttataaccgcattcaagcctgacaagaaacaaatcggcaagcagcatacggtaggcatagaaggtaataactgtcgccttagacaccgattgcgacgagccgttcgaaagacctgctgcttctcaaagaagtttgataaccactttaaggtgtttgatttggtattcttctatgtcaattatggctatgtctga

SEQ ID NO: 316621 - DNA, 231 bp, Proteus mirabilis
atggcaggtaaagaaattcaactatataaagtaaagtggcatagagaaatattttatcttcatgagaattcaataactggtttttgggaggataatgaagataaagaaaatattaaatcagcaattatgctaactagcggtaaagacttaatttatccagtaccgctatctgagcttttagcacaattaaaagtggttattaattataaactaccatcagaaaatatctag

SEQ ID NO: 316622 - DNA, 198 bp, Proteus mirabilis
atgaacaagcttcttgtactaaaatccagtattttagaaaattactcgcacagcaataaaatggctgactatctaatagaaaattggcaaaagcatcatcaaaatgatctcattaccctacgtgatctggcaaaagatcccattcctgttttagatcaagccacattatttgcttttggcaaagatacggctatataa

SEQ ID NO: 316623 - DNA, 456 bp, Proteus mirabilis
atgagtgtgccacaaacaaaagccgaactacttttagctattgataaaaattttagtaaattaattagttacctcaacgcaatcccaccggagatgacttcagatccctcaatggctggacacaccaaaggaacgaagatgagtgttcgtgaccttgtttcgtatctaattggatggaatactcttgttgtaaaatggatcacttctgatgctaaaggtctacctgttgattttccggaaactggctataaattgttagtaattgaacttcagactgtaaaaaatgagcttgtaaagcttattaatgatcgtaccgatgatattttgtatggaaagtcatggtacacaaaatggacgatgggacgaatgatctcatttaacacatcttcgccttacgctaacgctaatggaagattaagaaaatgggcaaaaaataataatatcagtttaaaataa

SEQ ID NO: 316624 - DNA, 1599 bp, Proteus mirabilis
atgaatattattaatcaaccttggttgccttttcgttttcgtgatggcgagattaaaacacttccaatatcagctatttcacatcctgatattattgatttctcattaaatagagccgattttaaaggtgctgcttatcaatttgcaatagggttattacaaacgatatttgcaccagaggatgaagatgaatgggaagaatattttgaaacacctccttcaagtaaaaaattacaatctgcatttgataaagttgcacatgcttttaatataatgggtgatggccctttatttatgcaggatttttcaactttagaagagcaaaaaaatattcctatagctcagttgctaatagatgctcctggtgaaaatggaataaagcaaaatacagaccattttattaaacaaggtattgcagatgtaatgtcattagagatggctgtgttagctttatttaccttacaaataaatgctcctagtggtggcaaaggtcatctagtcagtctaagaggaggtggacctttaacaacattagtttatcccgcagaagaaaattcaacattatggcaaaaattatggcttaatgtaattaatagagaattttgggaatatgatgaaccaaattttgatgatggtagtgtttttccttggttaataccgctaaatttaaaagaaggaaaaggtgaaaaagtttcacctgatgatgtacatcccctttatatgtactgggcaatgcctcgtagaataagattaaaagtagaaaataaatctgtcacttgtcaaattagtgatatgaaaagtaatttttcagttagatattatgttactaaaaattatggattagactatcaagaaggttggttacatccattaacgccatattattgggatcctaaaaagccagaaatgtttcctaattctattaaaggaagacaaggaggtattcactataatttgtgggatcgattatttttatcaagtaatgaaaatggacaaaaaagcgctactgttgtcagtcattacttaaagctatatcaattattagaattcacaagaaagcctagattacttatttttggttatgatatggataatatgaaaccacgtggatggtataatttagaaatgcctattttccatgtaaaagatgagtataataataaaattattaatgaaataaaaattatccaaaaattaactatagattgcttaaaaagtgtaaaagaacaggtgaaaaaagcgtggtttagtagtcctaaggatatgaagggcgatattagttttattgatttaactttttggcaaagaagtgaaaatatattctttgaagtggtacaaaacattatcgttcaaatacaaaaaaatgattttctaacccatgaacaagccaaaaaatggttaaactctattagaaaaataagtatttctatttttgatgaatatgctttatcagcattaggaacacaaaaatcagttagtgggtgtattaaagcaagaaatggtttaattaaagatctttatagtaataaaagaataaagaagtttactgaagactttaaaattactaaggaaaatggagaacaatatgggatcttataa

SEQ ID NO: 316625 - DNA, 297 bp, Proteus mirabilis
atgagcatgattgttgttgtaactgaagctgttcctcctcgattaagagggcgacttgctgtgtggctattagaagtgagagcgggtgtatatgttggtaatgtttcagcccgaataagagaaatgatttggcaacaaattaatgagtttgctgaagatggtaatgtcgttatggcatggggaactaatactgagtcaggttttgattttcaaacctatggtgagaatcgacgagagcctattgattttgatggcttgagattagtgttatttaagccatataaagaagatgtataa

SEQ ID NO: 316626 - DNA, 678 bp, Proteus mirabilis
atgtatttatcaaggatctcaatagactattctgctgattatttacactcactattagcgaataagttgccggacggatatacaattcatcagttattatggcggttgtttactgaagaaaaagaacgctcatttttgtatcgattagaaataggaaaaaatggtaaacctattttttatattctttcttctatagctccaactactaagaataatttttttaaaatagaaactaaaccttttttacccaaattagttaaaaaaatgaaattagccttttcattaagagcaaatccaacggtttgtattactgataaagaaggaaaacggcatcgtcatgatgttcttatgcatgctaaaaaacaagctcaacttgatggaaaagattacagtcatgatgatattcatcatttaatgcaacaagctgcattaaattggattagttctgatgatcgtttaaataaatggggtatttcattaactcagttacctgatattaaagcttatacacctgagcgtattaaaaagccttcaggaaaaataatgtctttttcttctgttgattatcaaggtgttctaacaatcgaagaacctcatttattttggcaacaatatcagcaagggtttggcagagcaaaagcgtttggttgtggattgatgcttatcaggaatatttaa

SEQ ID NO: 316627 - DNA, 1674 bp, Proteus mirabilis
atgttacagtcgaataaaatcaccgccctttactgccgtttaagtcaagaggatatgcaagccggagaaagcggaagcatacagcaccaaaaaatgatacttcaacgctatgcggacgaacaccattttttgaacacaaagttttttgtggacgacggattttccggcgtgagttttgagcgcgaggggctgcaagcgatgttgcaggaagtggaagccggacgagtggcgacggtcattaccaaagacctttcccgtcttggcagaaactatctgaaaacgggcgaactcatagagattgtatttcccgaaaacggagtacgctatatcgcgatcaacgacggagttgacacagcgcgggaggataacgagtttacccccttgcggaactggtttaacgagttttacgcccgcgacacaagcaagaaaatccgcgcagttaaacaggcacaggcgcaaaaaggcgagcgcgtcaacggggaatatccatacggctatatcccagacccgaacaaccgccaccaccttatacccgacccggaaaccgcgccgattgtcaaacaggttttcgctatgtttgttagcggcgtgcgtatgtgcgaaatccaaaaatggcttgcggaaaacaaagtcttgacgattggagcgttgcgctatcagcgtacaggacaggcgcggtatcagcgggcaatgatcgccccctatacttggccggacaaaacgctctatgacatattagcaaggcaggaatatttagggcataccataaccgcgaaaactcacaaggtatcctacaagtcgaaaaagacccggaagaacgaagaagaacaacgctatttcttcccaaacacccatgagccgcttgttgacgaggaaacctttgaacttgcgcaaaagcggattgctacccgccaccgcccgacaaaagcagcggagattgatattttttccggcttgctgttttgcgctggttgcagacataagatgtattaccaacagggcgtaaatatcgagccgcgcaagttttcctattcttgcggcgcatggcgcaacagggcaaggacaggcagcgagtgtacctctcattatatccgcaaaaacgtacttcttgatttagtgctggaagatatgcggcgggttttgcggtatgttaaggaacacgaacaggactttatctgtaaagctaccgagtacggcgacatggaagcgagaaaggcattagcgcagcagcaaaaggaacttttcaaagcacaggcgcgtatgaccgaacttgacacgcttttccgcaagctgtatgaggacaacgcattaggcagactgacagatgaacggtttgtgtttctaacttccggctatgaggacgaaaagaaatcccttgccgcaaggatagacgagttacaacagcagatcgcaaccgttaccgagcgaaaaagggatatatcaaggtttattcagattgtcgggaaatacagcgacatacaggaattgacctatgaaaacgtccatgagtttatcgaccgtattttgatacatgaattagaccgggaaaccaacacccggaaaatcgaaatccattatagctttgtcggacaggttgataccgagcaggagccgacgcaagttgtcaaccatgaccgccgcaacatggtagatgtaaaaagtatcgctatctaa

SEQ ID NO: 316628 - DNA, 174 bp, Proteus mirabilis
atggataaaaaacagacaattacaaccgaacgcaaaatagggaaaatcacctatcttgttcaagcgttgccgagtgaaaaggcaaccgatacaatccataaaaagattgagaaactcattgtaaaggatttgcagaaaaagcccggaaatccgggatttttagcgtccgagtag

SEQ ID NO: 316629 - DNA, 243 bp, Proteus mirabilis
atgatgaataccgttaggaagtctgaaaatctgttgccgttccctgtcatttccgcagcggcaaacggcgacacaaccgccatgtgcgcgatcttgaagcactacgagggttacatagcgaaactttgtacccgcacgctgaaagacgacgcgggcaatacctattcctatgtggacgaggaaatgcgtaacaggctgcaagtgcgccttattacccgcacccttgcttttcatgtaggataa

SEQ ID NO: 316630 - DNA, 438 bp, Proteus mirabilis
atggagctatcttcttccgacaaggaaagaatacaacatcagtacgacgcattagcaaagaaaactttggtcggcgaagcgaaaagccaccgtcgcactcttgcgaaacgcgcagcacgcgaagttactttttcggatttgagcgaaagcgaactcgcgcagcttttcacaacggacgaatacgaaagcgattatttccgttttcaagtgtccggctttgatgtactcgtcaaaaatgaactgcttgccgaagcccttaacgctttgcccgaaaggaaacgcgacattatccttttgtcctacttcttggatatgagcgacgcggaaattggcgaactgctgaatgttgtacgcacgacggttttccggcacaggaaatccgcgcttgcgaaaatcaaacagtatttggagggaaaagcagatgatgaataccgttag

SEQ ID NO: 316631 - DNA, 984 bp, Proteus mirabilis
atgaaacgtttacctaaatatacgcctgcggaagtacggaatgatccatacggatttacttacaaagaaatgtcggaagttattggcgagaatgaagcaaaagccttatatgaagaattatataagcaattaccacgcaaaaaaaatctatcaatgttggtaaaaaatatttgcaaaagcagtgatactgaaaagtatgtttacgaactgaaagacaacaaatacattgaaacggtttttatcaagcggcgagatggtggaactgtttgcgtgagcacacaagtcggttgtcctgttggttgtattttttgtgagtccgggcgaaatggctttgttcgtaatctaacatcgtcagaaatcgtacaacagattatattgttgcgtcgaaaagtaaaccgtatcgtttttatgggtatgggagagcctttattcaattatgacaacttgataaaagcaatccatattctccgagatagatatgggctcaactttccaaccgacggcattaccatatcaacagttggtccggtcgatcaattaaaaaaattgcgcgaggaacatcttaaaattcagttgacaatatctttacacgcagcaacacaatctgcaagaaatcgtattattcctcacatgcgcatatatgctattgaagatgttgttaagcaagccttatcctattctgaaaggcataatcgcaaaattgtctttgcgtatttgcttttaccgggtataaatgaccggccctcagatgtaagacaacttgcaaaatggtttcggggcaaaaaagttatgattaacgtgttacaatacaacccaacaagcaattcaagaattaaagcaccacagaaacgggaaatagttgcattcaaacatcaattagagcaagcaggacttgaagttactatgagagtttctcatggcagagagattaacgcggcttgtggacagttagctaacacatataataaattcaaaaaaaaatga

SEQ ID NO: 316632 - DNA, 186 bp, Proteus mirabilis
atgcttaaaaaatattggataaaatgtccgatttgtaacggaaagacgagagttcaagtatttcataatactgtattaaaagattttcctcttttctgccctaaatgcaaattgacgcatatcattgatgtagaaaaattagagattgtaatcaaaaatacagaaaaacaaacttttattatttag

SEQ ID NO: 316633 - DNA, 1335 bp, Proteus mirabilis
atggcggttacaaagacgcaccctattaaatcaaccttaaaggctgcgatagactatatcttaaatcccgaaaagacagacgggaagctgcttgcgtcctctttcggctgcgggctggaaaccgccgatattgagtttgcatggacgcgggaagctgccggagatcgcggcacacatttagggcggcacttgatacaatcctttgcggtgggagaaaccacaccggaagaagcgcacaaaatcggcatggaacttgccggggcggtattaggcggcaagtatgagtttgttttgacaactcacgtcgataaagaccatctgcataatcacttgattttcaacgcggttagcttcgttgactacaaaaagtaccattccaacaagcaaagctatcactttatccggcgcaccagcgacaggatatgtaaagagcatgggctatccgtcgtcgtaccgggacaggacaagggaaaaagctatgcagaatacaccgccgaaaagcaagggacaagctacaaagcaaagctgaaaacggcgatagatactctcattccccaagtgaaagattttgacgaactgctgcgccgcttgcaggaaatggggtatgaaatcaaacagggcaaatacatttcctttcgcgctgccggacaggaacggtttacccgcacaaagacgctcggcgcggcctatacggaagaagcgataaaggagcgtatcaagggcgtgtatgttgccaaaacaaaaacgctgcgggaagataagaaaatccggcttgtcgtcgatcttgaaaacagtatcaaagcccaacagtcggcgggctatgaacggtgggcaaaaatccataatctgaaacaggctgctaaaagcatgaacttcctaaccgaaaacaagattgagtattatagcgaacttgaaagcaagatagccgatattatgaccgctcatgacgcggcggcaaaggcggttaaggaagtggaacagcgtatgtctgatttgtcgctgcttatcaagcacaccaccacataccgacagttaaaaccgatttacgatgaataccgaaaatcgccggacaaggaaaagtatctgcgggggcatgaaagcgaaattatcctgtttgaagctgcggcaagggcattaaaggaaatgcagataaagaagctgcccgatctcgccgcgctgcgcaaggagtatagaagcttaaacgacaggaaaaccaaattgtatgaagattatcggcaagccaagaagcaaatgcaggaatacggcgttgtcaaaaagaacgtcgatagtattctttacccgtcccaaagcagggcgcgggagcaggagcgataa

SEQ ID NO: 316634 - DNA, 210 bp, Proteus mirabilis
atgaatacccgctttaccattgaggaagaaaacattgttgcgatctacgccgaggacagccgggaaacaacgcttgaaaatatccttgccgccatgccctacatggacgaggatatgcgccagcttgccgccgcagcggtgaacaagctgcaagccatgacggacagcgagttttccgaaagggagtttatcttgaccgacgaggaatag

SEQ ID NO: 316635 - DNA, 2847 bp, Proteus mirabilis
atggaaaagtatctgaatgggcgtatcaaagcgtatgaccgcttgtttacggaaatctccccgcctatcccgcaggagtacgccgactatttcaaagtaaacggtatgctcatgccggactacaccatagagggcgaagaacccccgcagcagcaacaggcggcagctatccccgaaaataccgggcaggaaaaggagcgtgaacacatgagcgaacagttttctattatgataggcaaccgcagccgctttgacgcgggcgaccccggcggctattggttggatatgcccgccacaaaggagcagttgcacgaagctatgcggaacgtcggcattaccgccgacaacccgcaggatttttccattcgcggctattccgacgacccggagaaacatattgccttgccttatgaaatggtatgcgccgccgacgtggacgaactcaattttcttgcggcgcggctcgaacagcttgaccccgccgaggttggcaagctgaacgcagctttgcagcagaaaaacgggcttgcaaatattggacaggtaattgacttcacctacaacgtggatttttacgtccatatccccgaagtacataactaccacgatttgggcgactattacttaaatcaatccggcatggtacaaatgcccgaagaatggaaaggcggcattgacctttctacttttggcaggaacgctgccgcgcaggaaaaaggcgcgtttaccgagtacggctatatcgtggaaagcggcgacgagtgggaacggcagtttgaggggcgcgaagtgccggaagaataccgcattatgagttacccgcagccggagcgcggcgaacaggacaaagcctatatggacgcagccgaaacgcagcaagcagacgcacaggccgcagagccgcagcagccccgccccgtcgtccccattatccttacttccgaaaagcccgccgaaaaggtaaaggagatcaccgcgcgtttggaacagggcgtacaggcgatttttgacagcgaccgctacaaagagtttctaaccgctatgtcaaagttccatgattatagtttgaataacactatcctaattgctatgcagggcggcaatttggtaatgggcttccgtcaatgggaaaaggagtttgaccgccatgtaaagaaaggcgagaaaggcattaaaatctttgcccccgcgccctacaaggtgaaaaagctggttgataaaatcgaccccgaaacgagaaagcccatgcttgaccgcgagggaaaagtggtaaaggaagaaaaggaaatcaccgtccccgcctttaaggttataaccgtctttgatatttcgcagaccgagggcaaggagtttcccgacctttccgttaaaccgctgcttgccgatgtggagcagtacgaggattttttcgccgcccttgaaaaagcgtcccccgtcccgattgcatttgagcagatcacaaacggcgcaaatgggtatttcagtttgaccgacaagcgtattgcaatcaaagagggcgtgagtgaattacaggcggtaaagaccgccattcacgaaatcgcccatgcgaagctgcacgacgtagacttaaacgccccgccggagcagcaaaaccgcgttgaccgccatacctgcgaggtagaagcggaaagcgtcgcttatacggtttgccagcatttcggccttgatacttccgattactctttcggctatgtggctggttggagcagcggcaaggaaatgaccgagttaaaagcgtcccttgaaacaatacagaccaccgcaaaggaactcattaccgagattgaggggcattttaccgagttgcagcagcagcggcaagccgagcaggagcagggcgataccttttccatttatcagttaaagcgcggggacgaaacaagggacttgcgctttgagccttatgaccgtctgcaagcggctggacttaccattgaccgggtaaattatgaactcgtctatactgcaccgcttacaaaggatatgacgctgggcgacatttgggaaaggtttaatatcgaccaccccgccgactttaaggggcatagcctttccgtttccgacattgttgtgcttcatcagaacgacgaggacaccgcccactatgtagacagtatcggttttcagcaagtgccggagtttttgcaggagcagcagacccccgtatttgacaagctgccgcccgaacagcagcaagccttgtccgacaccgtacaagacactttgcaaatgctggttgacgcagacaagcggatttatggcgacgttacgggcaagacccttgaagcaatcgcggcgcaaggatattcctacaaggacgggcagcttgaaaagcagcagccggaagcgacccccgacagccttttgacgggtgaaaccgttagaacgccgaggggcaattttcatattaccgatatgagccgtgaacagatcgaagcggcgggatttggttttcaccatgcgtcggaggacgggaagtatctcattatggggaatggcacacaggcttatgccatagccgccgagcagccgcagcgggataatcccttaaagcacgtcgaggacaccatagagcagaacgacaacaattttgacgggcttatcaacaatacgccgcaaacgcccaccgttgcagattttgagcagcgggcaaaggcgggggaagcgatttccgttaccgaccttgcaaaagcggtaaaagccgagaaacgggaacagccgcagaaaaaaccgtccattttgaagaagctggacgaatacaagaaacaggcggcgcagcagccgaaagataaacagaaagagcataaaaaggatttggaggtttga

SEQ ID NO: 316636 - DNA, 429 bp, Proteus mirabilis
atgacaagtcataaagcactggaaggtgtcaccgtagttgaattggcgacctttatcgcagtacctgcagcggggcgtattttagctgatatgggtgcgaacgtaattaaaatcgaatctccaagtggcgataacttacgctatacagcaccaacagaaggccgtccattagatcaacatgaaaacaccagttttgatttagaaaatgcgaataaacgtgggattgtgttaaatacgaaaacagaagcagggaaaaaaatcctgtttgaactattagaaaaggcggacattttcttaactaactggcgtcccggcgcaagagagcgtgcaggtttagattatgaaacattaaaacaacgttttccaaaattagtgtacgccagtgtgacggggtatggcgatgaaggtccagataataatgaggtgtga

SEQ ID NO: 316637 - DNA, 945 bp, Proteus mirabilis
atggcagttttcagagtggagcgaaatacgggatataccgttatgagcaaccaccacttgcgaaacaaggaattgtccttaaaggcaaagggcttgttgtcgcaaatgctttcgctgcccgaagattgggattatacccttgcgggcttatcccatatcaaccgggagaagatcgacgcaatccgcgaagcggtaaaggaactcgaaaaagccggatatatcgtgcgcagccgggagcgcgacgaaaagggacgcttgcggggcgcagattacgtcatatacgagcagccgcagccgcgagagccggaagcagctaccagcggcggacagccgcctatattggatttacctacattggaaaatccaacattggataatccaacgttggaaaaacctacgcaggaaaaacctacgttggaaaatccaacgcaattaaataaagatatattaagtaaagaacaatcaattactgatttatcaagtaccgattccattcctttccattccctaaaccccttgccctttgcgcatggcgaagcggctacgccgccggaaaggaaaagaacggaagcgaaaagcaatagcgcagtagagatttacagggagattatcaaggacaatatcgaatacgaccatctcattcaaaactgcaaaattgacaaagaccgtttggacgagattgttgaccttatgctggaaaccgtctgcacagcccgaaagacaatccgtattgccggggacgactaccccgccgaattggtgaaatccaagtttttgaagctgaacagcagccatattgagtttgttttggattgcatgagggagaacacaaccaaagtgcgcaacatcaagcagtatctaaaagcggtgctgttcaacgcgccgagtaccattgacagctactataccgcccttgtcaatcacgacttatacggcggcgaatga

SEQ ID NO: 316638 - DNA, 474 bp, Proteus mirabilis
ttgcaggaggaagtaacccaaaaaacgattgccctatacgtcaaagtgggaaaaggcgcggcgcggcttaccgaacaggcgttacagaaagcaatccaaaagtttttggagcagaaaagcaaacccgcgcatgggaaacagaccatgcggcagcttatgaagcagaacgcgggtgtttccaacatcgagatcaccgacagcaatattaaagcctttgagagtacggcgaagaaatacaacatagatttttcgctaaaaaaggttaagggcgagcagacccgttaccttgtgtttttcaaaggccgggacgcggacgttatgaccgcagcgtttcaagagttttccgcaaagaagctgaaccgggagaaaaagccctctatccgcaaagcccttgccgctgcaaaggacaaggcgaagcagcttaacgccgcccgcgacaaggtaaagaaaatggacagggggcgcgagatatga

SEQ ID NO: 316639 - DNA, 1782 bp, Proteus mirabilis
atgaagcagatcaactacaaaaagctgatacttccgaatatcccctatgtgttctttgtctatctctttgataaagtcggacaggcggtgcggcttgcccccggcgcggatatttctgcaaagatactgaatatcacacaaggattttccgcagcctttgaaaacgccttgccgagcgtttacccgttggatttgcttgtcggcattgtcggtgcggtgattatccgcttgatagtctatgtcaaagggaaaaacgcgaagaaataccgcaagggcgcggagtacggctctgcccgatggggaaacgccgaagatataaagccctacatagacccggatttccaaaacaacatcattttgacgcagacggaacggcttaccatgaacagccgcccgaagcagccgaagtacgcgagaaataagaacgtcgtcgtgatcggcggcagcggcagcggaaaaacaagattttttgtcaaacctaatctaatgcagcttcattcctcttacgtcttaaccgacccgaaaggtacggttttgattgagtgcgggaagctgctgcaacgggcgggctaccgcattaaggtactgaatacgattaacttcaaaaaatctatgcactacaacccctttgtgtatatccgcagcgagaaagatattttgaagctggtaaatacgttgatagcgaataccaaaggtgagggagaaaaaagcgcggaggatttttgggtaaaggcagaacggcttttgtattgcgcgttggtgggctacatctggtacgaagcccccgccgaggaaatgaactttattaccctgttggaacttatcaacgccagcgaagcccgcgaggacgacgaggaatatcaaagccccgtcgatttgctgtttgccgacttggaagaacgcgaccccgaccatttcgcggtgaagcagtaccgaaaatataaattggcggcgggcaaaaccgcaaaatcaatcctcatttcttgcggtgcgaggctcgctccttttgatataaaggaattgcgcgatcttatgtcctacgacgaattagaacttgacacgttaggcgacagaaaaacagctttgtttttgattatgagcgatacggacagcacgtttaattttgttatcgctatgctgcaatcgcagttatttaatctcttgtgcgacaaggccgacgacgaatacggcggcaagctgccggttcatgttcgctgcctgttagacgagtttgcaaacattggacaaatcccgcagtttgaaaaattgattgccacaatccgcagccgggaaatctcggcttctatcattctgcaatcgcagagccagctaaaagccatttacaaggacgcggcagaaatcatacttgacaatgccgacagcaccttgtttttgggagggcgcgggaaaaatgcaaaggatatttcggagaacttgggacgtgaaacaatcgacagtttcaacacttccgaaaatcgcggcacgcaggtttctcatggcctcaattatcagaaattgggaaaggagttgatgacacaggacgaaatcgcagttatggacggaggaaaatgtattttgcagttgcgcggcgtgcgcccctttttcagcgataagtacgatataacgcagcacccgaactacaaatacctttccgacttcgacaagaaaaacgcttttgacgttgaacggtatatgtccacccgtccggcaatcgtaaagcccgacgaaccctttgacatatacgaaatagatttgtccgacgaggacgcagccgccgaataa

SEQ ID NO: 316640 - DNA, 216 bp, Proteus mirabilis
atggattttttcaacagcgcagttgacgtattgcagactttggtaatcgcgcttggcgcaggacttggcatttggggcggcattaacctcatggaggggtacggcaacgataaccccggcgcgaagtcgcagggcatgaaacagttgatggcgggcggcggcgttgcccttatcggccttacccttgtcccgctgctctccggcctgtttggataa

SEQ ID NO: 316641 - DNA, 864 bp, Proteus mirabilis
ttgatatggcagatgattgaagattggtttcgcggcattttgacagacggaatactctctaatctctccgggctgttcgacagcgtaaatacagaggttggagaaatcgcaacgcaagtcggcacaacccccgccgggtggaacgcgggcatattcaatatgatacgcagcctatcggaaaacgtcattgtgccgattgcgggcgttatcattacctttgtcatgtgctacgaactaatccagcttgtaattgagaaaaacaatctgcacgatctcgacacttggattttcttcaagtggattttcaaaacctttgttgcggtgctgctggtaacaaatacttggaacatcgtcatgggcgtatttgacattacacagagcgtcgtcaacgacagcgcgggcgttatcatatccgacacaagcatagatattgcaaccgttatcaccgatatagaagcaaagctggacgctatgagcgtcggcgggcttttggggctatggtttcaatcactctttgtggggcttaccatgaaagcgttgtctatctgtatcatgctggtggtgtacgggcgcatgattgaaatataccttgtaacgagtatcgcccctatccccgttgcgacaatggtaaatcgtgaatggggcggcatgggacagaactacttaaaatccttgcttgccctcggttttcaggcttttctaattcttgtgtgcgtcggtatttatgcggttttgatacagacaatcgcagcaaccgatgacatatccggcgcgatctggtcttgcatgggctataccgtcctcttgtgttttacgcttttcaaaacgggaagccttgcaaaatccgtattcagcgcgcattaa

SEQ ID NO: 316642 - DNA, 549 bp, Proteus mirabilis
atgaagaaatacaaaatcatttacgccgatcccccttggagatacgcgagaagcaaggtacagggcgcagcggaaaagcactatcccactatgagtattgaggaactttgcgctttacccgtcaaagaaattgcggataaggactgtattttattcctatgggcgacgttcccgcagcttaaagaagcgttgcagttaatcaaggcttggggatttacctataaatccgttgcctttgtatggttaaagcaaaatcggaaatcgcccacttggttttatggcttgggcttttggacgcgaggaaatgcggaaatctgcttgcttgctaccaaaggacacccgaagcgacaatcaaacaaggtacatcaatttattatttcccctgttgagcagcacagcaaaaagccggatataacgcgggaaaagatacttgcccttatgggcgacctaccgcgtattgaactgtttgcaaggcagcatacccctggttgggacgtatggggaaatgaaatcaaaagcgacatacggtttgccggaaaggaggtttga

SEQ ID NO: 316643 - DNA, 393 bp, Proteus mirabilis
atggcgtatgtaaccgtcccaaaggatttaaccaaaatcaagagcaaggtaatgttcaaccttaccaaaagacaattactctgtttcggcgcggcggtggctatcgggctaccgctattctttttgacaaaggacagcgcgggaacgacaacggcggctttgtgcatggtgcttgccatgctgcccatgttcctactcgctatgtacgagaagaacgggcaaccgctggaagtgattatacggcaatttgtggaagtgaagtttcttcgccccaaagagcgaccttatcagaccaacaatttttataccgcccttgcgcggcaggagcgattagataaggaggtacgggcgattgtcaaaggaaaagggaaagacccaaaacaaaaagcgtaa

SEQ ID NO: 316644 - DNA, 2397 bp, Proteus mirabilis
ttgtcaaaggaaaagggaaagacccaaaacaaaaagcgtaaacttacgcggcaggaaaagaaacagatcgacgcgcttatccggcagtcaaagggcgacgggaagccccatacggcgcaggacagcataccgtttgaacgaatgtataaggacgggatttgccgccttgcaaacgggcggtattccaagtgcattgagtttgaagatattaactatcagcttgcgcagccggacgacaagaccgccatttttgaagccctttgcgatatgtataactcttttgacgcttctatcagtgtgcagctttccttaatcagccgccatgcgaacaaggaggatttcaagagcagtatcacgattgccccacagaatgacgactttgacagtatcagagccgaatacaccgaaatgctgcaaacacagcttgaacgcggcaacaacgggcttatcaagacaaagtttctcacctttaccattgaagcaaaagatattaaatcggcgcgggcgcggcttgcccgtatcgaaacggacaccctcaaccattttaaggtgatcggcgcggcggcgcgggtattggacgggaagcagcggcttgaagtgctgcatgggcttttccacccggacggggaacgcttcaactttgcgtgggaatggctacccgtaagcggcctttccgtcaaagactttattgccccgtcctctttccgttttggcgacgggcgaatgtttcaaatgggcgggaagtttggcgcggtttcctttttgcagattgccgcgccggaactttcagaccgtatgcttgccgacttcatggaagcggaaaacgggattgtcgtcaatctgcacattcagagtatcgaccacaacgaagcgatcaagacgatcaagcggaaaatcaccgaccttgaccgtatgaaaatcgaggaacagaaaaaggcaatccgcagcggctacgatatggatataattccgtccgaccttgccacctacggcggcgaagcgaaaaaccttttgcgggatttgcagagccggaacgagcgaatgtttttgcttacgctgttagttttgaatgtggcagacacaaagcagaaattggacaacgacgtatttcaggccgcaagtatcgcacagaaatacaactgtatgctcacccgccttgactaccggcaggaacaggggcttatgtcctctatcccattgggcgaaaacctaatccaaatccagcggggcttgacgacttccagcaccgccattttcgtcccctttacggtacaagagctgttccaaagcggcgaagcgttgtattacggcttaaacgcattatcgaataacatgattttgtgcgacaggaaaaggctgaagaaccctaacggcttgatactcggcacacccggcagcggcaagagtttttcggcaaagcgcgagatcaccaacgcttttctcattaccgcagacgatattatcatttgcgacccggaagcggaatattacccccttgtggaacggctgaaagggcaggttatcaaggtttcgcagaacagcacgcagtacattaacccgatggatataaacctcaattacagcgagggcgacacgcccatagccttaaagagcgattttatcctttccttttgcgagttgattatgggcggcaaaaacgggctggaagcggttgaaaagactttgattgaccgcgccgttatcagcgtgtaccgcagctaccttgcagacccgaagccggagaatatgccgattttgggcgacctctacaatgaaatcaagaagcagccggaaaaggaagcgcagcgtatcgcgtcggcattggaactctatgtaaatggcagtttgaacgtgtttaaccaccaaacaaacgttgacattcacaaccgccttgtctgctttgatattaaagaactcggcacccagctacgaaaactcggtatgctcattgtccaagatcaagtttggaacagagttaccataaaccgcagcgaaggcaaggcgacgcggtactatatcgacgagtttcatttgctgctcaaagaggaacagaccgcagcgtacagcgttgagatttggaagcgttttagaaaatggggcggtattccgacaggtatcacccaaaacgtgaaagatttgttatcgtcccgcgaggtggagaacatttttgaaaacagcgattttgtgtatatgctcaaccaagcccagggcgacagggaaatccttgcaaagcagcttaacatttcgcagcagcaaatgacctatgtaacccattccgacgcgggcgaggggcttatcttctatggcaacgtgattttgccctttattgaccgtttcccgcaagatacggaactctatcgtgtaatgacgaccaaacccggcgaggtgtcggcatga

SEQ ID NO: 316645 - DNA, 957 bp, Proteus mirabilis
atgaggatagaaatggacaaaatctattgcggcgacagcttgcaggtgcttcaaaccttgccggaaaatgcagttgattgttgcgtaacgtccccaccctactatgccttgcgggactacggcgcagacgggcagatcggacgggaagcaacgccggaggaatatgtttcccgtattacggcggtattccatgaggtaaagcgggtgcttacgccggagggtacttgttggctgaatatcgcggacacttattgcggcacaggcagcaaagccgaccaccaagaccccaaataccccaaaggcaggaacgggcagcaagtggcgtttaaccaccgcgcccccggctgcaagcccaaagatttaattggtattccgtggcttgtagccctcgccttgcggggcgacggttggtatttgcgcagttctatcatttggcacaaaacaaaccccatgccggaaagcacgcgggacaggccgacccgctgctatgaatatgtgtttctgcttaccaagtcaaagaagtattattacgattggcaagcagtagccgagccgatagcccccacaacggcggggcggctgaaaagcggagttagcaaaggaaataagtataacgttactgttccggggcaaaaccaaccgcagaaaatcaaccgcccccgcgaaaagggcgcatacgccgacgagttgatttctcccgtccgcagccgccgcaacgtttggcagattaacaatgtcggctatcatggcgggcatttcgcagcgttcccgccgaaacttgcggaaacgtgcattttggcgggctgtcccatcggcgggattgtccttgacccctttttcggcagcggcacgacgggcatggtagcaaaacggcttaaccgccgctatatcggcattgagttaaaccccgactattgcgaacttgcaaaacagcggattggaggtgatgaagattga

SEQ ID NO: 316646 - DNA, 1971 bp, Proteus mirabilis
ttgagcaaggaactgaaagcccccgacaaggtaacgcaaaaaatgacccgcgacggtgcggttgcggaaaacctcacgacgggcgaaacgtccagtatcagcgaaaggccgcaggaagaaaactattcagcccccgcaggggtggcagcggaaaaggttgtgcagcatatcggcgcagagattgagcgacacgcagcaaaaggcgcggagaaaaaagcccttgacgcgacgcagcctaaaacccattcttcccgcttgcagttttccgaagcggaacgggcaacgccggaacttcaaaaagcgatcaagaaatcggataaggcggcagactgtttagacgcagcgcgggcggctatccccaagcagaccaaaatcaagaaagagcgcgtttttgacgaagcgaaaggcaaggcaaagacgcgcctttcctttgaaaagacggataagcccccaaacggcaagttgcggcataaccccttatcccgtccggcacaggagttaaacagtaccgtacatgggaaaatctacgaggtagagaaagaaaacgtcggtgtggaaagcgggcaccgggtagaacttgccggagagaaagcgggcggcatggcggcgcgggcagttaagggcggcatacgccgccataagctgaaaccctaccgggcagcggcggcagcggaaaaacaagcggtaaaggcaaacgcagattttctctatcaaaaggcgttgcacgataaccccgcgcttgcgcactccaaccccatttcccgtttttggcagaagcagcgcattaaaaagcagtatgcaaaaacgctgaaagcgggcggcaaagcgaaaaaaaccgctgaagccaccgcaaaggcggcgaagaaaaccgcgcaggaaaccaaacgggcgacgttctttgttgtccggcattggaaaggctgcttgattgtgggcgggattgcctttatcgtgctgctgcttttcggcgggctgtcctcttgctccctctttggcggcaacagcggcagcggcttgattgcgtcgtcctatctctccgaggacgcggatataacgggcgcggaaagcgcgtatgccgctatggaagccgagttacaagatatgctggacaatatcgaaagcgaataccccggctatgacgaataccgggtaaacgcggacgagatcgagcatgacccctatgtgctaatttctatcctttccgcgtggcatgagggcgtgtttacactcgatgaagtgcaaagcacccttgaaatgctctttgagaaacagtatatcttgacggtcgaggaagaagtacaggtacgctaccgcaccgaaacaaggacggacagcgagggcaacccctatacggttgaagtcccctataactattacattcttcatgtggatttggaaaacttcaacctctcccatgtccccgtttacatcatgggcgaagaacagctatccatgtacgctatgtatatgtcgtcgctgggaaacagacccgaccttttcccgcaatccggctatgtgtctaaatactatgaaaacccgcccgccgattatgaagtacccgccgcgctgctgggttccgatgaaaagtttgcgcggctcatggaggaagcagataaatacgtcggttttccctatgtgtggggcggcagcaccccggaaacctcttttgattgcagcggctttgtgagttatgtgttgacgaacagcggcctatacaatacgggcagacttggggcgcaagggctttacaacatctcaacccctgtttctaacccgcagccgggggatttggtgttctttacgggtacatacgacacccccggcgtttcccatgtggggatttatgtgggcgaggacggggacggaagccccgtcatgctgcattgtggcgaccctatccagtattcaaagctggacaccagctattggcaatcccacttttacgcctacgggcggttaaattacaattaa

SEQ ID NO: 316647 - DNA, 723 bp, Proteus mirabilis
atgaatattgtatcttttggcggcggcacgaatagtgccgccttacttattggcctatacaagcacaaaatcccgattgaccttatcacctttgccgatacgggcgcggaacacccgcatacctatcaatttatcgagataatcaatcaatggcttgcggaacacggtatgccgcagattaccgttgtgcagtatgttgaccgctacggcaaccgcctatctcttgaaaccgagtgcttgcgctctcatacgctcccgtcgattgcctacgggcataagcgttgttcgcagaaacacaaaatcgcaccgcaggaaaagttttgcaaccactatgcgccttgccgcgaagtatggcagcgcggcgagaaagtcaaccgctatatcggctatgacgcgggagaagtgaaacggtatgaacattcccgcaagtacaacgaagccgacaaaaaatatcataaccgctaccccctcattgaagaatggggctggaacagggacgattgtatccgggaaatcaaagcggcaggattgccgcagccgggtaaatcgtcctgtttcttttgtccgagcatgaagaaacaagagattttatatctcaaagaacactatcccgatctatttaaccgggcggcgactttggaagaaaacgctatgccctatcttaaaaccgttaagggattggggcgcagctattcatggaaagaacagtttggaaaggagtaa

SEQ ID NO: 316648 - DNA, 267 bp, Proteus mirabilis
atggcgaacacgaaacttgaccgtatcgaaagggatattgagaaaacgagggcaaaaatccttgaacagcaaaagaagctgaaagaccttgaagcgcagaaagtcgaggaagaaaacgcgcagatcgtgcaaatggtaaaggcggtacaccttgacgggacgcagcttgccgcgttcctctccgcttacgccagcggcgaaatcaccttgccgcagccggaagccacttaccccgccgaacaggaggacaacgacaatgaagaataa

SEQ ID NO: 316649 - DNA, 750 bp, Proteus mirabilis
atgaagaataaaaagataatccgaaagtttaccgtattgcttgccgcactggttatcatgtgcggcttttctgttaccgcttatgcgggcggtggcgatgaaagcgacgacacgcctacccccgtaaccgaggaaacccccgcgccggaaaccgagccggaagaaacgacgggcggctatgagccgcagccccttaccccggacgggaatatgtcccttgtggacgatataacgggtgaagcgtccggcgacaagcagtttatcaccgtcgttaccaaaagtggcaactatttttacatcatcattgaccgcgccgaggacggggaaaataccgtccatttccttaaccaagtggacgaagcggatttaaccgcccttatggaggacgggcagaccgaagcccccgtttgtagctgcaccgataaatgcgttgccggaagcgtcaacaccgcttgcccggtttgcagcgtcaacatgagcgagtgcgcgggtgtggaagccgagccggagccggaagaaaccgagcagccgccggaagaagaaaaaggcggcggcatgggtattctgcttgtcgtgctgcttgttgccgcagcgggcggcggcgcgttctactactttaagattttgaagcccaaaaaggacgcggcgaaaggcagcagcagccttgacgaccttgattttgacgaggacgacgaggaaacggaagtagtcgaaaccgaacagaccgagcaggaggacgataatctatga

SEQ ID NO: 316650 - DNA, 2076 bp, Proteus mirabilis
atgaaacttgtaattgcagaaaaaccgagcgtcggggcggcgattgccgccgttatgggcgcgaatgaaaagcgcagcggatattttgagggcggcggctaccttgtgtcgtggtgtatcgggcatttgattagccttgcagacgcggcgacctacaatgaacaattccgtaaatggaagtacgacgatcttcccattgtcccgcaggagtggcagtttattgttgccagcggcaaggagcagcagttttccattctcaaagaccttatgcaccgcagcgacgttaccgagattatcaatgcttgcgacagcgggcgcgagggggaactcattttccgctttgtctatgaacaggcgaattgcaaaaagcccttttcccgcctttggattagcagcatggaagcaagtgcaatccgcgagggcttttcaaatctcaaagacgggcgcggctatgacaacctctatcaatccgcgctttgcagagcaaaggccgattggctcattggcattaacgcgacccgccttttctctatcctctaccataaaacattgaatgtcggcagagtgcaaacgcccacccttgctatgctggtaaaccgcgactatgcaatcagcagctttaagaaagagaaatatcatgtcgtccggctggacgttggcggcgttgccgccctttccgaaaggcaggacgacgaagcggcggcgcggcagatgaaagcggcttgcgagaaatcgcaggccgtttgtacttcccttaaaaaagagaaaaagaccgcagccccgccgaaactgtttgacctcaccgccttgcagcgggaagcaaaccgtttgtatgggtttacggcgaaacagacccttgactatgcgcaagccctttatgaaaaacggcttttgacctatccccgcaccgacagcaaatatatcacttccgatatggagggcagcacaaaggaacttatcaccggcctttgcgctgctctcccctttatgcagggcgtgaagctgcaagccgaccttgcgaggatttgcgacaacagcaaagtaaccgaccatcacgccattttgccgacagcggagtttgtgaaaacgggcttttcttcccttgccgaaagtgagaaaaagctaatgacccttgtgtgcgcaaaactgctttgcgccgttgccgcgccctatgagtatgaagcggttacggcggttttcacttgcggcggctatacctttaccgcaaagggcaggacgacgctttgcgagggttggcgcgagattgaaagactatcccgcgccgcgtccggggaacaggacgaggacgcagagccggaagcggttttacccccgcttgccgaggggcagacctttgacaatccggcagcggagatctccgaacgttacacgcagcccccaaaggcatttaccgaagatacgttactttcggctatggagagtgcgggaaaggaggacacgccggaggacgcggagcgcaaagggttaggcaccaccgcgacgcgggcgggtatcattgaaaaactcattagcgcgggctttgccgagcgcaagggcaaaaagctaatccccacaaaggacgggtataaccttgtcgctattctgcccgacagccttacgtccccgcagcttacggcagaatgggaaacgcgccttaccgggattgcaaagggcagcgacagccccgccgacttcatgcgcgggattgaggaaatgacagcggggcttgtcaagacctattccgcgatttccgaggataaagcgaagctgtttaccccgcagcgggaagcaatcggcacttgcccccgttgcggcgcggcggtttacgagggcaagaaaaacttttactgctccgacagggcttgcagctttgtgatgtggaagaatgaccgcttttttgagcagcgcaaaaaggctttcacaaaggcgattgccgccgcccttttgaaagacggaaaggtaaaaatcaaaggtatgtactcgaccaagacgggaaagacctttgacggagttgtgctgcttgccgacacaggcggcaagtatgtaaacttccgcgtcgagcagaaccgaaaatga

SEQ ID NO: 316651 - DNA, 1857 bp, Proteus mirabilis
atgtctacaattccaacacaaaatccagttccaagtgaagcaccgcgcgacctgaaatttaactcaggtaaaattgacgagttcgttacgtcaatgaaaaacaagtatatcgatagattcgggcaagagcattttacaatcgaagggttgcgctggatcgctcagcaagcaatatctcaatttggatatatcaccttagactcgttccagaaaggtgcggaaataacactacctaatcaagttttacgtgatgaagtaacgggggaatattaccgctgggatggtgagttgccaaaaatcgttcaaatagattcaacacctgataactctggtggtattggtgcagggaaatggcttagtgttggtgatacatcccttcgtaatgaattgaaaaagccaactggaagtgaccttgtaggatataataatgggacgttaaccaaatatattgaagaaaataaccgacatacagctaaaacaatcatcaacgtcagtgcttttggtaacacaggaacagagcagaacgggagcgatgaggcctggaataatgcattttcttatgctctcagcattgcaccaaaatggaaaaataattatcctgccccccaggagtggtatgacttttcaggattcgagtttgtagccgatgggaacatttaccctaaaacaagtataggtcttcgttgcacatacggcggtactattaacctgtctgtcgtcgcgccagacgaccacgtaggagattacctaatagacatgtctgtagaccgtggagtaacacctaacaggacaccattgtatacacggttcatgggggctgtgcattgcaggtataaatgcagtggtatgaacctaggtgggagtgcatcaaccactacagaacatatgagagtagaccagtttcttgtttacggaattgatacggattggtctgatagtcagacatctggtggtcatacgatagggataggaacaatggttgagcaacggtcatggtccgctggaggggatgcggattttccatctgttgttactactggtactggtatttatatacgctcacacgataacaggattgtgggtgctacagtatcttactgcaaattacgatgtgttcgtattaagggtcagagtaatagattggtggccggcacgcatctttattcagctggtaagcaagcgcttttacatgaagcaaaatctggtaatacgctaatagattcttgctggttggatagctcaagactgcaacttgatggcggatatatcaccatctccaacaacctgatttatcttactcagggtacagattctgaaactggcattgttaccggagacggtgctagtaacattctaataaagaataacagcttcttaggttatgtaggtggtactccggtttactttggtaaaggcccattaggggataaaactattgtttgttatggtaatagatacttgccagggatgaagaatgccgatgttattacaagcttggtaccaggggtagttggtgagagcactgcaggtatggtatcacttgatccaagttcagggttcgctattacctatgatggcgtttatgtgaatttcacagcaacgatccgttggtcttctttcacaggaggaactggagctattggtgtttatggtttgccctttgtagctgatagaattacaccaatggatattgtacagttcacaaataatgatttatttaaaggggtttcccccataaaacatactagtggaactagtttaagatttgtaaaacaggatggaaccaatgtcatggccaatgatactggcgcatcttcaggatatctgtgtatcagtggtagttatcgtccggcataa

SEQ ID NO: 316652 - DNA, 234 bp, Proteus mirabilis
atgagtaaaaacagcgaagccccaactgcggtaacagtcgaggcttctaatttgccagaaactaacgaggtaactagcatgacaagtatatcaactattaatgtgccattccatggtgcaaatttatgtatcgtaaaccgtgacggtaatccttacgttcctatgaagcctattattgaagatatgggattggattgggcttcacagtttaccaaactaaaaaaaacgctttag

SEQ ID NO: 316653 - DNA, 885 bp, Proteus mirabilis; identical to SEQ ID NO: 304298

SEQ ID NO: 316654 - DNA, 705 bp, Proteus mirabilis; identical to SEQ ID NO: 14478

SEQ ID NO: 316655 - DNA, 612 bp, Proteus mirabilis; identical to SEQ ID NO: 311305

SEQ ID NO: 316656 - DNA, 837 bp, Proteus mirabilis; identical to SEQ ID NO: 315214

SEQ ID NO: 316657 - DNA, 459 bp, Proteus mirabilis
ttgtcactaagaacaaacaatacatataatcaatatctatctccagtaaaaaatgatatccatcaacaaaagaaatggataaagcagtataaaaaaagggaaaaaaataatcaggaattttattttataatagaaaaactagatagtacaccttgtggaactgtaagaatatatgatattcaagataattccttttcgtgggggagttggatattaaatgaaaataaaacccgaacagctgccattgaaagtgcattattagtctatatttttggttttgataaaaaactttttcaccattgtcattttgaggttatgaaagaaaataaaaaagttatttcttttcatgaaaagtttaatgcaaaaagaataggtgaagatgaacttcattatttttatgaaataaaaccagaagatatcatagatataaaaaataaatttattaactttatagaatag

SEQ ID NO: 316658 - DNA, 576 bp, Proteus mirabilis
atgaaagttacaagtgccgaaaaacatgcattgttattaccagataatcgaacgttaacttggtatgaatctggcccatcagatggtcaaccggtattattctgcacaggtgcagggatgagtgggctattaagtatggatgctgagctgttaactaagttaaatattcgacttattacaccgactcgtcctggtttaggtgaatcaacctttgatcctaaaaagacattaaaatcgttttctagcgatgtattattcttattagcatatcttaatattaagaatatcagtgtgataagattctctcaaggtgctgtttttgcgatggccatttgttactatggtaaagtggataagctggcaattgttgctggtcaagatcaactagattatcctgaaataaaaaaactgttgtccagtgatgtggttaatatgcaacaacaggcattattcgatcctgatggattaaagatctggatcattgaaaatatcaccgctgactggttaatggattttattttgaattggctctttatcaagaaaataaattttttcctatttatcaagcttgtatga

SEQ ID NO: 316659 - DNA, 438 bp, Proteus mirabilis; identical to SEQ ID NO: 296602

SEQ ID NO: 316660 - DNA, 408 bp, Proteus mirabilis
  misc_feature (298)..(307): n is a, c, g, or t
atggaaaataaacatataaaatcttatcgaaaactattttcacatacgccttatatgcgaaaaaagatcgacctacttgccgatgaaaattatagaaacaaggagtacaatttttattttatatcatcagcatccttatcaataatttcagcaactttttttataggaatgctaagttttaattttaaatctgctggagtaattgagttaatagaaatatatttatcaatattttcattttccatgtctctttcattaaattcattttttcttttctcattatttatatcctgtctcnnnnnnnnnngttttttaattgcctttttctcattgataagtttttttgttatgaattattgttatgataaattaacaaagaaggcaaaaagaagagctaatgaaatttaa

SEQ ID NO: 316661 - DNA, 327 bp, Proteus mirabilis; identical to SEQ ID NO: 294127

SEQ ID NO: 316662 - DNA, 573 bp, Proteus mirabilis; identical to SEQ ID NO: 308751

SEQ ID NO: 316663 - DNA, 1242 bp, Proteus mirabilis; identical to SEQ ID NO: 302466

SEQ ID NO: 316664 - DNA, 417 bp, Proteus mirabilis
atgtctgtagtcgttggtgttggagtgatcatcgtcaatgaaaaaggtgaagtattattaggtaaacgctgtggtaaacacgccccttattggtcaatttttggtggccatgtcgatccgggggaaacctttgagcaatgtgctattcgtgaaattgaagaagagattggcattaccatccctactcctgaagtgattgggatcagcaacaatctacaaacttatcaattagaaggtaaacataccgtatctatctgtatgatagcgcaatatcaaggtggcgagcctaagttaatggagccagataaatgttctgaactacgctggtgctcacctgatgatttacctgaaccccattttgaagcgagccgtaattctattgctttatggaaaagtaaacgtttctatcaaccttaa

SEQ ID NO: 316665 - DNA, 846 bp, Proteus mirabilis
atgaaatttgttggcgcacatgtcagtgctgcaggtggtgttgatcaggctgtattacgagctcatgagatcaaagcaacggcatttgctctttttactaaaaatcagcgccaatggaaagcagccccgttatcaactgaatcgattgataaatttaaaaaaaattgtggaatctatggctatggtccagaacaaattttaccacacgacagctatctgattaatttagggcatccagaagaagaagcccttgaaaaatcaagagccgcttttctcgatgagatgcaacgctgtgagcaattaggcattgaattacttaattttcacccaggtagccatttaaaaaaaatcgatgttgataaatgtctgcaacgcatcgctgaatcaattaatatcaccttagataaaacccaaaatgtgaccgcagtgattgaaaataccgctggacaaggcactaacttaggctatcgttttgaacatctcgccgccattatcgatggtgtagaagataaatctcgagtgggcgtttgtattgatacttgtcacacttttgctgcaggttatgatctacgtaccgttgaagactgtgaaaagacctttgctgaatttgataatattgtcggctttcaatatttaaaagccatgcacttaaatgatgctaaaagcgaattggctagtcgtgtcgatcgccatcatagtttaggtcaaggcaatattggcaaagtaccctttacttatattatgcaagatacccgttttgatgggatcccacttatcttagaaacaattaatcctgatatttggccagaagaaatagcttggttaaaatcacaacaaactcaataa

SEQ ID NO: 316666 - DNA, 1086 bp, Proteus mirabilis
atgtcagagcaaagtcaaacaaccacattggctaaaaaatgttttattcctgtttatcgctggctccccggcttgctgctaacaggtatattaaccgccctcgctatttacgtaggtgatattccatggttttccagtatggggttaggtgctcttacactggctatcttatttggcattattgcgggtaatacggtttatcccatcgctaaaccttatagtgatgaaggcgttaagtttgccaaacactatttactacgtgcggggatcatcctatacggttttagactcacttttcagcaaattgcagatgtaggtgcaacaggattaattattgacgctattatgttgacctcaacttttctcattgcaatgtgggtggggaaaaaatattttggtcttgatgatcaaaccgtcatgttaattggtgcgggtagtagtatttgtggtgcggctgcggtcatggcaacagagcctgttgtaaaagctcaggcgagccaagttgcggtggctgtatccactgtcgtaatttttggaactatcggtattttcctctacccatggtttttccatcttaacgcttttgctggttggttaccttttagtgaagaaacttttggtatcttcgctggttcaaccatacatgaagtcgctcaagttgttgcggtgggtcattcaattagtccagatgcagaaaatgcagccgtaattagtaaaatgatccgcgtgatgatgctggcacctttcttaattatcctttctacttatattagtaaaaagggccgtaaaacagtaggtgcgacaacagaaaaaagtccgataactattccttggtttgctgtgttctttatcttaatggctggttttaattcatttaatttaattcctgccgctattgtgagctatatcgttactattgatactattttattggcaatggcgatggtagcactaggtttaacaacgcatattagtgcgatacgtcaagcgggtgtaaaaccactactgctagctttatttctctttttctggctaacgttaggtggtgctgctattaatatctttatccaatctgtgttgatgtga

SEQ ID NO: 316667 - DNA, 891 bp, Proteus mirabilis; identical to SEQ ID NO: 299137

SEQ ID NO: 316668 - DNA, 1488 bp, Proteus mirabilis
atgtcagaacaacaaacagataccgcaaaatcgggtgcggtacgcactttgcgtcgagaattaaaggcgcgacatttagcgatgatcgctattggtggttcaattggtacagggctttttgtcgcatcaggtgcaactgttgctcaagcagggccagggggcgcattactctcttacgcattaataggacttatggtctatttccttatgaccagccttggagagttagcggcatttatgcctgtttccggatctttttcaacctatggctctaaatatgttgatgaaggatttggtttcgcattaggttggaactactggtacaactgggctgtgacgattgcagttgacttagtcgccgcgcagctcgtgatgttgtattggttccctgatgtggatggttggatttggagtgcgttatttttagccgttattttcttgcttaactatatttctgtaaagggatttggtgaagcggaatattggttttcattaattaaagtatcgaccgtgattatttttattgcggtgggtattgcgatgatcaccggtattatgaaaggtgctgaaaatgcaggttggcacaactgggaaatcggcgatgcgccttttgctggtggttttgccgccatgataggggtagcgatgattgttgggttctctttccaaggaactgaacttatcggtatcgcagcaggggagtcgaaagatcctgcgaaaaatattcctaaagcagtacgtaaagttttttggcgtattttactattttatatcctagctatcttaattatcagtttaatcattccttatactgatcctaacttgctacgtaatgatgtgggtgacatcagtgtgagtccgtttacactggtatttaaaaatgcagggttactttcagctgccgctatcatgaacgcagttattttaacggcggtgctttcggcagggaactccggtatgtatgcatctacgcgtatgttatttaccttagcaagagaaggtaaagcgccgaaattttttggtaaattatccaaaaacggtgttccacgtaatgcactttatgcaacaacagtggttgcgggtttatgctttttaagctcaatgtatggtaaccaaacggtttatttatggttattaaatacatcaggtatgacaggatttattgcttggttaggtattgcaatcagtcattaccgttttcgtcggggttatgtagcacaaggtcgtgatctgaatgaattgccatatcgttcaggcttcttccctgtaggacctatttttgcctttattctctgtttaattattacattaggtcaaaactatcaggcatttttagaagatactattgactggtatggtgttgtggcaacctatattgggatcccattattcctgctgatttggtttacctataaaatagtgaagaaaacacgttttattcgctacagtgaaatgcagtttcctgagcatattgaaaacaaaaaatag

SEQ ID NO: 316669 - DNA, 2007 bp, Proteus mirabilis
atggtagtgttaaagaaaaataaaattgcgcttggcgttgttgctgctcttgcatcaagttttgtgatgacagcttccgcagaagatcctgaaaggttactggtgacaaccgcttcgggatttaaacagactgttgaagatgctccagcttctgtttcagttgtaactcgtgaacaattagaaacaaaatcatatcgtgatgtaactgatgcgctaaaagatgttccgggggtgctagtgacagggggcggtagcagctctgatattagtattcgtggtatggatcctaagtataccatgatcttagtcgatggtaagcgtgttgcatctcgtgaaacgcgtcctaatagtgataactcaggtattgaacaaggctggttaccgcctttacccgcgattgagcgtattgaggtagtacgaggcccaatgtcttctttatatggctctgatgccatgggaggcgttatcaatattattacgcgtaaagcgcaaaaagaatggaactttagtttacgtggtgacacaacgttgactgagcgtaaaaatgaagggaatacaggacaaggtagtttctatgctgcaggtccattgattgataatgtgttaggtctaaagctgcaagggcaatattctcaccgcggtgaagatagacgtgttgatggctataaccgtcagatcacggcaagtggtggcggtacattaagctggacaccagatgagaaaaataccgttgaatttgaatttaaaaaagataatcaacatcgtgattcacgtgttggctattcaaaatcagctgaacttgttaaaggaaaggcaccacaaagtagctttactgattatgagttaacgcattatgccttaacccatgatggtatttatgattttggtactatgaatacctatgttcagcgcgatgaaagccgcaatccatcacgtaaaatggattatgatgatacaactgttcgtaaccaaactgtctttatgtttggtgatcatatgttaagtgtcggcggtcaatatcgctatgaagagctgaaagatgaaggcaataagcttaaaggtaataataagctagatcgctatagttgggcgctgtttgctgaagatgagtggacattgacaaacgacttcgctttaaccgccggtttacggatggataaagatgaaaactttggtactcactggacaccgcgagtttatggtgtttggcatttagctgatgaatggacattaaaaggtggggtatctactggatatcgttcaccggatttacgtcaagcgacagctacttggggacaagggactggcggtggtcgttatgatgcagttatttacggtaatcctgacttaaaaccagaaaaatcggtgacagaggaaattggtattatttgggataatcgtgataacttaacggcaagtttgacgatttataatactgattttaaagataaaataacagaagttcgtcgttgcgatagtcgttcagacaaagcaccgggtatgcgcgattgtacattagctgatggtgttggtaatagtggcgacccttatgattttgtaagtgatagaactaacgttgataaagccaatatgcgcggtgttgaagttactgctaactggattatttctccagaatggaatttagcagcaaactacacgttcacagatacggaacaaaagagtggcgatttcaaaggtaagcctctgaataagcaaccgcgccatatggcaaacgcgaccttaaattgggaaaccacccctgaaatggaaacttgggcacgcattaatttccgtggtaagacatcagactatttatcacgtacttcaatgtctaagagcactccttcatatgcctttgttgatgtaggtactagctatagtctaacgaagcaactaaatctgatcggtggcgtctataatgtttttgatcgtcgcatcgaaagagataattacggttcaaccttagaaggccgtcgttataacatcggattaaactacaacttctag

SEQ ID NO: 316670 - DNA, 1755 bp, Proteus mirabilis
atgactattacagaaacatttgataaccgaaaaaaagcaatgcacctgtattttgccggttaccgcattgctcgcatagcggaatcgctaggcgaaaaggcgtccactattcacagttggaaacgccgcgataattgggatgaaatcagccctaccgaacgcgcagagttaaccgttgaggcgcgttattgcaatctaattttaaaagagagcaaagaaggcaaagattttaaagaaatcgacttgttagggcgtcaactcgaacgcatggcgcggatcagaaaatatcaaaacggcggtaatgaaacggaccttaatcctaaaattgctaaccgcaacaaaggcgaacgccgtcagccagagaaaaacttcttttcagaagaacaaattgaaaaactggaagatatctttcgcaatacgttgtttgaatatcaaaaggcgtggtatcgcgccggtcatcaccgtatccgcaatattttaaaatcccgtcaaatcggcgcaacattctactttgcgcgagaagcctttattgatgccctgaccaccggacgtaatcaggttttcctctccgccagtaaagcgcaagcctatatgttccgtgaatacattatcaaaatggcattggaggttgatgttgaattaaaaggcgacccattgatgttaagcaacggtgcaacgctctatttccttggcactaatgcacgcacagcacaaagttatcacggtaatttatatctggatgaaaccttttggatcccgaaatttcaggagttacgcaaagtgacttcgggtatggcgatacaaaaacattggcgacaaacctacttttcaacaccgtcaaccatgagccatgaagcgtaccccttttggtcaggcaagctgtataaccgcgggcgtaaaaaagaagacagagttgatattgatatctcacatgaagccttagtcaatggacgtttatgtgaagatgggcaatggcgacaaatcgtcaatattgaagatgcgttgcggggcggttgtgatttattcgatttagagcaactcaaaaaagagtatagcccagacgaatataacaacctgttaatgtgtcactttatggatgatatcgaatccctattcaactttaacatgatgcaaaattgcatggtggacagttgggaagtgtgggatgacattcaaccattagcgctacgcccttacggttatgatccggtttgggtaggttatgacccaagcaaaggtggtgaaaatggtgatagtgccggttgtgtggttatcgcgccgcctaaagtacctggagggaaattccgcatattagaacgtcatcaatggcgtggtatggattttcgcgcacaagctgacgccattaaaaaaatcaccgaacgtttctatgtggaatatatgggtattgataccaccggcttagggcatggggtttatcaaaatgtcatccagttctttcctgctgcgagggagtttatttataacccgaatgtcaaaaatgctttagtgattaaagcctatgacgtgattagtcacgggcgcttagagttcgatgcgcagtgcgttgatatcattcaatcctttacatccattcgtcgtaccaccaccggaagcggtaaccgcccaacctatgaggcctcgcgcagtgaagaaagcggacacgctgaccttgcatgggcaacgatgcatgcccttttcaacgaaccattaaccggcaccaccgagaacagtaataatattgtggagatttattaa

SEQ ID NO: 316671 - DNA, 456 bp, Proteus mirabilis
atggattatgtttctgccaaccctgtaccacaaaaagacgaaaccattaaaaacaatggttttttccctgatattcaaactcgtgattttcaattgcaaactcgcgtcgatggtacggtgacaccggaacggctgaaaagcacgttattgaacgccatgattgaagtgaatcgtgaattgtatcagtggcgtattggtcaagctgcgaaaacattaaaagacgtgcccgctgaacagattaacggtgaaagtgaactgatgattttatatcagcgtgcggtgttctgttttgctaaagccagtttaatcgaacgctatcgcgatattgatactaccgcacaaggtaataaaaaagccgacaccatgacgccggttattgatgaagtgtggcgtgatggcaagtgggcgttacaacgtatcaaaggggaaacccataacacggtggagcttatctaa

SEQ ID NO: 316672 - DNA, 207 bp, Proteus mirabilis
atgcggatttacacccagcaaggggataccgtcgatgatatttgttggcgttactttggtcagtcatccggcatgattgaacaagtattagaagccaatccggggctggttgaattaggggcaatattacccaccggcaccgcgattgagttaccggatacgcctcaacaacacagcaccacgccgattttacaactttgggattaa

SEQ ID NO: 316673 - DNA, 405 bp, Proteus mirabilis
gtgaataaatttatctttagccagcgcagtaaaaataatcttagtggcgttaatccgctattagtgaaaattgcttatcgtgcgttagacatttctactgcggactttgcagtgattgaaggtgttcgcacacttaaaaagcaaaaagaaaatgtgaaaaaaggcgtttcaaaaacattagacagccgtcatttaacaggcgatgccattgatattttgccttctgcgattaaaccagggatggaatggcacccgcatttttttgagccggttttaatggcatttaagcaagcggcagatgaagaaggggtaacattacgttttggtaaaaactggaaaagtgatcccagtttacccgttgaaacccgcttttctgattatcctcatattgagatcccacgatga

SEQ ID NO: 316674 - DNA, 438 bp, Proteus mirabilis
atgaaaaagcctgcaaacctacgtgataccttaattaaaaaggtggcctatttaggggataaccccgataggctctacacctttattgacggcggggcgattgtggcaaccggtgcccgtagtcaatcttatgagtatcaatacaatctcaatattattattgatgattatcccggtgaccaagatgtgttaatggcggtgatcattggttggattgaacagcatcaacctgatattttcctgaatcccgataaacgccaaagtcattttacctttgatgcctttattgatagtcaccagaccgccagtattagcattgatttaaagttgactgagcgtgtcctcgttaatgtgcaagcggataaattggttgttggtgccattgaagagccggttgatccgtttgaaagttgggagagtgtggttcatgaacgctga

SEQ ID NO: 316675 - DNA, 636 bp, Proteus mirabilis; identical to SEQ ID NO: 297411

SEQ ID NO: 316676 - DNA, 429 bp, Proteus mirabilis
  misc_feature (409)..(418): n is a, c, g, or t
ttgagtcaaaattatcaatcttactccctaggtgttgggaaaaatttaggctcatttggtgctgtttctgttgatgttacacaggctaagtcaacttttaatgatggaaggaagcaacaaggtcagtcttatcggtttagatataataagaatttgaacaatataggaaccaatattgctttagcaggttatcgctattcaacgagtggcttttatagtttatctgaagtgtttgatagttttcgtcgtactcattatagccctgaaattgagcaacgccgtcatcgtgcggagataacacttaatcaaaatttaggtgataaatatggctctttagctatcggatatatacaagaggattattggaacagcaaaagcaaaaaacaatcagcaacacttggttataacnnnnnnnnnnagacaaaatga

SEQ ID NO: 316677 - DNA, 441 bp, Proteus mirabilis
  misc_feature (22)..(31): n is a, c, g, or t
atggtgatgtggttgccattcnnnnnnnnnnctaatgaagcaagtatgaaagggcgagctttattattacttgcagaaaatcacctcatttctttaaaagagggagttggttttttaccttccgttgaagacattattgataatcctaatgccttgatatttcatgaagttgaaactcccatgttagttgaagcccttgatgatcctgaggttacgatggcggttatcaacaataatttttcctctcaaattggcttacttgctacccgtgacggtttaattatggagaataaacattcgccttatgccaatgttgttgttactcgtatagataatatgaatgatgaaaaaataaagaaattaattactgttttacattcaagacaagtcgaattaaaggtgcaagaaatgtataaaggggacgcggttaaggcgtggtag

SEQ ID NO: 316678 - DNA, 498 bp, Proteus mirabilis
gtgctctatggtgatgatggagatgatatgcttattgattattatggtgctaatatgttggatggtggtaagggtaatgatcggatctgtgtagcctcaatggatagagggctccctggcagaaatatcattcaagggggagaaggtgatgatgaaatatatttgggcacgggaactcatcgtataacaggtggacaaggaaatgatacctttaattttttctgctatgagggcgttgaaagcaatagtttcatttgggattttgaaaaaaacaaggataaaataacgttgatcactagggattatagaaaaatagatatatcaaaaatgaaaaaagttgataaattatcaggagataaaaatgaattttcattaaatcataacaaaccagccaacaaaaccatcatagacgtttcaacatcttctaacgatgataagtccattgtacatatagagattgtcggtatatttaaccatgatgaactctttgcagtataa

SEQ ID NO: 316679 - DNA, 471 bp, Proteus mirabilis
atgcttattgattattatggtgctaatatgttggatggtggtaagggtaatgatcggatctgtgtagcctcaacagatagagggcttccaggtagaaatatcattctagggggagaaggtgatgatgaaatatatttgggcacaggaactcatcgtataacaggtggacaaggaaatgatacctttaattttttctgctatgagggcgttgaaagcaatagttcaatttgggattttgaaaaaaacaaggataaaataacgttgatcactagagattatagaaaaatagatatatcaaaaatgaaaaaagttgataagttatcaggaagtaaaaatgaattttcattaaatcataacaaaccagccaataagaccatcatagacgtttcaacatcttctaacgatgataagtccattgtacatatagagattgtcggtatatttaaccatgatgaactctttgcagtataa

SEQ ID NO: 316680 - DNA, 471 bp, Proteus mirabilis; identical to SEQ ID NO: 297226

SEQ ID NO: 316681 - DNA, 177 bp, Proteus mirabilis; identical to SEQ ID NO: 300067

SEQ ID NO: 316682 - DNA, 669 bp, Proteus mirabilis; identical to SEQ ID NO: 300088

SEQ ID NO: 316683 - DNA, 315 bp, Proteus mirabilis; identical to SEQ ID NO: 300087

SEQ ID NO: 316684 - DNA, 432 bp, Proteus mirabilis; identical to SEQ ID NO: 300086

SEQ ID NO: 316685 - DNA, 504 bp, Proteus mirabilis
atgaaaaggaacgtactgcttattattgtggcgggtgtgatgggcttactactgatatttaagtttgatgctttgctcactgagaatagccagcttaagggtgataatctcgcccttaagaaaagtgttatcagtcatcaagacgccattgaacattatcaggaagaacttgcccgcttatcagaattggataaacaacacacaaaggcgttaaccgatgcaaaaaatgatattagccggcttaatgatgagttgcgcaataatactaaacgggtgtacatcaaagccgattgccccaactccgataatcgcaccaccgtcaccgccggcctgggtaatgcaacccccgcacgacttaccgaaacagctcaacaagattatttacgtctcctcgaaatgatggcggagaataaggcgcaaacggaatatttgattgattatacaaatcaattattacaatacatcaataagttaaaccatgaaaaagcctgcaaacctacgtga

SEQ ID NO: 316686 - DNA, 639 bp, Proteus mirabilis
atgaacgctgatgatttcagcccgttaacccaagcattagctgctatgttggcaaaagcgtcacccaatgaacgtaaaaaattagcccgtgaaattgcccgtgatttacgcaaaagcaatttacaacgtatccgtgcgcaaaaaaatcccgatggaacggcattcaccaaacgtaaagcatcaacggttaccgtgttgcgaggaatgaaatttgtctggaaaggacaggctcgcagtttaaaaaattggcgattacgcaaaacaaaaaaaggtgaggtgatcaccggttacgacttggaaaagaaagccgaacgtagtttttataagcgcgatattttgcgttttattgaagtgaaaaaagacaaaatcagcacctcaaaacccaataaacagactcgcatgtttaagcgtttagccactgcccgttatttgcgtatgtcggccaatgataaaggtgtcacgctttcttttgctccgcaagtggcgggcattgctgccgtgcatcattacggtttaaaagagcgtgtgcgaggtaagtcattagaaattcaataccctgaacgaaagttgttaggcttttcaccggcagatattaaacatattgaaaatcaattactgacatttctcacaaatcactaa

SEQ ID NO: 316687 - DNA, 384 bp, Proteus mirabilis; identical to SEQ ID NO: 300292

SEQ ID NO: 316688 - DNA, 423 bp, Proteus mirabilis
gtggctggggagaaatggtatttatcttatagttggggaaaacaacataaaattaaagtttttattggtgaatccgtcgaagatagaggacatgtcattggtaaccctatttccggtacttttgtgcccttcctatttattttagcgacggtgatcttggctatcttaattactgcttattttagtttgcgccctttaagacaagccgcagagctgatttctaaccgaaaacctcgcaatttaacgccaattaatgtcggacaacaatttaaagagatccgccctatctttaaagagcttaaccaattaatggcaagaatagatgcggctaatattagagaaaaacaatttatggctgatgcggctcatgagctaagaaccccgattgcagcagtgattgcccaattaacattctctctttag

SEQ ID NO: 316689 - DNA, 540 bp, Proteus mirabilis; identical to SEQ ID NO: 297523

SEQ ID NO: 316690 - DNA, 228 bp, Proteus mirabilis
atgaaattgaataaattagcgatgttcgctattgcatcaatggctttttctgcgactgttgctcaagcggcttcaggtgatggtactattactttcactggtaaagttattgatgcaccttgtggtattgctaccgaaagtgctaaccaagctatcgattttggtcaaatcagcaaaagcctattagagaaagatggtatttctcaagttaaacaaatccggttctga

SEQ ID NO: 316691 - DNA, 264 bp, Proteus mirabilis
atgcgttccaatattgaaagtaaactgactttagtgcctctttccggtgataaatcgccacgttcaatcagtttctctgggccatgggcacaaatgcgattagttgataatgcaaaactcatcaatatcaaatctaactcattcgatattcgcttcacaatcgacggtggtgatatgacttatcgagttatagttgatgaatctaataatcctttcttcggtggattattcacaaaattccgtttacctgaaacgctttattaa

SEQ ID NO: 316692 - DNA, 756 bp, Proteus mirabilis
atggagcttatcagaattcccgctttatccgataactacatttggctattaagtaatgaaaatagtgaatgtgtgattgtcgatccttcccaagccaaaccggttatagacatcatctcacaacgttcattaacacctgtcgctattttgttaactcatcaccacgaagatcatgtcggtggtgttgctgggttggttagtaaatatcctaacattgaggtttttggtccacaagaaacacaaactaaaggcgctaataaaattattcatgatcaagaacacattattgttgattctttttcttttttagtcatcggaacaccaggccatacattaggtcatgtcgcctactatagcgaaccttatttattttgcggtgacacgctattttccggcggttgcggacgtttatttgaaggtagtgcacaacaaatgtttagctcattacaaaagttaatggcattacctgataacaccttaatttgttgtgcccatgagtatacattagctaacttgacctttgcgcaccatattatgccaaaaaatcctgatattaccgattatttaaacaaagttactgaaatgcgccatcatttgcaaccaacagtgccgataacactgaaaaatgaaaagaatattaatctttttctaaaatctgacgatattgatttacaaagaattttaggtataacttctaatacttatgctccaataaagacatttacaaaattaagagaattaaaagacaacttttag

SEQ ID NO: 316693 - DNA, 1335 bp, Proteus mirabilis
atgaagacaaaagtgattttgttctctatattgctattggcgggttgccagcaatctaagagcataaaacccgatttgtctgcgataacacccacatctttagggacttcaacttcttaccaaccacaatatgatataaaaaccaatttgtggggttatgtagtaagtgaattaaaaatggatatccctgacaatgaaaggatttcgcagcaagaaacttattttttaaataatccaaaacatatacaaaccgttgcattacgtgcagagccttatatgtattggattattgaggaaatagaaaaacgtaatctaccgatggagcttgcactggttccggtggtggaaagcgcgtttaatcctcatgtcacctcttcagctaaagcggcgggcttatggcaatttgtccctgtcacagctaattattatggtctagcacaaaatcaatggtatgacggtcgccgtgatgttgtcgcttctactaatgcagccttagatttgcttgagcgcctttacattatgtttgatagcgactggcctttagcattagccgcttacaatgcgggcgaaggtcgtgttatgcaagcgataaaagctaatgagagcaaaaacctacctaccgattactggtcactttcattacccaaagagaccatgaattatgtgcctaaaattctcgccttaagtaaagttatccgtgacaatgaagccgatatcactttcccgaaaagtaactatcgcgataaatcattagccgcaattgatattggcgaacagataacattaagcaaagtcgctgaacttagccaattacctattacaaccgtaaaagactataacccaggctataagcgcgggatcaccgcaccaaatggccctcatgttattttacttcctcgtaataaacttgcgcagttccaaaatgcgtttgctgacgaagcgattttaaagaccatccgtttagcggtcgctaaagccaatcagtcgattaaacaagaaggtatttataaagtccgctccggtgattcattttatgccattgctcgacgttataatatgagcgtaaaagagctacaacgactcaatggattaagtgcaaagagtaccttattagttgggcaaacattaaaaattcataatgcaggtagtgtgaacaatcgtccgacaggcaaaccaaccggcgcttcaccaagttactataaagttcgtcaaggtgactcttattacagtattgctcgtcgtcacaatattaatcttaagcaattaatgagctggaatgctgatatcaagatgttaaaaccgggaacgcaattaacgctttacttaaaaaaatag

SEQ ID NO: 316694 - DNA, 984 bp, Proteus mirabilis; identical to SEQ ID NO: 306071

SEQ ID NO: 316695 - DNA, 1038 bp, Proteus mirabilis; identical to SEQ ID NO: 308857

SEQ ID NO: 316696 - DNA, 435 bp, Proteus mirabilis
atgaaaaagcctgcaaacctgcgtgatgcattaattaaaaaggtaagctatttaggggataaccccgataggctctacacctttattgacggcggggcgattgtggcaagcggtgcccgtagtcaatcttatgagtatcaatacaatctcaatattattattgatgattatcccggcgaccaagatgtgttaatggcggtgatcattggttggattgaacaacatcagcctgatattttcctgaatcccgataaacgccacagttttacctttgatgcctttattgatagcaaccagaccgccagtattagcattgatttaaagttgactgagcgtgtcctcgttaatgtgcaagcggataaattggttgttggtgccattgaagagccggctgatccgtttgaaagttgggagagtgtagctcatgaacgctga

SEQ ID NO: 316697 - DNA, 222 bp, Proteus mirabilis
atgtctaaagaaatggatttagcctgcgaacagtcacagttattgcttgataaacaaataaaagcagtaacagggcgttacataggtgtatcagcgtttgaatgtgaagattgcggtcgtgagatacccgaaaagcgccgtattgcagtaatgggatgcacccgctgtgcagattgccaaacagtgtacgagctgaaatctaagcattatcggagtgtttaa

SEQ ID NO: 316698 - DNA, 207 bp, Proteus mirabilis
atgcggatttatacccagcaaggggataccgtagatgatatttgttggcgttactttggtcagtcatccggcatgattgaacaagtattagaagccaatccggggctggttgaattaggggcaatattacccaccggcaccgcgattgagttaccggatacgcctcaacaacacagcaccacaccgattttacaactttgggattaa

SEQ ID NO: 316699 - DNA, 240 bp, Proteus mirabilis
atgaaagaaacttcaacaacaataaagcctttcacagtgtcagaaatgccagctcgacaaattttctttgaaggaaagttgtctaatcagaaagtgagctatgaaggggtattaattgcggatactaacacaaatcgtgtatggcaattacaatttattgctgaaaataaaagtaataataatcaagaagttattgattgcactaataggtatgtgaactcaattagtatcaatcaataa

SEQ ID NO: 316700 - DNA, 249 bp, Proteus mirabilis
gtgattaaagcctatgacgtgattagtcacggacgtttagagttcgatgcacagtgcgttgatatcattcaatcttttacttccattcgccgtaccaccaccggaagtggtaaccgacctacttatgaagcctcacgcagtgaagaaagcggacatgctgaccttgcatgggcaacgatgcacgcccttttcaacgaaccattaaccggcaccaccgagaacagtaataacattgtggagatttattga

SEQ ID NO: 316701 - DNA, 1719 bp, Proteus mirabilis
atggcgacaatgggaggtcagcgcctagagtacgcgttagtgaaagggatcaccgaatttatcattgaagataccgaagcgtgccgccaacaagcttcgagtcctatcgaagtgatagaagggccattaatgaatggcatgaacacagtgggcgatctgtttggtgaaggtaaaatgtttttaccccaagtagtaaaatcggcacgggtgatgaaacaggccgtagcttaccttgaaccttatattcaagcgacaaaaaaagcaggcagctcggcaggaaaagtgttactggcgacagtaaagggagatgtccacgacattggcaaaaatattgtcggagtggtgttgcaatgtaataactatgaaattatcgatctgggggtcatggtaccttgcgataaaatcttgcaaacagccattgacgaaaatgttgatattattggattgtctggattgatcactccatcactggatgagatggtgaatgttgctaaagagatggaaagacgcggtttttctcttcctttaatgattggtggtgcgacaacatcgaaagcgcacacggcagtaaaaattgaacctaattacagccacccaaccgtttatgtgcagaatgcgtcaagaacggtcggggtggtcgctgcattattatcagccacacaaaaggctgattttgtcgctaaaacacgccgtgaatatgaagtggtacgtcagcagtatgcgagaaaaaaaccgcgtacgcctcccgtttccttagcgacagctcgtgccaatgcattgcagcttgactggcaacactatacgccacctaagccgaaccaattaggggtacaacaagttacagccaatattgaaactttacgtgagtatatcgactggacgcctttctttatgacttggtcattggcggggaaatatccacgtatattagaagatgaggttgtcggagaagaggcaagacgcgtttttgcagatgcgaataccatgttggataaactcagtcgtgaaaaattactgacgccgaaaggcatcgttggtttattccctgctaatcgccttggtgatgacattattatttaccaagatgaaacgcgacagcatgagctattacgttgttgccatttacgccaacaaacagaaaaaaaagagtaccctaactattgcttagcagactttattgcccctgtggatagtggtcttgctgactattttggtgcttttgcagttaccggcggtctagaagaagatgcactcgctaatgggtatgataatgctcatgatgattacaataaaattatggtaaaagcgctatccgatcgtcttgcagaagcttttgccgaatatttgcatcaacaagtgagaaccaaaatttggggttacagtcctgacgaagcgctctctaatgacgagttgattagagaaaaatatcaaggaacacgacctgcaccgggatatccagcttgcccagagcacacagaaaaagcaaaaatttggcaactgttaaatgtagaaaatcgcattggtatgaagcttactgatgcttacgcgatgtggccgggggcttcggtatcgggttggtattttagtcatcctgaaagtaaatattttgccgtcgctcaaattcaaaaagatcaggtggaagattacgccaaacgtcgtggtatgagtatgagtgaagttgagcgttggttagcccctaatttaggttatgagccttaa

SEQ ID NO: 316702 - DNA, 528 bp, Proteus mirabilis
  misc_feature (420)..(429): n is a, c, g, or t
atggccatgacagcaaagcaagtcgccgcacttgcaaaggccggggagccaatacggaagtcagacggtaaagggctgtacttcgtcgtcccggactcgggaagcccgtactgggcgctaaggtacagcgtggatggcaaacgcaagcagatgacactgggccagtatgccgacatgtcactggcagatgctcggacagaagcggaagtcttcaagcgcgaactccgccagggagtcgacccgctgattgccaaacaacgccagaaatggatcgggatcaacagcgtcgatgacttgttccaggattggtacacgaatgacttgctgcccagactgaagcaccccaatattccggccagaattttcaacaaagacatcaaacccgtcatcggtgagctcaagattcatgatgtaacggcnnnnnnnnnnagaagtcatccatcgagtcagagacagcgggcgtccaaccgttgcgaacgacaccctgggctacatgaagcagctcttcaaccacgcagtaaagcttga

SEQ ID NO: 316703 - DNA, 360 bp, Proteus mirabilis
atgacctcggctcccgcgagcattggcggcatgattagaacactttctgcattaaatgaaggggctgctaggtcgtttgcttcacgagtggctccatttattgctgttgagatggcccgagcattggttgaagacatgctcaacgcagctagaagcacatcgggtgtggaagatcatgcctatgcgaagttgttaacggaagatcttgaacgtgcacgtcgccaaatcaatgaggagtacgccgcgttgcagcgaagatacggctcagagcaagaattgctggcgcactttaaccaagtgattcagaccattcgcaaacagcgttattacaccgttaaatctacggcgctgggggaatag

SEQ ID NO: 316704 - DNA, 513 bp, Proteus mirabilis
atgaaacctcagcaccgaatcccattcaggactaagccgggtaacaatgccacgacgatgcatgtagttccaaactggttgcgcacgagtatctgcaagagaaaacgtttctccccaggtttgattcaagcgatggataatcgctttgtcctcgtcctgctttctagccttccaatcaactgcgttactcggtattggccgaataggggcttgtatttgtccgggttgaatacaaagaacctggccgattgcttcaatagactgagcaaagttccatccattaatccaagacaacagttcaaaaccatcatgaaagataccgcaggtattacaaacgccaccaccggtatattcagcatctttgaacagcctaaagccatcacgaccgccatgaacaggacaagccacatgacggccttttcgagcaatagcggcatcaagttctggcaccaacgccgccagtatttgaagccattggccattaagatatggcctcactgtttcaatctgtaa

SEQ ID NO: 316705 - DNA, 1386 bp, Proteus mirabilis; identical to SEQ ID NO: 302640

SEQ ID NO: 316706 - DNA, 2439 bp, Proteus mirabilis; identical to SEQ ID NO: 302968

SEQ ID NO: 316707 - DNA, 363 bp, Proteus mirabilis
atgtccgtgctactggaaaccattgataagctgatttcggaagatcacggtgccaaagtaggtatggatcgacttgaaaaagccatgagaaccggcgacttgcaggtgctgctatttggagaaaaggtcgatatttcaccttatctaaatgctgccatgaaaaaggtagcgcctgttgctcttacagccatgcgccaatccatgcgtgacgaaagcatcaatgcggacttggtattgatcgccggaggtggagccatggcttataaggaagcggccaaggagattttttcacgaagcaagatcatcgtgccggaacagtctgttttggcgaacgtccgaggcttctggttttatggggcatga

SEQ ID NO: 316708 - DNA, 162 bp, Proteus mirabilis; identical to SEQ ID NO: 303541

SEQ ID NO: 316709 - DNA, 384 bp, Proteus mirabilis; identical to SEQ ID NO: 51105

SEQ ID NO: 316710 - DNA, 462 bp, Proteus mirabilis
  misc_feature (347)..(356): n is a, c, g, or t
atggattatttaggtcgctatatgaaccagcatgttgaagctggtaaccgattacgtgaaaaccttccaatgtatcagcgcttgctacctgatgataatcaggcgtatgtggccgcagctatggagtctttaacctatagcaactcatcaacgcccgctgaacgagacaatgattatcaagcagcaatgacggttatggccatggctaccggagccgatttacgctcgatacagccacgctctaatgaaggcttgtcatcaactgcacctacttttggtggcactcaaagccaagtggaatcgggtgtattgggcggctacgaggatgcagcaacagttcaaactcnnnnnnnnnnaaactcagttcaacgcagctcaatcggcttaccaaaccaatctgtctggtatagatggacagttgagtgcgcatcagcagcaagctcagcaggccgtagctactga

SEQ ID NO: 316711 - DNA, 240 bp, Proteus mirabilis
atgttaattgaactgcaaaaacatttcacagaaagggatcatgctttccttatgtcattcaaaagagggcaacctgactgggcattgtttgactatcctaatgcagcagacttgccagcgattcgttggaaattgcagaacattaacaaattggcaaagaatcaagcaaaacaccaagagcaattagataaattgaagcaagtgcttgatgattggcttgttaacgcaaacgccgagtaa

SEQ ID NO: 316712 - DNA, 213 bp, Proteus mirabilis
atggccctcgatgcgggcggcgggtgccaggcagacgccgtagccggcggacaccagggtcatcatcaacccgaacgatgtggccgtggtgacgtccgaggggaaggcgccggccgccgtcagcagcgtgtcgatctgcccgcagtagcccacacagtcgcggccatccagggcgatccaagggtagtcggccgcctgctccagggacactga

SEQ ID NO: 316713 - DNA, 471 bp, Proteus mirabilis
ttgataacctgtccaaaagtgagctatttacccgagcctcgctgcttattaaatacggatttcgaacaaccattatcgcgctcgatacaggttggtcaattgccagaatctgatgccatcgtcaaaagcagaagagcattagttgaaggctccctgcttatggcgctttatgtcaatattggtggtgataatgtctacaagcaattaaatatcgatgctttgatgaaggcttacgatgcgtatttggttgcaagaaaagaagcagatcttccagctgagatcccctggaaaaaactgaccatcaatgaaggttgggttctagctcgtgatttaagatcacagcttgcatccttacaccggtgtcgatgcggcagtctgtatttgacggtatcacaacagcgcattcagcttaaatgtcctgtgtgtgtgattatggccgagcaaaccactagagcactttttgagaactaa

SEQ ID NO: 316714 - DNA, 282 bp, Proteus mirabilis
  misc_feature (198)..(207): n is a, c, g, or t
atgaagcaacaagcctatatggaggcactaaacagtaaaacaacggtgcgggttgatgcgctcagtgataataacagtccggagcgtggtagttcagccccagactatgcctcaattgcagagcaactcgccgccgcctcgaaagagggaaacggagaattgtatgccaacatgcagcaaaacaaagaaaaatttgtnnnnnnnnnncagaacgtacctttggctactcaactcagacaagagaagccgcgttgtctcagacagaaatcaaggccggaatga

SEQ ID NO: 316715 - DNA, 345 bp, Proteus mirabilis
atgacgattaataatttaaaagtaatcaatgatcggtatatggccgaagagcagagaagagcgattattgaaagagctgagaaaaaagctagtacatataattcggccaaaaaaatatttcaaatggctgagtctggtgaatgcgttaaacatggaaatggttatattgatgttgttcttcatggtcaaaacattatctattttctctctcttttgaggggaactaaattatttagaaaatacgataataatgtctatcagcatcgagcgtgcaagaggctatttctctatgaatggctgaatgagctaggtggagtcaatttcgtaagaattatcctttcctaa

SEQ ID NO: 316716 - DNA, 711 bp, Proteus mirabilis
atgaaaaaatggaaatctataggcctagaggaatttctcacggcctatcccaaaattagactaattgaagtccacacagataaagttgaactgcaaggtgagtatcaattaaaagcacagcttgatggaagtcatactatcgagaaaactttctctctaagaatagtttgtactaatgattatcctaataaactaccaaccgtttatgatgcttcaaattattttcctcgcaatcgagattatcatacatatgccgatggttctttctgcttaggttcagaacttaaaattagatctattttaaaaggcgattcatcgttaattactttttttgacaaaatagttgttaaatttttatatgctgtatcacatagaatcgaatttggtaattttccttatggtgatcttgctcatggtgagcaaggcctacttgatgactatgcagagttatttaaaattgatggaaaagcatcggtactattagctttaaaaatattagggattcgtaaacgaaatgccaataaactgcaatgcccatgtggctgtaactcacgcttgggcaaatgtaattacaggctttttttaaatcagtttcgatacattgagcgccgccgttggtttaaaattcacctggctgattcctttaccccaattcccaaaacgaaaaaaataaataaattatatggcttgcaacgaaagaagacattgtga

SEQ ID NO: 316717 - DNA, 1188 bp, Proteus mirabilis
atgattaataccaaaaacaattatattctaaacaacatcctagaaaagattgagctacctgatagtgcttatgaaaaggcagaaaaacgctatcaagacttgggagactggctacatcgcccagaatctatctgtgttaatttagatcctcatgtattttctcaaggctcttttcgtctaggtactgcgattaaaccagattctgaagaacagtatgacctagatatgggatgtaatcttcgacgtggtttagataagatttctaacactcaactgcaattaaaacatttggtcggatatgagttaaaattatatcgaaaagctagaggaatcaaggaagagcttaccgagaaaaaacgttgttggcgcttagaatacgctgatggattgagctttcacttggatattgttccttgcatacccgaaagtgatgatcgaagaagtatcttaaaaaaacgtatggtagaaaattctcaattcgatgatagtttagcacaacaggtttctcagctcgcagtatcaattactgacaatacagattccagctacaccgttgtaaatgataactggcgtattagcaatccagaaggatatgctcgatggtttgaaacacgtatgaaaacagcacacttaataataaacgagcgtgaaatgcgatttaaagccagtattgatactctaccattttatcaatggaaaacaccattacagcaggtaatacaactactgaaacgccatcgtgacaccatgtttaaggataatgaggatagcaaaccaatatcagtaattattaccacattggctgctaagtcgtataaaggggaaagcgatttaatctcggcattgaatacagtacttgctgaaatggatagtcatattaatgctcaaataccacttgtaccaaaccctgtaaatccagttgaagactttgctgataaatggtacgaccaaaaatctttgcaatacagattgaaagaaaacttctataaatggctttatcaagcaagagctgactttaaagcgctatgctcacaagatgatgctcaacgtattgttgacgctgcacaaaatggtttagacctaaaacttgattcaaaagaggtcgcactcgcattagggatctctgctgtaacggctaaaccaacatttgcaattcaaccatcagaccccaaaccatggtttaagtaa

SEQ ID NO: 316718 - DNA, 1155 bp, Proteus mirabilis
atggtcgttgaagtcacaaggcatattaagcgtacaattgagcgagaactttgggctcgttctgctgctcgctgtcaatttagcggatgtaataaactgttatatagatctgccataacacaggaatcagtcaatatatctcaaaacgctcatatttatgctttctctgagaatgggcctcgtgggtggggaccatttaaagcaggattaacaaacttaaatgacgtcagtaacctaatgctaatgtgctacgattgtcataaaaaaattgatcaaagtggcagtgaaaatagatatcctgcctctctattgattgaatggaaaaagcaacatgaacagcgtgtggaaatactaacgggtattgcgcctgaccgtaggtctaacattattctgtatggagccaatattggctctgaaaaatcaccgatccattaccactcttgtgttgaggctatgtttcctcaacggtatcccgcatctgaaaaaccagttctcctatctatgagatctgagctcaaagatcactcaaaacaatattggcaagcggaatcacaacatcttttaaaaggttttcagcgaaaaattctctctatcatcgaagatgatgcttgcaaacatttttctttgtttgcacttgccccccagccattattaatacaacttggtactttgtttacagataaaatagatattgatacttatcagctacatagagaacctaaaggttggttgtggcaggactgtaaagatgattttaactatataatcaataaacctaaccaaactgatggtaagcctgctctaattgtatctttaagtgatcatgtctctcatgaacggataactaggatcattggcactgatacgtcgatatgggaaataaccattcctaatccccataatgattttatgcaagcgaagcagcaactttcattgttcagaaagtgcctgcgcaacctaatagtcgaaattaaacatgtacatggtgaaaaaacaccgctgcatatttttcctgtgatgccagtatcgtgcgctgttgagttaggccgtgtgagaatgcctaaggctgatatgccatggctgatttatgaccacaatataaagacacaagagtttgtagtaacaatcgagctgctaggagatcttcatgattaa

SEQ ID NO: 316719 - DNA, 174 bp, Proteus mirabilis
atggctacaaatcccccatcaggtgatggacaccgaaaaggcgccgttaaaaacagatctcaaactcaaacatcaagtgggcattgggttaagcgagatacagaaacaggtcgcttcattgatgtaaaaacatccgacaaaatgccatttaaaggcgttagaaaggaaaaataa

SEQ ID NO: 316720 - DNA, 552 bp, Proteus mirabilis
atgaaactgttaagctataaaattcttctttcagaagtcgtaggtggtgatcatgcctttggtaacgatgaaggcagtgaagcttatgcaaaaatcaaaaaaatcgttgatgctcacccatcatgcgatatttttgctattagcttagagggcattaaattcaccgatgcttcattccctcgtgaaagtgtaatttcattggccaaagccctaaaaggtgaaaaaggattttatcttttcaatatatctaatagggatctcttggataactggtcttatggagctaccgctaaagagcaaccaatacttgttaaaaccgagtctggctatgaagtgcttggtgtgaaactaagtgaggttgttaaagagcttttggattttgttattactaaaaaaacaattacctcttctatagtgtcaaaacattttgatatatcggcacaaaatgccagtgggcgtttgaaaaagcttcattctacaggtcttatactaggtcaaaaagaagtcgcggaatctggcggtttagaatttatataccattcagttatttaa

SEQ ID NO: 316721 - DNA, 1086 bp, Proteus mirabilis
ttgctgaaagtaatctcagagttattagatgaatcacctagactaaagggacgtcaaattgccaaggagctgggattagataaatctcaagtgaattcgtttcttcataaaaatcaggatacatttgtgaaaaactcaaatcacgaatggtgtctgatacgagttcaacatgtggaaatcgatttctcgactggttggattgatgataaagcttttgagaacgcagtcggcaaacttgcgtatcataaagatgtaatcaaggtaacatttagattcggtatcgattgcaaatttctgctaatagcattagcccgttttctcgctctcgcgaatcagcttatcgctagtggaaaggatgtggtaatagatactacagcatgccctaacactcgcaccttctttagcagaaatggcttttttgactatcttagtcaaaatgttatgtgtcttcctgatagacccattatatcagctgctaacacttatagggacaatagcgatactctagtcgagttagggaaaatagcacatccaactcaaaacaaagagcttgtaatccgcttgggagataggttcgttgagcattcttcagatagctacttcttagcggctaagactgttttttcagagcttgtaggcaacgtaactgatcacagtgaatcccaaatacccgggctagcaggtctgcaagtttatcagccatataagaaacctaagcacattcaaacaatcatatctgattctggcttaggtattgctacaacattgagaacaacattacaaaaagagcatcccaaattgtatgctcagtttgctgaaatatcagttgaaaatgatatcgaattagttaaaaaagcttttacaagtggagaggttagccgctttggtaaaggccgaggactcggctttaaaagtagccgtgaacacgcaagtaaagagaaagttattattattatcagacaattaactttctcattgtctttagaatactcaaaagggcaactaatgaacgtatcggaagacagagaattaatccctattgcaggaacacatatctgttttgatttctatgttgacaatttctga

SEQ ID NO: 316722 - DNA, 1281 bp, Proteus mirabilis
atgatgaagatttctgaaatgccgaaatatgaggtttataaggattctcaggttcaatggataggtgatataccagccaactggcatctggaaaaggctaagtggctgttttataaagcagatagaaagcctctcgttgatgatgatatcgtaacttgtttccgcgatgggcaagttacgttgagaaaaaacagaaggactgaggggtttactaatgctttaaaagagcatggttatcagcgtatttgtaaaggggacttagttatccatgcaatggatgcctttgcaggagcgataggtgtctctgattctgatggaaaatcaacaccagtatatgcagcatgcgtcccaagaaagaaaggcaaagttaattcatattattatgcctactatatgcgtgatttagctctgtcaggcttcattgtgtcgcttgcgaaaggaattagagagcgctcaacagattttcggtttaatgattttgcagaattattattaccgtttccggattatgaagagcaaacccgtatcgccaactttctagacaagaaaaccgctctaatcgacgaagctattgcgctcaaagagcagcaaattagcctgctgaaagaacgtaagcagatcatcatccaacaggcggtgacccaagggcttgatcccaatgtgccaatgaaagactccggtgtggattggattggagatattccagcgcattggaacttaatgtcattgagatatgcgtttgagtttcttaacagtagaagagttccaataagcgcagttgagagagagtcgaggcagggcgtatatccgtattacggagcaagtggtgttatcgattatgttgatgactacatctttgatgaagatttaatcttgatcgctgaagatggcgcgaatttgctaagcaagtcaacaccattggctttcgttgcaactggaaagtattgggtgaataaccatgcacatattattaagccaaaatttcatggttttaaatactgggccgagttattaagcggattggactatacggtatttatttctggtgcggcacagccaaaattaacaagggatcgtcttgcaagtgtattggttccagtgccaccaaaagatgaaattcaagaaataattttgttcattgaaggaattgagccagatctgaatcgcacgattgatatacaaaagtcgcagattgaaaagcttaaagaatacaaaaccaccctgatcaacagcgccgtgacaggaaaaatcaagatcaccccagaaatggttgagcaatag

SEQ ID NO: 316723 - DNA, 360 bp, Proteus mirabilis
  misc_feature (26)..(35): n is a, c, g, or t
atgttttggaataggtattattttcnnnnnnnnnntattttcctttttatagggaaaaagagtgacatgcgttggttttttattacctttgcattatgcggctcaggatttgcgttattatttgggattattatgagccaagcactttctccctttagccaacgagccggcgttgcgagctctgtgctgggtatttcacaattaagtttttcttcactttatatttgggtaatggggtggattgaagtatcctcaataaatatgttggtggttattttatttatcagttgtattgtaggtactctttttctatgctttcctcggttcacagaacaaaaaaaggttaaatataatgtctaa

SEQ ID NO: 316724 - DNA, 831 bp, Proteus mirabilis
atggctatttcaatgtatttatctaacgcttacaataagcaagaaaatgaatttgatgaaaaatacatggcagatatttataaaaaagattgtttcaattcttacaatatgccgtatttagatatttgtaacgttggagatgaatcatcaagcatttcaggattgctcatcggtgactctcatgcgaattcattgagttctttcatcggctatttggcaaaagatgctggccttaaatttcaagagaaaacaatacaatgggttccaccaatccctggtgtatcatttggtgaatctttaaatgtaagaaagtctgaatggactaaaaaatacaacaacgaggcaaaaaaatacaaatatgtagttatctcatcaaactggcctgagtatgagaaaaatacaagcaaaaataatttatttgatgataacggaaatatcatcactaataattatagaaatgaggtctattcaatgataaatgattttataaaaaatggaactcatgttttccttgttatatctaataatagcattgacttttcagagttaaaaaaagcgaaactatctggtgtagatattagttcaaataaatatatggcaaaaaacaaccaagattactttttatatgaaaaatacaaagacaacaataacgttacaattattaatataaatgatgttttgtgtcatggtatttattgttcttcatctataaatggaacagtcttatatagggataatggccatttaaatttacttggttcagaattaatagccaaagaatacgtaaagaaatacggaaacccaatgaaaaataattataaccacccgtaa

SEQ ID NO: 316725 - DNA, 2628 bp, Proteus mirabilis
atgagcatatctaggagatggtttttaattaaggccataccttcatcgatagcaacaacagttttttctggttgcgtttatagtgagcaaaatgaagctaaatttcttgctaacacacatggtgaagtaaataaatcattactaggagacaatatgccaaccactccaacgcaaaacccagttccaagcgaggcgccgagtgatcttaaatttaattcagggaagatggatgagttcgtaaactctaaaaataacttttttactgataggcttggtaattttaggttgactctttttggtatcgagagttcagctgttagtgctggccctgcaattgaagcggctaaggaagcagctgaacaggcgacaaaagcaagagttacagcagagcagatagttgataatactgaagcgtatatctcttcagcgaaagacaatgcagataaagcaaaatcacatgctgaatcttccaaaaaccaagctgatagaagtgagtcagcagctttaaggtctgaagccgcatctcttgaggctggcttagaatcaaaaatttttgatagcgtaagtgaagggattaatggtacgtcaaacggtgactattttagagtttggatgccacctaacacagggatctcgatgcagttatataaaaacaatagcggaagtcctttatttataaccgactatccaagtcaagcatcggtagaaaatatatcaaatgacatcaattcaataaataatactttctcgtatccaaacaaatggtttgacgatgatttttctattttatcatcaatgaaagaacagtcagatatgtatggcggtaactatacatttaataatgtcgatattgtaaaagacaataataatggttctccgtttattactatctcatcagccaaagataatacagggtactttactttttatattcgtgaaaatgatttcaataatttcggattagttaaaggagaaaaggcaacctttggactaagatttactgactcaaaaggtggcatgaaaacaggtaatgactctataattattcaacaataccgaagtgatgatagcgaaattacagacaaaagaatagaaattaagcacccaagctcatcaacgccattttataaaaaagagctattcactgaaatagatatatcacatgattgctctaggtttagggtttatttttcagtttctagtagttcgaatagaatatcaatagataatttaattatttgtaacggcgttgtagacaaatacagaccttcattcctaaaggctattggtttacccggttctagttcaagtcatgaggtttttgtgtctttatcaggagatgattcgactggtgatggaagtaaattaaaaccacttaaaacaataaactctgcaatatcaaagatatcaggcgttggtaaaatatatgtatctggtggaaatagatacaatgaaagtataaattcaaagctaattaaagatattgaaataatagggagtgattctgaaaatcaccaaagaacagtattttactatggagctaagctagaagggattagcaaggtagatggaaaaaacaaaacatttaaatctagaattgcattaaatgggcagccaaacttcatttggcttgatggtataaatgatactgagtcaagaatacttccagagcataggcatccactcagtaatggaagagagtatagattgtggtgcacaaaaatatactcagtaaaatcaaccgaaagtataaactcagctatcaatgaaattgaaggtgcaagcattcctctttgcttctacgataaagaaaatggagaaatgtacttctctatacctacaaacgtatccatagatagctcatcaatatatgtatctcatgacaataatgatgggttaatttcaaataaaaatgatatttggaatgctagtggaaaattaagcctaagaaatatacatatccgttatggtagttgtgatggtagagggatacggaaggtatcttataattcttgcacatcaattggcgccccaattaatggttttgatataagctgggatgatgaatttagattatgcgaatcctgtggggctggttcctctaatgttgtaaatggtgatggttttaatgcatcaactaaatctgactggactcattatgactgctatgcacatgacaataatgacgatgggataagctcacaccaaaactgtgttgaggttggttatggtgttgtttctgagtttaacggcggggctggattgtgcccatcttacggagctcaggttatatatcataatccactaactataaagaactcagtaaacataagatctaacataatcaagcaaggaggcataaccgccattagatcaccaagatgggaggatgatgggatatgtacagattgcactgtttataatggaatttctattggagataaaaattcattttttgatgatagcgtgaatggcacatatagtgcatatatgacaacctatagttgcatttctattgatcctgtaattatgggattttcaaattataaggcggtaaattgtaaacacactggaagtgggttatcaaaaaacacggcaacaaaagttatttctgttagtgatatttaa

SEQ ID NO: 316726 - DNA, 1842 bp, Proteus mirabilis
gtgaataaacttttattattaaaatcggcaaagacaaagccggatttagcaaggattttaggtgtaaaaccttctacattaacgtattgcttatatattgttaagcctgaaaatcaatatgtacaattcgagatccccaagagaaacgggggtaaaagaattatcagcgctccctcaggaatgctaaaaaacctgcaatcctccctttcagatttattgcttgactgcctagatgaaattatttttctaaagttccccgattcagagataacgaggcaaaaagcaaaaaactctctttttttaaaagtgaagtgctctggctcagaaataaaacagccctcgctttcgcatggatttgaaagaaaacgttcaattattaccaatgcaatgatgcacttagggaaaaaacacgtcttcaatattgatttagaaaacttcttcggtagttttaatttcggaagagtgagaggttttttcattaaaaacaaaaactttttgcttgaaccagaaatagccacggtgattgcaaaaatagcctgttataataacgaactgcctcagggcagtccgtgctcacctgtcatttctaatttaatcattcatgctttagatattaaattagcggcggtcgctgcaaaacattcatgtacgtatactagatatgcagacgatataactttttcaaccagaaaggaaaatttaccctcttctatagcgaaatcagataatcacacttttgttgcagggacggtcatcagaagagaaattgcccgttcaggattttcgattaatgaatctaaaacaagggatcaatacaaagactcccggcaggaagttacggggttagttgtaaataaaaaaccgaatactaaaaaagaatactggcgacttgtgcgagctcagtgcaatcatctgtttaacacgggtgcgtttaaagagacgataaatggcgctgaggtaactggtaatattcacaggctcgaagggaaactgacttttattgaccaggttgatcattataaccggcttcgtcagggagaaaagttaaatcctaaatatcatttaaaaaaagacgctatcagaaaaaataccccttcaataaggcgttatttacatacgtccagagagacaacatttagtaagtttcttttttatcgctggttctatggtaacaccaaacctacgattcttactgaaggtcagactgataatatttatttaaagtcagcaatatggaagctcgcagtccaattccctaaactggcaacagggaaaagtaccacagagccttataaggccttgactcagttttttaaatataatgagcgaaccagatacttattagagctttttggtggtggtgattatctgaaggattttgtagttaattacaaaaaattgtttaatgcttataaagcacctaaaccatcgcacccagtaattatattcgtggataatgactccggacctaataacctgattaattatgttaaaggagttaagggcattgatatttcccctgcgggtgtaggtgttaacgacatccgtcagtctgaatttgttcatattttttgcaatctttatctggtgctcacacctcagggagcgggaagctctgagactgatattgagtatttctttagtgatgctgatcggcttagggaacataaaggaaagcgttttaatacggtcgccgaccgtgacaaagttaatgacctcagtaaagaagcatttgcaacgcatattgttaaggcgcagaaaagtattattgatttttcacggtttactcatcttttagaacgcatagaaaaagtgatagatcattataattcaataaagtga

SEQ ID NO: 316727 - DNA, 576 bp, Proteus mirabilis
atgttggaaaaatattttaactatgaaaaaatcagagctatccctattgtaggtgatattttccgcattgctaatgcatatgtttatgaaggggcagttgagaatcatgtttctattgcaccaatatctttatggaaacaaaagataggaaaaaagttattatatgcactcattctaacagtcattttatccattatttgttggttatttttagatgtgcaatggattgcatctgattcaataataagtgtatttcctagcttattaggatttggtattggtgtgtttgctctgttgttcattttaccaaatagactttatcagcttttagatagagaaaaggaaaatggaaacattacattcgggcatgagatattagctgttgatatgggatatccacttctagtgtttgctgtgattttatcatgggctggaattaataaattcattgatattgatgtttttaattttataagtaagtggatgtttttttatggcatgagtatggttcttgagcttatttcttttttatttaatgtttcgatattaataatgaatttaaaaataaaaagctaa

SEQ ID NO: 316728 - DNA, 486 bp, Proteus mirabilis
atgcttaaggcatttaatctcgctttaagagaaaataatgatatacatctaaccttagttgggtatagagaatggatggcagaagataagttggtaaaaaaagatttagattcatttattgttaacaataatcttcaaaataaagtaaatattattaattattctaaaaatacatttaactacttacttaactctgatatttttttactcacttctgaatatgaaggttttcctaatgtactattagaagcaaactcattaggtttacctgtaatatctgttgactgtccctttggccccaaagaaataataaatcaagataatgggttacttgtgaataaagaatcatatatagaattttctaaaaaaatcattttatctactcaaataaattgggatcctataaaaatatctaattcaactattttatatgatgaaaacaaacagtattctaaacttataaatgttattaaaggattatcttaa

SEQ ID NO: 316729 - DNA, 276 bp, Proteus mirabilis
atgacagttactagtgctggaacaattcgtctagttcttgcttttaaaaaattccagagagagaaattattattttctaatcccctgaagataattgatgtcattaaaaaaccagatatgacaaaaaatacatcaactccagcaaaaccactgggtactaactctttattaaaatggaagaacataacagataaaaccgcaatggctcttaaaccattaatgtcagctctaaattttttactttgcatattaaattattatttattttaccaatag

SEQ ID NO: 316730 - DNA, 615 bp, Proteus mirabilis
  misc_feature (588)..(597): n is a, c, g, or t
gtgatcccctatcaaaatattcccaataatcattttgagatattaacgcgattaattgataacagtttaaaacgggctaatatcaccctagaaaagcttcgcgcttcacgtaccataatgtatcttgcaggtcacgggcctagagctgattttatggattaccaagggttttatgataaaaacgatgccgaagatgttcaatattctccgcagataaaatcactccatgcagcctcttttgcacaggatgaattagcgaataaattgtgggctgaatatcagttagatttcccacctattcctatctattgtgccagtaattctgcgttaatggctgtgcatataggacataatgaaataagccaagatatggcggatattgtaatagtattgtcgtggaatagcttacttttacaagatatagcctttatggatagccaaggcatgttagttgaagcgcacgctcaacctttgagtaaatacagcgatggggtcgccttatcagacggttatgccgtgatgattttagaaagccaacaacagataaactcgagacaatatcttgcacctgcttatatctatcattcnnnnnnnnnngggaggcacattatttaa

SEQ ID NO: 316731 - DNA, 207 bp, Proteus mirabilis
atgattgaaaaaccagaaaattttttagagatgaaagaaatcgttagagttttagctaaagaacataagtttatcagagttgatttatataatgtaaataataaaatttattttggagaattaactttctatcctgcaagtggccttgaatttatgaaccctgaatctttagaaaggactttcggtgatatgttagatctgtcatga

SEQ ID NO: 316732 - DNA, 477 bp, Proteus mirabilis; identical to SEQ ID NO: 291010

SEQ ID NO: 316733 - DNA, 309 bp, Proteus mirabilis; identical to SEQ ID NO: 290961

SEQ ID NO: 316734 - DNA, 627 bp, Proteus mirabilis
atgagaactcttggtttagtaagctgccaagaaccaaagcatcgttacagaaaggcttcacaagaacatattgacgttccaaatcacttaagtcgtcaatttgctgttacggctccaaatgaagtttgggctggcgatgttacgtatatttggacaggtaatcggtggatgtatttagcggtcgttatcgatctttttgcccgcaaagtgattggttggtcaatgtctttgtcgcctgatagtcggttgacaggtaaagcgctgtctatggcctatgaatctcgcggaaagccaaaaggtgtcatgttccatagcgatcaaggcagtcattatactagccgtaaataccgtcaattactgtggcgctttcaaataaaacagagtttatctcgccgaggaaactgttgggataatgcgccgatagagcgcttctttagaagtctgaagacggaatgggtgccaactgtgggttatcgtagcttcgctgaggctcaacaagagatcacccgctacattatcggatattactgccaactcaggccacatcagtataacggtggtctaactcccaatgaatcagaacgattatattgggaaaactctaaaaccgtggccaattttagttga

SEQ ID NO: 316735 - DNA, 1554 bp, Proteus mirabilis
atgaaaattcgttcacaagtcggtatggtactgaacctcgacaaatgtatcggttgccatacctgttcagtaacctgtaaaaatgtttggaccagtcgtgaaggtgtggaatacgcttggtttaataatgttgaaactaaaccgggtacagggtatccgcaaaattgggaagatcaagagaagtggaaaggcggctggatcaaaaatattaaaggtaagttagtaccaagaatgggtaaccgtgttgggctattatcaaagatttttgccaacccagatgtgccagcattagatgattattatgagccatttgattatgactatgagcatttaaaaaatgcaccagaaggctcattacccaccgcacgtcctcgttcgttgataacaggtcagcgtatgaccaagatcgaaaaaggcccaaactgggaagatgatttagggggcgaatttagcaaacgtgctgcggataaaaacttcgccaatatgcaaaaagagatgtatgggcagtttgaaaatacatttatgatgtatttacctcgtttatgtgaacactgcttaaatcctgcttgtgtcgcgacctgtccaagtggtgcgatttataaacgtgctgaggatggtattgtgcttatcgatcaagataagtgtcgtggttggcgcatgtgtttaacagggtgtccatacaaaaaaatctactttaactggaaaagcggtaagtcagaaaaatgtattttctgttatccgcgcatcgaatcaggtcaaccaaccctatgctcagaaacctgtgttggacgtattcgttatcttggtgtgatgctgtatgacgcagataaaatttcacaagccgccagtgctgataatgaaaaagacttataccaaagtcaattagatatctttttagatcccttcgatcctgaagttattaaagctgcagaagagcaaggtattccattaagtgtgattgatgcagcccaacgttcgccggtttataaaatggcggtggattggaagctggcattaccattacaccctgaatatcgtactttacctatggtgtggtatgtgccacctctgtcacctattcaatctgcggctgatgcaggagtgttgccacatacgggggtattaccggatgtagaaagtttacgtattcctgtccaatatttggctaacttgctgaccgcaggcgatacagcgccagtgttattagcattaaaaagaatgttggcaatgcgccattataaacgcgcagaaacggtagaaggtaaaaccgatttgacagcattagagcaagtgggattaaccgaagcacaggcacaagagatgtatcgctatttggcgattgccaattatgaagatcgctttgttattccttctagccatcgtgagttagcaagagaagcttttcctgagcgtaacggctgtggttttagttttggtgatggttgtcatggcagcgagagtaaatttaatctgtttaatagtcatcgtattgatgccatcgatatcacttccaaaacccctcaagatgagcgccgttctgaggagaaaatatga

SEQ ID NO: 316736 - DNA, 3762 bp, Proteus mirabilis
atgagtaaatttctcgatagattccgctattttaaacagcttggtgatacgttttcacaagatcacgggcaagagttaaatgttaatcgcgactgggaaaatagttatcgtagccgttggcaacatgacaaaatcgtgcgttctacacatggtgttaactgcaccggatcatgtagctggaaaatttatgtcaaaaacggcttagtaacatgggaaacccagcaaacagactatccacgaactcgtcctgatctgcctgatcatgaaccccgtggttgtccgcgtggtgcgagctattcatggtatttatatagcgctaaccgcgttaaatacccaatggtgcgtaaacgtctgatcaaattatggcgtgaagccaaagcgcaacacgctgatccagttgatgcatgggcatcgattgttaatgctcccgaaaaaacgaaaagttataaacaagctcgtggtcgtggtggttttgttcgctcttcatggtctgaagtgaatgaaattattgctgcttctaacgtctataccgctaaaacttttggcccagatcgtattattggtttctcacctattccggcaatgtcaatggtgtcttacgccgccggtgcccgctatttatctcttattggtggtgcttgcttaagtttttacgattggtattgtgatttaccacctgcctcaccaatgacttggggggagcaaacagatgtgccagagtcagctgactggtataactcttcttatctgattgcatggggttcaaacgtacctcaaacccgtacgccagatgctcacttttttaccgaagttcgttataaaggcaccaaaacggtagcagtaacacctgattatgctgaaattgctaaactgtgtgaccagtggttaaacccaaaacaaggtacagatagcgccatggcaatggcgatgggacacgttattcttaacgaattccacgttaaacgccaaactgaatactttagtaactatgtgcgcacttacactgacatgccaatgttagtgatgttagataagcatgactctggcaagttagttgcgggtcgcatgctacgtgccgctgatttagtgaacaatctcgatcaggagaaaaatccagaatggaaaaccattgctattgatgagaaaacacagcaattggtcgctcctcaaggttcaatgggttttcgttgggaaggcgctgccaaatggaatctagagcctaaagacggtaagagtggtgaagaagtcactttacaattgggtcttttagaaaaccatgatgatgtggttgacgttgcatttccttactttggtggcatcaagagtgaatactttgaaggtgttgcccttgatgatgttctcgttcataaactgccagcaaaacgcattactcttgccaatggcgaagaaaaatatgtcactaccgtttatgacttattactggctaactatggtgtcgatcgtggtttaaatgatgaaaactgtgcgacaaactatgatgagatcaaagcctattcacccgcatgggctgaacaagtaacaggggttagccgtcaagatattatccgcattgcacgtgaatttgctgataatgcagaaaaaacacatggtcgttcaatggtgattgtcggtgcgggcattaaccattggtatcacatggatatgacctaccgtggcattatcaatatgcttatcttctgtggttgtattggccaaagtggtggtgggtgggctcactatgtgggacaagaaaaactgcgtccacaaacaggttggttgccattagcttttggtctggattggcagcgtccacctcgtcatatgaatagcacgtcatttttctataatcattcaagtcaatggcgctatgaaacggtatcaccgacagaattactatcacctttagcagataaatcacgctttagcggtagcttaattgatatgaatgtgcgttcggagcgtatggggtggttaccgtcagcaccgcaattaaacgttaacccattgtctattaccaagaaagctcaacaagctggcgtcagtgcaacggattataccgttaatgctctgaaatcaggtgagatccgctttgcatcagagcaaccggataatccgcaaaacttccctcgtaacttatttatctggcgttctaatttattgggatctgcaggtaaagggcatgaatatttactgaaatatctattagggacggaaaatggattacaaggtaaagatttaggtgaacaaggccaagttaagccacaagaagtggaatggcaagataaaggcggtgagggtaaggtcgatttagtggtgactttagactttcgtatgtcaagtacctgtctgttctccgatatcgtgttaccaaccgccacatggtatgaaaaagatgatatgaatacctcggatatgcatccatttattcatccattaaccgccgcggtagatcccgcttgggagtctaaaaccgattgggaaatttataaaggtattgctaaaaccttctctaaattgtgtgtcggtcatttaggggttgaaaccgatttagtgacacagccaatacaacatgactccgtggctgaaatggcacaaccatttgatgtcaaagattggaaaaaaggtgaatgtgaccttattccggggaaaactgcaccgcatcttattcctgtggagcgtgattatccaaatacctatgctcgttttacctcacttgggccgttaatggataaattaggtaatggcggtaaagggatcggttggaatacacagacagaagttgatttcctgaaaaaacttaatcgcgttcgtcatgagggtgtggcaaaagggcgcccggcgattgaaaccgcaattgatgcagccgaagttatcctctctttagcacctgaaacgaatggtcaagtggcggtaaaagcgtgggatgcactaagtaaagtaacaggacgcgatcacactcatttagctaaagtaaaagaagatgagaaaattcgtttccgcgatatcgttgctcaacctcgtaagatcatttcaagtcctacatggtctggtctggaagatgagcatgtctcttataacgcttgttataccaatgttcacgagatgatcccttggcgtactttaagtggccgtcagcagttatatcaagatcatgagtggatgcgtgcttatggcgaaagtttagtggtttatcgtccacctattgatactaaggcaatcgaagcagtgaaaggtaaaaaaccgaacggcttcccagaaaaagcgctgaacttcctgacgcctcaccaaaaatggggtattcactcaacgtatagcgataacttactgatgttaaccctcggtcgtggtggccctgtggtttggctgagtgaagatgatgctaaagagatgggtattagtgataacgattgggttgaagcatacaacagtaatggtgcgttaaccgcaagagcgattgtgagccaacgtattcctgatggcatgatttatatgtatcacgcacaagagcgccaaataaacctaccaggctctgaaataactggaatgcgtggcggtattcataattccgtgacgcgtgtttgccctaaaccgacccatatgattggtggatacgctcagttggcttatagctttaactactatggaactgtgggctctaaccgcgatgaatttgttgtggtacgtaagatgaaacagattgattggcttgatggtgaaggcgatgcttatcaacaaaccctgaatggacaggagaaggcataa

SEQ ID NO: 316737 - DNA, 645 bp, Proteus mirabilis
  misc_feature (606)..(615): n is a, c, g, or t
atgaatagtaagctttcaaaaccacaatcttcagaagttgataaagggcatttcgacgatttttatctaaaacagaacgatgaaatcgatctgtttgagttattctctgttctttataaatcaaaatttgtcattattgggatcacacttttatttgctatcgtaggttttactgttgcgagctttctgccccagaaatggacaagccaagctgctattacaaaaccaatgttagatgagatgaagcagttaagagcaaccttaaatgatttaagcttggttgatgttgatactggcgtaaatgcttcttctgtttaccaaaaatttatcaataactacaattcccgtgtattacgtgaagaatatttagtcaatacggattactataaaaacttattggctaagatggacgatcctacgccattggataaacgtaaattaatcgaaactattgttactaaagatattaatttaaaagcatcagacagtaaaaatagtgatgaagaatttagtggcgaaattaacttaagctttactgcgccaacttctgaagaagcttacgatttgctgtcaggttatattcgctttatttctactaaagtacgnnnnnnnnnnagtacgggtagaagtgaaagacgaaattga

SEQ ID NO: 316738 - DNA, 1782 bp, Proteus mirabilis
atgtctaaccagtgctcgctttcagaggctttgaatgagctattgccaaacagagagcagtacgatgcggccacatacaccagccactgtgtagttattgcaggacctggtagcgggaagaccaaaacacttacaacagctatggctcgcaccctaattgatgagattactgatccccgaggagtagcctgtattacttacaacaatgaatgcgcatccgaactcgaaggacgtctggcctgctttaatgtcactgttgatgatcggaactttattggcaccgtacatagctttgcattaaatcaggttttaatcccctactcacgatgtatacccggtttactaccaaatgattttcgtgtggcgaccagagatgaaagtcgtgcggctgttgaagtagcttaccaggctagatttggagctgtcggagatcctcatgcacgatggaaatttgcagaagaaaaacgacgccgagatgtgaaccgacttctaccagcttggcggaataacaatccggagctggcagattttattgaaggttatgaggcagaacttcgtcgcttggggctcattgactttgatgatatgccactcatcgcctttcgtattattaacgagcatgaatgggtacgtgccgctatccggtcacgctatcctgttttgtttgtagatgaatatcaggatctagggtatgctcttcatgaactagttctactgctgtgctttaacggtggaatacgattatttgcggtcggtgatgcagatcagtccatttacggatttaatggtgcaaatccaagactactggacagtctagtttcacgggcagatgtgagactattccgtcttcgtttcaactatcgctctggcgcaaaaattataagggcatcattaggggcgctgggagaggaccgcgattatgttggtcctgatggcaccccagagggagagttaggattccatggaataaaaggcaattatgacgcacaagcgcattttatcgcgcatgatctaatttcctcgttgcttgagagaggatttcagcctgaacgtatcggggttctttaccgggctgcatggcttggtgataaagttgctgatgagttcaaagccagaaatattgccataatacgcgctgatagtaacgccctcataaaacgtaactctcgtcttgcctgtttcatagaaggctgcagtcagtgggtgacgggggggtggaaagaagcctctcctccatttaatctgttactaagtcaggcgctctttcttgtttatggtcgccgcgtaaaccgtgctgaagaacagttactgaccatacaactcatcacatttttgcgaaacggaatagataaagctgaaagtgcccacgagtggctgaaacgtttaaatgatgagatcattaccatttggatgaatatctcacagaacactctacaggaatgggatgtcatcgctgagctactaaaacgaaccgatcccgccaagggactagatgtgactctagatgtattctctgggaaagtaaaaggaactggctgtatcacccttagcactcttcatagtgcaaaaggccgagaatttgatgtagccataatgtttggggtaaataaatatgatttcccgagtagtagagatctagcttcaaataatgcccttcgcgaggctcggcgcctcttttatgttggggtcacccgtcctcgaaaagaattacacatggtttatgaaacgggtaaacattcaccttggattgccgaactatattatcgcagccagaagatatag

SEQ ID NO: 316739 - DNA, 1785 bp, Proteus mirabilis
atgtatttatcaaagctcggaatccgcaattttagaaactttgaggcagctgacatttccctagcaggtagtgttgtattattaggggaaaatcgtgtcggtaaaagtaatctactttttgcaattcgactggttattgatcccactctgcctgattcagccaggttacttaaactatctgatttctgggatggctgtgatcttgaatctagccctcaaattgaggtgcaccttgaattctccgattttgacagtgacccttccctctcagctctgttgaccgattttcgtattgcagaagatccctccgtagcaaggttaagctacattttccgtaaaaaggaagaagttgatggggctccacgttcaggtgaagactgtgagtttattgtttttggcggaggtcaggaatcgagagccattccaggtcgcgtcaggcgccggatttccattgatatgttggatgcgctacgtgatgcagaagcacagcttgcttcctggagaaattccccgctgcgtcccttgttagaagatgcattttcttcactaagtcgagccgatttagatcgcgtagcaattgagcttcagtcagcaacagaaaccatggaaaaattcccttcaattagggaacttgaaaaatctctgcgtggtggcattcttgatctggctgggactactcacgatttagatgcccgcctccgttttgcaccgactgacccgctcagattgatgcgttctatctctatgttcattgatgatggaaagagaggcatcattgaagcaagcttaggttctgcgaacgttgctctgatatcactcaagttagcagagtttgcatggcgacgtgaaaagaatgaacgtaacttctccctactttgtattgaagaacccgaagcacatctgcacccccaactgcaacgcgctgtttttgacaaactcttcaataatgcagacaaagatcagtcattgattgtaacgagccattctcccacactagcgaccattgctcctcttcgttccgtagttcgcatttatagggatcctgacgggaaatcgagagttttttccctagccaaactgccaataaccagcgaagaactcgacgacattgagcgatatctaacggcaacaagatcagaactgctttttgctaacggagtgatatttgttgaaggcgatgctgaggaggttttacttccaggtttcgcacaggccatcgggatcaatctcgaccagcttgggattacggtatgtaacgtagctggagttaattttaaaccatacgtgaaactggcagccagccttggactacctttttccgtcataactgactgggatccactggatggtacaaaacaaccgatgggtaaaactcgttcaattgatatttggcaggcatatagtgatgtatcaaaaaaactgaaaaaactaacccccgaaaatattatttggttcaataataattcttatgaaacctgtaaggctacatttgaaaaaattggcatttttttaaacaatcagacatttgaagtcgctgtagctaatacgacaggtctcaaagaagcactacttgatattctcgatgaacaggaatttggtatgttacgttcatcaaggattgcgtcatggcgtgacggtatagttccagacccgacacaacttcttgcgatgatatctgacataggcaaagggcggttagcttccaaattgaagaaaaaagcgcctgaacttgcacctcccgaatatattgcttcagctattagatatgtggtgtcaaatgtctaa

SEQ ID NO: 316740 - DNA, 177 bp, Proteus mirabilis
atggcaaaaagctcggaaaatttaacagtaacggttctgagcaattttactttattcttttcttatcatcggctgttaacggcaaaatttcaacacttggatttaggatttgctgtaatggggactgcttctttgccttctttgccttctttgtcactgagcaggctgttagattaa

SEQ ID NO: 316741 - DNA, 162 bp, Proteus mirabilis
atgaataaatccttagtttttaaaggtaacaaaatcaccccatttgataatggtgatggaaaaatctggtttaccaacaagcaactttcagaattgcttggatacaaagatgagtcatcagtaactcgtatctttaatcgaaataaagatacgagttactga

SEQ ID NO: 316742 - DNA, 351 bp, Proteus mirabilis
atggctactaaatttggtaaatacctaagaaaactaaggatagataaaagtatggttataagggatatggcagaaatattaggggttagccccgcttatctttctgcaattgaattaggtaaacgagcaatacctgattcattcgtgaataatctgtgttctgcatttaaattaagtgatgaagaacgtgaaaatatgcaacaactagtagatgtatctcaaccaagtatcaaaattgatttaacagatgctgacgaatcaaatcgtgaaactatgcttgcctttgctagaaaatttaaagaattagatgatgaacaattgaataagttgaataaaatgctaaaggaataa

SEQ ID NO: 316743 - DNA, 513 bp, Proteus mirabilis
gtgataaaaagagaactagggcatagagtttcccctaaaagcactaaagaaatcgttaagatcgcattagctacccgaaaattgctcgggctagaaagcacagaaaaagtaaacttaacagttctagttgaactttttttgcaaaatgacttaatagagattgttgaagatcacgagcttttagggagatatgcccttacttatcccgataaaaacatcataaaaattcgaaatagtgtatatgaagatttatgcaacggtagcccaagagcaagatttactattgctcatgaaattggtcatttagtaatgcataaaaatcaaacaacctttgcgcgaggtggaagtaaaacccataaaatatttgaagatggagaatggcaagctgacactttcgcgagccactttctaataaatgcagacctggtcaccaagaacatgactgctagcgatataagccgtaaatttggagtaagctataccgcagcagaaacatggctatctaaaagatag

SEQ ID NO: 316744 - DNA, 141 bp, Proteus mirabilis
atgacaaccacatctgtttctagtgctaatgatgaatatgaaactattctaagagcatctattacattaaaaaatgggaaaaaactttatgcttggcagaaaggcttaaaagcctttcctattcgagttaaaaagaaatag

SEQ ID NO: 316745 - DNA, 213 bp, Proteus mirabilis; identical to SEQ ID NO: 315509

SEQ ID NO: 316746 - DNA, 666 bp, Proteus mirabilis
atgggtatgctctcaattgatacaacatgccctcattgtttacgtgaaaaggctgtacttatagctatttatgaaatacgtcgtagtgaacagtctcctttactagacattacttttaagtgtagaagttgccagaaagtaggtttagccgtagtaaatacttttggagatccccctcctcttagcttttctgctcacgcacagttaaacataaagattccatctgatacatatgcttataaaattgaagaaataatacctaaaatagaactgcacattgcaccagatagcacccctgagcgcgcggctaaatttttcattgaatcaaaagatgactttcagcgaggaagatatgaaacttgtacaatgaattgtcgtaaagttatagatatcgcaacaaaatacctcatgggtgaagaggtaaaaaatagtaatttaaataaccgtattaacttactatttgagcaaggaaaaataactgaacaaatgaacagttgggctcatattgtaagaatggatggtaatggagctgctcactctgacgaaataattacggaagaagaagctaaacagatactgaattttactgaggtatttttgatgtattcatttactctgccagctatgatagaaaaaagacgttctgagtctaaaacatctaaataa

SEQ ID NO: 316747 - DNA, 897 bp, Proteus mirabilis; identical to SEQ ID NO: 190877

SEQ ID NO: 316748 - DNA, 948 bp, Proteus mirabilis; identical to SEQ ID NO: 132723

SEQ ID NO: 316749 - DNA, 642 bp, Proteus mirabilis
atgaattttaccagaattgatctgaacacctggaaccgcagagaacattttgctctttatcgtcagcagataaaatgcggattcagcctgaccacaaaactcgatattacagctttgcgtaccgcactggcggaaacggattataaattttatccggtgatgatttatctgatctcccgggttgttaatcagtttccggagttccggatggcaatgaaagataatgcactgatttactgggatcagaccgatcctgtatttactgtttttcataaagagactgaaacattttctgcgctcttctgccgttattgtccggatatcagtgaatttatggcgggctataatgcggtgatggcagaatatcagcataatactgcattgttcccgcagggagcgttaccagagaaccacctgaatatatcatcattaccctgggtgagttttgacggatttaacctgaatatcaccggtaatgatgattattttgctccggtgtttactatggcgaagtttcagcaggaagataaccgcgtattattacctgtttctgtacaggtacatcatgccgtttgtgatggctttcatgcagccaggtttattaatacacttcagatgatgtgtgataacatactgaaataa

SEQ ID NO: 316750 - DNA, 933 bp, Proteus mirabilis; identical to SEQ ID NO: 132729

SEQ ID NO: 316751 - DNA, 261 bp, Proteus mirabilis
gtgaatgtgacgtgtaatcgtgatgtctctttacaggttgttgcaacaggaatgaataatcgtcaagtcccactacgtaatgacaatagcttatatgctgatttatatattaatgataaatctggcgaagagggagaggctatctttgtcgctaaaggcaaaatggtttctatacaagtgagttctaaattgagaaccaatggacatgttgctccagggtatttttctggctctggcgcgttgattctaacgttaccataa

SEQ ID NO: 316752 - DNA, 312 bp, Proteus mirabilis
  misc_feature (190)..(199): n is a, c, g, or t
gtgggctttaagcctatcgcaaccgaattacatgaaacggttgagggtaatcgtaatcgtgatgctcagattattcataattcctcacctattgacgctcgctacgacgaaattaaccctattttgctagaaaattgttatgtaagtgaaaatgcaatagacttccatcaaatttcaagtgaactaaatnnnnnnnnnnccaaaaagctgaatgcgttgttatcgaggggaatggtggttggcgctatttacttgatgataatactttttattcagactgggtggctaaagaaaaaattcctgttgttctag

SEQ ID NO: 316753 - DNA, 243 bp, Proteus mirabilis
gtggctaaagaaaaaattcctgttgttctagtggttgggatccaacctggttgtgtcaatcactcaattctaaccgcgcaatctattattaatgatggtttagaattagttggttgggttgctaatagaattaatcctgggttaccgcactatgcaaaaattgtagaaaggttatctcagcatattccagccccattgattggtgaaatcccgtatttattgactgaagaagtgctcgggtga

SEQ ID NO: 316754 - DNA, 261 bp, Proteus mirabilis
atgaaaaaagatgataataatagcgttagtatgtcggatttttttaataaaaaaacagggttgtttataaagtataaaaggaaagagttaggtttaacaggacaggatttagcgatcatattgaatgttagtcagcaacaaatttctcgatatgaaaatggaactacaaatattactgttaccttacttaataaaatactgatgatattggactcatcatggagctgtctcttatacacatctgacgctgccgacgaatag

SEQ ID NO: 316755 - DNA, 258 bp, Proteus mirabilis
  misc_feature (18)..(27): n is a, c, g, or t
atggctctgtctgctttnnnnnnnnnngtctgcttttctcttcataacgataaagttgtactagaaacccccaagtatgaaatcaatgctccagaaacgatatttaccggcaatgtcacagtaaatggtaattatgcggtaaatggaaatagtgattctcaagggggcgtgatgcgtcacaacgggaaagatatcggttcaacccatcgccatagtggcatacaagcaggcaaagataacacagggagtccaatatga

SEQ ID NO: 316756 - DNA, 252 bp, Proteus mirabilis
gtgacagtggaaacaccacaaccttttcatattgaaggtgcacgttttaaagtgattaatcatgatgggcaaaaaccagcgcctgctgattttggttggaaagatacagtgtggatcgaaaaacagagtgaattattagttgagctaaaacagccttcttattcccatttcccttttgtttattatagccaaatactcgaaaatgctgataaagggattgcggggcaaatggaaatcacgccatcagaataa

SEQ ID NO: 316757 - DNA, 144 bp, Proteus mirabilis
atgctactggccactcaactccttattggttctgctataggtttagttatcaccacaacgggagtgggggggtggtgttatcttattacctgtgcttatctatttatttggaatgaatgcattagcagcagtggcgaccgctaa

SEQ ID NO: 316758 - DNA, 1050 bp, Proteus mirabilis
atggaaaaagatactggtgtccatgatactattgatgatactgatgtttatgtgtacataggggacataacaagggctggatacaacaaattatcaacagaaattgaaaatagaataactgccaataaaaagcgtgaacatgtaattttatgtatttctacttatggcggcgatcctgatgcaggatatagaattggtagagctctgcaacattattatactggaaatgtatcagttcttgtgccaagcttatgtaagagcgcaggaacattagctgttatttctgctgataacctaattattggtgaccgaggtgaattaggacctcttgatatacagctaagaaaagctgatgaaatgggagagtctagctcaactcttgatatctttaaagctgtagatcaattagaatcacgcactttatcggcctttaggcaatatctcactgatataaaatatggcagaggaattagcactagactatcagcagacatagcatcagaattagttagtaatttataccagccaatagctagccaaattgatccacataaaattggtgaacatcaaagagctatgggaattgcattatcttacggtgagcgattaacaaaaaaatctaataacctaaaagaaggatcactaactaaattaatagttaactatccatcacatggatttgtaatagatagaagtgaggccaaagatcttttcaataatgtaaactgtcctgatggattgtcagccaatgtttataatatgattagccaatggatcataaaagacccaaatataattggtggcacacctttcgtatcagattttgaaagttttctaaaaagaactgctgacgaaacaccgagaatcaagaaaatgacaacagaaataatgacattgaatcagacgctgtcgagagcgaaccaaccggagatagatctggtgaaaatagtgagcactcagaacaaggaaatgaatcaggaactgaagaaagccgaaaaccgagaagtaaaagaaaaacttcatgaaagtcataggcattattatctgtaa

SEQ ID NO: 316759 - DNA, 162 bp, Proteus mirabilis; identical to SEQ ID NO: 313312

SEQ ID NO: 316760 - DNA, 1023 bp, Proteus mirabilis
  misc_feature (122)..(131): n is a, c, g, or t
  misc_feature (968)..(977): n is a, c, g, or t
atgactgtttcccgtagaacttttatcaaaggtcttgccgccagtggggctgcaatctctgtttctacacctgctcttgctacttcaggtgactttacagcaagcaaacgcactcgaccagnnnnnnnnnntcgaccagaaaatgcacctaacttattaattgtttttcctgatgaaatgcgagcccatgctctacagtttatgggggaagatccatcgattacaccaaatcttaataaatttgccaaacaagccaaagtaatgacacaaatggcatcaaattaccctctatgctccccttttcgaggcatgtttatgacaggtcagtaccctgtgcgtaatggtatcacaggtaatgcccatgattacggtggaaaagtaggtattgacttgtctccttacgcaaaatgctggtctgacgtacttaaatccttagattatagcactgggtatattggcaaatggcaccttgatgctccctatgagccttttattgaaagttacaataatccaatggaaggtcgttattggaatgaatgggctgctcctgataggcgtcatggttttgatttttggtactcttatggtacttatgacttacacttgaaaccgatgtattgggcaaacgatacacctcgtgataaaccgatttatatcgatcaatgggggcctgaacatgaagccgatatggcaatcaagttcctcaaaaatgaaaataatcaatttagagataattcaaaaccatttgcattagtggtttcaatgaacccacctcactctccttatgatcaagtaccgaaaaaatacctcgatgcttatcaaggtaaaacatcaaaagagttaaatacacgccctaatgtacagtgggacagtgaatatcaagaaggttatgggcctcaatatttcaaagaatatatggcaatggtcaacggtgttgatgagcaatttggtcgcattgtcgatgaatnnnnnnnnnngataatactctcgtcgttttcttctctgatcatggcagttgcttag

SEQ ID NO: 316761 - DNA, 462 bp, Proteus mirabilis
atgagtgcggttgatcttggggcttgtccaggaggatggacttaccaattagttaaacgtagcatgatggtgcatgccgttgataatggacctatggctccttctttaatggaaacagggcaagtgcgtcaccatcaagctgatggctttaagtttgagccgacatcaaagaatattacttggctggtgtgtgatatggttgagaagcctgccaaagtggctgcattaatgacaacgtggatagttaatgaatggtgtcgtgaagcaatattcaacttaaaattaccgatgaaaaagcgttatgaagaagttgcgcatatccttgataaaattagagctgaattagctgagaaaggcattaatgctaaaattcaggctaagcatttgtatcatgacagagaagagatcacggtacatatccaaaatatctgggctgcttatcgtcctgatcgcgagttttaa

SEQ ID NO: 316762 - DNA, 270 bp, Proteus mirabilis
gtggaaattgaagtaaatacaaaagcgaaagttgacattaaaacgctaagaacctgcattaaagtttctgacagtttcaactgtgacattcttgatgctaacgggaataaagtagaagactataactactatgttcctaactttttccccggtgaccactacggtgattatctgatgctagatatcgatatcgaaacaggaaagataacgaactggaaaaagccaacgcctgaagaattacaggaaatgctttatccggaagacgactag

SEQ ID NO: 316763 - DNA, 150 bp, Proteus mirabilis; identical to SEQ ID NO: 303094

SEQ ID NO: 316764 - DNA, 561 bp, Proteus mirabilis
atgacaagtcataaagcactggaaggtgtcaccgtagttgaattggcgacctttatcgcagtacctgcagcggggcgtattttagctgatatgggtgcgaacgtaattaaaatcgaatctccaagtggcgataacttacgctatacagcaccaacagaaggccgtccattagatcaacatgaaaacaccagttttgatttagaaaatgcgaataaacgtgggattgtgttaaatacgaaaacagaagcagggaaaaaaatcctgtttgaactattagaaaaggcggacattttcttaactaactggcgtcccggcgcaagagagcgtgcaggtttagattatgaaacattaaaacaacgttttccaaaattagtgtacgccagtgtgacggggtatggcgatgaaggtccagataaagacttaccgggctttgattatactgcattctttgcccgtggtggtatcttaggttctctgtaccaaaaaggcacagtaccgatgaatgtgatccccggtcttggcgatcaccagtgtgcattaggcttgtttcaggtgtgttag

SEQ ID NO: 316765 - DNA, 1113 bp, Proteus mirabilis; identical to SEQ ID NO: 307501

SEQ ID NO: 316766 - DNA, 138 bp, Proteus mirabilis
atgaatcgcaagatggcaccactattgctatgccttgttgccagtttagtgactgcgccaacgatagccagtgatgtaaaacaagataaaacatgcatcagcgatttgggtggctcaatctacaaggaaccatattag

SEQ ID NO: 316767 - DNA, 348 bp, Proteus mirabilis
  misc_feature (334)..(343): n is a, c, g, or t
atgttaaagttcattcttattttcttgactctgtttgtatccacagtggctcaagccagtgtggttattatggggacccgcgttgtttatcccgcaacgcaaaaaagcattaatgttcaattaaataataacgatgaatcccccgcattaattcagtcttggttagataccggaaacgcagctgcagcaccagattcaattcacgttccttttatcattactcctcccatatttcgtatggagccaaaatcagggcaaaccatccggattgtctataccggtgaatcattaccacaagatagagagtctcttttctatttaaatgtcttagacnnnnnnnnnncttag

SEQ ID NO: 316768 - DNA, 357 bp, Proteus mirabilis
  misc_feature (312)..(321): n is a, c, g, or t
gtggattttcaccacgacgatcaagaaataacaccagaaacatcacttgtattagcggaaaaacaaccattattagatctcaatgcaactttcacctctccgacacaaactaaccctgcactggcttatttacgcagtttaggctctaaacgtagtcgccaaacgatgggatcgtttttaacgatcgtggcaaaaatgattggcttctcttcaataaagcattgccaatggggagcacttcgccgccaccatattcaagcaattatcgacatgttatctgatgcggataaagcccccgccacgattaacacnnnnnnnnnncggataaagcacccgccacgattaacacttatttag

SEQ ID NO: 316769 - DNA, 354 bp, Proteus mirabilis; identical to SEQ ID NO: 296310

SEQ ID NO: 316770 - DNA, 333 bp, Proteus mirabilis
atgttattaaatgagcatcattctattgtttctttagaagatgtgggatcttttagtgcgacttattataagaatacagagttagaagatttaattacttatgaaggtactgatttaaatagtgtattaaatctagtctcaaaaacttattcggtcgctattgcgcctagatggttagttgaaagctattcagaacaattgaacattaaggcgatatcattaccttgggagaaggtagaacgtccatgctatttaatttggcatgagtcaacggcgcgagataaaggccatttatggatgaaaaatttacttagtgaggtttgtcaaaactaa

SEQ ID NO: 316771 - DNA, 495 bp, Proteus mirabilis
  misc_feature (460)..(469): n is a, c, g, or t
atgacggattacacatcagcaacaacgaccaataaagagtcagcagatatgcatttacgtaatgttgatcttaatttattaacggtatttgatgctgttatgcaaatgcaaaatgtcacacgagcagcacaggtgttaggtatgtctcaaccggcagtcagtaatgcagtctctcgtcttaagattatgtttaatgacgagttatttgttcggtatggccgaggtattcaaccaacattaagagccaaacagttatttggccctgttcgacaagcattacaattagtccataatgaattgccaggggcgggatttgaaccggaacaaagtgatcgtgtgtttagcttatctatttgcagtccattagatatcaagttagcgccaaaaattgtagagagaataaaaaataaaacccctaatattaatgtaaatattaagtcttatttgaatagtaatattnnnnnnnnnncaccaattaaaatatcaggaagttga

SEQ ID NO: 316772 - DNA, 300 bp, Proteus mirabilis; identical to SEQ ID NO: 293501

SEQ ID NO: 316773 - DNA, 1449 bp, Proteus mirabilis
atggggagtgatgtattaaatattccatgcggttgggattgtaaatctcttgttgattgtactttaagtaagaatatttcctatggaatagttcaaccaggtcaacatgatgaaaatggtatcggaataatacgtgtcaacaattttgaaaatggcgaattgaatactaaagatgttctaaaagtttctccaagtattgaatctaaatttatgaaaacaagattaactggaggggaactattacttactttagttggtagcacaggccagactgcaatagtacctaaagaactaatcggatggaatgtaccgagagcggttgcggttatccgtccgtctaaagacatcactgctgaatggttaaatatatgcttacaatccccttatactaagcactttcttgatgttagagcaaacactactgtacagaagactttaaatttaaaagatgtaaaggatattcctattcctcttccaccgatagaagagcgtaataagttagagagtattgtcgttaatattacgagtaaaattaccctcaatcgccaaatcaacaaaaccctagagcaaatggcgcaaactctatttaaatcatggtttgtagattttgatcctgtggttgataacgcactagatgccggtttttttgagcaggatttaggcttctctgaagaattactacatagagttgaagtgcgcaaagcagtgcgtaaaagtgataattttaaaccgttagcagaagatattcgtcaattatttcctaatgcttttgaagaatgtgcagagcctgcattgggacttggggggtgggtgccaagtggatgggaactcggtaatttgagtgatgtaactaatattttgagtggttttgcttttaagagtaacgagttccaaaattctgggtttggtgtcataaaaattaaaaatattggtaatgataaaagtgtcgatatatgtgacattcaacgaattgatatttcattagctgagaaagctaaacgttttagccttaaagatggagatttattaatggctatgactggtgcaaccgttggtaaatttggttttcttgttactgaaaatcaagaaccgtattatttaaaccaacgcgttgcaaagtttgaggctattgatgaaagtactgcttatttatattgtattctaaatagaaagattaccgagtcttatattgttaatacagcgcaaggaagtgcccagccgaatataagtgcaaaagatattcttgcaatgccattaattactgctccacaatctataagggaactattcaatgacaaagtaaatgatagttttcaaaaaatcattcagatgagaaagcaaaatattattcttgagcatctccgagacacactgctcccaaaacttatctccggcgagttgtctctgagtgatataaaaatagacattccagaagaaacactcatctaa

SEQ ID NO: 316774 - DNA, 348 bp, Proteus mirabilis
ttggcaggggggataaatttatatgcttatgcgccggatccattgacatgggtggatccttggggttgggctgaatttgatgttgatagttatgaaaatttgagagcagcagtaaaaggtggaaatactggtttagatgcccatcacgctggtcaaaaagcaataatagcagatcttgtttcaggatatgaccctaaaacagctccagctattctagtttctaaatcagggcatacagtatcaaaagagggagtaggtattgtttcacgcagtaaaataaattcctcgacaggtttgccgtttaaaaatgcccgagaattattggcaagggatattagggagttatga

SEQ ID NO: 316775 - DNA, 348 bp, Proteus mirabilis
atggtagctgcatatgatattaaaacaggaactattatagtaagaggaagtgttggttctgacattaaaatagaaatgcttcataaagatactgtggttctactaaaaaataaattaggtgatgttaaagttggaacaaaaacagtacattgtgataatattgtaggaggatacggtgaagtattagccgcagatcagctgattcgaaaaggggtcaaacctcaagatatcagaatttctcaggcatatcgccccagaaaagcttacggatatgatttatctactatgccagaagaagcatttgttgatacatgtaaaaattgtattaaagtttttttagatgaatag

SEQ ID NO: 316776 - DNA, 642 bp, Proteus mirabilis
atgaccattgaaactataatttctgttttaaaagagtacctagcaaaactaaatgatgaacaaaaaattgaagctctcaataaaataaaaatatcgcttcatcaaataagcccatttaaaaatgaacctactgactgtgttctttggataaagcaacaacaagttatcgctaatgactataatcccaatgtcatgtctccgacagaaaagagattactagaaacgtctctggtaaaagacggttatactcagcctgttgttgtcttacctattcaacaatccaaaaataaaccatcacaatggcaagtcgttgatggttaccatcgttatttattgagtaaaaaaaatagcttaaacaagcgaattaacggctatttacctattactatacttgatgttgaaagtcatactatggctgaccaaatggcagcgactattcgccataatcgggctagagggcaacatcaagtggcagcaatgtcggatatagttagagatttatcaagattaggttggaatgaccaaaagattggtgatgaattaggtatgtcacaagatgaagtactacgtttaaaacagattagtggcttagctgaattattttcagagcacgacttctcagaagcttggacggttaaatag

SEQ ID NO: 316777 - DNA, 642 bp, Proteus mirabilis; identical to SEQ ID NO: 316776

SEQ ID NO: 316778 - DNA, 1227 bp, Proteus mirabilis
atgtctttgaaacgtaaaattgcgctggggaaaaatgtattagaagctgctcaagagagagttcagtggatatttgatacttttgaacaaatcactctctccttttcgggagggaaagattctactgccctttttcatcttgttgccgcacaagcgcgaaaacaacatagaaaatttaatgtgatgtttcttgattgggaagttcaatattctgcgactatagatcatattataaaaatgaaatctatctaccaagattgtattgaacggttttactggatagcactccctatcaccactgaaagtggcatctctcaatatgaacctacatggacagcatgggagcctggtaaaaaatgggtaagacaaccgccagaagatgcgataactgaccctcactttttccctttttatcacccaaatatgctttttgaagattttacccctgcatttaaccagtggatcaccggtaatcatcgcagttcgattatcctgctaggcataagagcggatgaatctttaaaccgatttattgccattagtaataatcgaaagttacgttatgccgatgatattccttggacaacggcatcagcagaaggcttttattatatggcctaccctatttatgattggcatgttaaagatatctggacttatatagcgcgtttcaatttaccctataaccctatttatgatctgatgcaccaagcgggcgttagtttaagtcaaatgcgtatttgtgaaccttttgggccagagcaacgcaagggactatggttatatcatgtgctagagcctgaaacatggagtcttgcttgtgaacgagtgagtggagctgatgccggaatgttatatacgaatcctcgtaataaatcaggtttctatgggcggcatcaaattagcaaaccttcccatcatacgtggaaatcttatgctcactttttattagccagtttaccagagaaaacagcagaacattatcgtaataaaatagcggtctatcttcgctggtatgccgaacgagattacccaaatggcatacctgatgcacaagaaggtgatactagcactaaacaaataccttcttggcgacgaatttgtaagaccatcttgcgtaacgatttttggtgtagaacattagcatttagtcctactaaatcacactgttatgatcgatatttcaaacggatacaaggaaaacgaaaagactggcaacttatttag

SEQ ID NO: 316779 - DNA, 225 bp, Proteus mirabilis
atgaatgtttctgctgagattgttagcgatattgagacaattaaacagaatttagttaatcaactcacagaaaccgtaagatggacagcaactatggcgctatggtgtcatttaggctatcacaattttattgaacttggtgatagcaagtcattgtattatttagcgaaaaattcacatacgctaaaagataaaaatatattgcatgttaatgattatatttaa

SEQ ID NO: 316780 - DNA, 123 bp, Proteus mirabilis
atgtcccaaaaaccttgccgtattattttaaccggagctcccagcttaacattaactcagcaaaagcgatcggatcaatccaaggaagggctgaaccaccaatatgactttgatcttgaataa

SEQ ID NO: 316781 - DNA, 450 bp, Proteus mirabilis
atgaatattagcgacgtacttactctggcatgtacacataacaatgtgcattgcacaagtaaaaaacgcgcgttagaaattatcagtgagaatgcagctcaagcactgaatttaccagaaacactgatttttgaggctttattaacgcgtgaaaaagtcggtacaacagggatagggagtggattggctatccctcatgggcgtattgaaagtgatgaaactgaaaaagttgttggtgtgtttcttcacctaagcgagcctattgccttcgacgctattgataatcaacctgtcgatttgttgtttgcattactcgttcctgcaacacaatgtaaggaacatttacacacactgtctttgattgcaaaacagttggctgacaaaaatttatgtcgccgactacgctccgcacaaagtgatgaagagctttatcagattatcacagaataa

SEQ ID NO: 316782 - DNA, 645 bp, Proteus mirabilis
  misc_feature (627)..(636): n is a, c, g, or t
gtgacctcatttgctgatcttcatgcacttcctgctgagcaacttactaatcttaatgagcttggctatttaacgatgactcccgtccaagaagcgtctttacctgctattcttgccgggaaagatgttcgagcccaagcaaaaaccggaagtggcaaaacagcagcttttggtttaggtttattgcaacgtattgatgcaaaacaatttaatactcaatcattagtattatgtccaactcgagaattagctgatcaagtcgctaatgagttacgtcgactggctcgttttctgcctaacattaaaattctgactctgtgtggtggggtgccttttagcattcaacgggattcattaattcatgctgctcatattattgtcgcgactccggggcgtttattagatcatttaaacaagcagactgtcacacttgctgatgtaaaaacattggtacttgatgaggcagatagaatgctggatatgggattttttgatgatattagcgacatcatttctcaaatgtcggcacaacgtcaaactttgctcttttctgcaacttggccggatgaaatcgctaaaattagtcgaaaaattcaacaagatcctgtcactattgagattaattcnnnnnnnnnnatcctgtga

SEQ ID NO: 316783 - DNA, 210 bp, Proteus mirabilis; identical to SEQ ID NO: 310015

SEQ ID NO: 316784 - DNA, 453 bp, Proteus mirabilis
atgagtggaaaacggatttcggggcagtcgattgattttaatatggatggcgatttagtccatgctgacaaagtgggtttaactgttacagataacactgccgtcgctcaaacgaaaggggtgcctgatgggtttattaatggcgatgtttctgctgaaggcgaaatcgaattagcgacaaaatatttatccattttcactgccaaagcacgtcaagcaggttcatggcgtgcaattccaacagttgaccttatgtggtacgcgaaagcaggtacggaagaatttaaggttgaggcgtttggttgcaaattaaatttcactgatattttggatgcagaatcaaaaggcggtgctgttctgacgcataaaattaaatatattgtcacttcccccgattttgtgcgcattaacggcattccatatttggaatcagaacttactgacaaactgtaa

SEQ ID NO: 316785 - DNA, 849 bp, Proteus mirabilis
  misc_feature (828)..(837): n is a, c, g, or t
atgactttttctatgatagcagtatctacaaaacgattacccatcaacatggcagataatctttatcgtcgtggagtgttagctattgctatcacgactgttttattcccttatactgttcttgctgaagatatttttaatcctgaagcacttaatttaggtatcgaaaatcacgttgcagatattaacagtctgaattacctgtcctatgcaggaggacaacttcctggtgtctattctgtcgatatttatcttaacgataaacttatcgataatcgtcaaattcgttttatttttgatgacgataaaaaagtgctggcgcctgaaatcagtaaacaggatttactcaattggggagtcaaagggtccgttacagacgcgtttagccaacaacctgatagtagtaaaataacggatattgctcgtgttattcctaatgctacatataaatatgatttttcacgtgcgcgattatcattttcgatcccacaaattgcattatataactatgggcaaggttatatatctcccacagaatggaatgatgggattaatgcagcctttattaattacacctatcgtcagaataaatattggtatcgagaccaaaaagacagtgacaatatctttttaggattgcgcagtggtattaatctaggcgcttggcgtgtacgtaatcacagcacttacaacaaaaatagtgataacgccgcagaatggaacagtctacaaacttacgttgaacgcgatatccgccgtttaaaaagtcgattaacactaggtgaaaccgcatcaagtaatgatgtgttagaaagtgttccttatcgnnnnnnnnnngtattaaattag

SEQ ID NO: 316786 - DNA, 282 bp, Proteus mirabilis
  misc_feature (246)..(255): n is a, c, g, or t
atgccttttactcttggtcaacgttggattagcgatacagaaagcgaacttggactaggtactgttgtggcaattgatgcccgtatggtgaccttactttttcctgcatgtggcgaaaatcgtctttattcccgccatgatgccccaataacgcgggtgatgtttaatgtgggggatactgtcaccagtcatgaaggctggaagctcgccatcgacaacgttgtggaagataatggcttacttatnnnnnnnnnntaccgaagagccagcacaactgcgtga

SEQ ID NO: 316787 - DNA, 309 bp, Proteus mirabilis
  misc_feature (245)..(254): n is a, c, g, or t
atgtttgggttaagtgcctttgatttggcgcgtatccaatttgcgtttaccgtttctttccatattatcttccccgcaattactatagggctagccagcttcttagctgtcttggaaggcttatggctaaaaactcgcaataaggattatttagcgctattccatttttggtcaaaaatattcgctgttaactttgctatgggcgtcgtctctggtctcgttatggcatatcagttcggtactannnnnnnnnnactaattggagctttttctccgattttgccggctctatcaccggccctttattga

SEQ ID NO: 316788 - DNA, 567 bp, Proteus mirabilis
atgagtgccgaaactatttttaatctcggcacaataggtaaagcaggtcatgctgataacactgctattgtgaaattaaaacaaaccgccccattcacagcattattaaaaatggatggtgttaaatatcgtcaaaaacaattagccgagtggttagaagattggcacgattatttaatggcatttgatgctgacggtaatgttttagatatcaaacaagctatttctgctgttcgtcgtattacgattgaatcaacacgctctgctgaacatgaagatgctgattttagtgctaaacgctcagtgttagaaaatgttgaagcaagaagcaaagacattatgcctgctacattccagtttacttgtactccttatgacgaattaaaagaacgtagcattaaattacgttatagcgtactcactggtgatgatattcccgttttagttcttcgaatcattcaacttgaaaaacttgaagaacaaatcgctcaagagtttcgagatatgctttgcaatgaattcgatgaaagcaaaatcgaaacattcattggtaaattttcagcgtaa

SEQ ID NO: 316789 - DNA, 405 bp, Proteus mirabilis; identical to SEQ ID NO: 308569

SEQ ID NO: 316790 - DNA, 1425 bp, Proteus mirabilis; identical to SEQ ID NO: 52792

SEQ ID NO: 316791 - DNA, 237 bp, Proteus mirabilis
atgaccaagctgaaactcggcccgctgcccgacgacaagcccgtcaaggtgacggtggagctacccgcgccgcttcaccgcgatctggccgcctatgccgaggtgctggcccgtgaaaccggcaggcccgccgccgatcccgtcaggctgatcgtgcccatgctggagcggttcatcgccacggatcgcggtttcgccaaggcgcggcgtgcgcctgacaaagcgtcgtcggcatga

SEQ ID NO: 316792 - DNA, 1257 bp, Proteus mirabilis; identical to SEQ ID NO: 52793

SEQ ID NO: 316793 - DNA, 1167 bp, Proteus mirabilis
atgactacaccattaacttggcatgatgtaataggtgctgaaaaagaaaaaccctattttcagcaaattttgtctcaagtcgcacaacaaagacaagcaggcaaaataatttatcctccacaagaagttaaggttgatagattagtcgtacagatcgtttttgaatctttccatatagaggtgcagccagtctttgagactgatgaaggccattttaaatatcctgatactaaagctaataatggtaatggaggatggcgattaactaaaccacgaatggaaattaccgagatgaggaatttccgtaacaataaaagtcgtaatcttcataatctttgccgcatgttgcgagcttggaaaaacagaaacaccgttgacatgggggggcttcttattgacacattagcttggagatttctgaaacaaacggatgattatgatgatactggaatggtcagttatgggcttatgtgtcgagacttctttgattttttgcatcaagaggatgaacatgagcattatgcagcgataggaagtgggcagagagttaaggtctataaaaattttcagcggcaagccaaaagagcctttaaattatgtacacaagcaattgaggcttatgagaatggctcgacaaagaaatgccatgaacactggatagaagttttcgggttaactttccctaaggcaactgtggaaatacaagattctatggggttggaatcagctaaattcattaatgaatccagtacaactgagtcatggcgcaaaacggaagagtttacagatgaaaagtttgatgatgttgatataagataccctctcgaagttaaatgtattgtcaaagaaaatggatatagggatcgttcaattagggcttatctgtcggatatagctcgttcttggttaccgccacataaaactttatcattttcgattaatcaggcaagtttagatctcattccagaaccttatgatatttactggaaagtcttgaatagaggtagagaagctgaacagcttgatgaaattcgaggccaaataattttaggtgaagtaactcatacggaatatacaaaatttagaggcgctcataaggtttggtgttacatagttaagaataatatagtagttgcccaaaatgttatcgatataccaatcgagtaa

SEQ ID NO: 316794 - DNA, 1389 bp, Proteus mirabilis; identical to SEQ ID NO: 52739

SEQ ID NO: 316795 - DNA, 468 bp, Proteus mirabilis; identical to SEQ ID NO: 52738

SEQ ID NO: 316796 - DNA, 984 bp, Proteus mirabilis; identical to SEQ ID NO: 52737

SEQ ID NO: 316797 - DNA, 891 bp, Proteus mirabilis
atgatgaccttagttcacactctcgccgtcgccgaatatctgaacttccgccacgccgccaatgcgctcggcgtggcgcaatccagcgtcagcgcgcgcgtgaaggcactggaggacgatcttggcatcctcgtgttcgagcgccatgcgcgcggcgttcgcctgacagaagccggacgccattttgtcgagcggatcgcggccggcatcgaccaacttgaccatgccgtgaagaccgccggcatggcggcagccggcgaaagcggtcggcttcgcatcggtatccatgccctgattccacacagcttcctcgcaaacttgatcgaccaataccgcgaagaccaccccggcatcgaggtcgaaatcgccgagggcacggcccgcgataccgtcatgcagcttcgcgccgacatgctcgacatagtttttgtggccggcacgcccgaactgcccgactgcaattcccgccgcatctggacggaaccgcgggtcgccgttctgtcggagcggcaccgtctcgccgggcaggcaagcgtcacatgggccgatctggtcggcgagacgttcctagtccggcatggcggcaccggcccgcaagcgcatgaccatatcgttttgcgcctcgccgggcgctggcccgcgccgtcgattctgcgtttcgacgtggggcgcggcaccctattgtccatggtcggacaggggttcggcatcaccatcgtcggggcagccacggcgctgctgccaacgtccggcgtcgtcttcctgccgttcgccgacgagccggaaccgattacgttctcggccatctggtcgccgtccaaccgcagcgccacgctgaaaaatctgctctgccttgccagccacatggggcagatcgcccgcaccgactga

SEQ ID NO: 316798 - DNA, 342 bp, Proteus mirabilis
atggactcacctgaatttgcacaagatcctcatggcgacaggatactctttgattcccatatgagacgagctgaacccagaacccccgaacgttatagcgccaaactgcgtcgtcgcagttatagctactcattagggctaacaccgtcagggcaattagatatggggcttgtctttgtctcatttcagaataaccttaaaaaaggctttattgatacgcaaaagcgtttaaatggtgaaccgttagagcgctatataaaaccttttggtgggggttattacttcgtattacccggcgtcacacaagcaagcgatatattagctaaaggactatttacttaa

SEQ ID NO: 316799 - DNA, 480 bp, Proteus mirabilis; identical to SEQ ID NO: 52740

SEQ ID NO: 316800 - DNA, 984 bp, Proteus mirabilis; identical to SEQ ID NO: 52741

SEQ ID NO: 316801 - DNA, 423 bp, Proteus mirabilis; identical to SEQ ID NO: 52742

SEQ ID NO: 316802 - DNA, 2493 bp, Proteus mirabilis
atgatgaaccttgccgaataccgccgcaccgccacccggctcgccgattatctgccatgggccgcattggtcggctccggcgtcgtcttgaataaggacggctcattccagcgcaccgcgaagtttcgcggtcccgatctggattccgccgtcgcggccgagctggttgccgtcgccggacgcatcaacaatgccgtgcgccgcctcggctccggctggagcatcttcgtcgaggcacagcgcagtgaggccgcgacctatccagacagcacatttcccgatcccgcgtcggcgctggtcgatgccgagcgcaaggccggcttcgaggaagcggacgcgcatttcgtgtccggctatttcctgactctcctctatctgcccccggccgaggaagccgcccgagcagaaacatggctctatgagggccgcgagaaagcgggcgtggacccgtgggagctgctgcgcgccttcatcgaccgcaccgaccgcgtgctggccttgctcgacggcttcatgcccgagtgccgttggatggatgacggcgcgacgctgacctatctccattccaccatctcaaccaaccggcatcgcgtgcgcgtgcccgaggtgcccatgcacctcgacgcgctgctcgccgaccagccgttgaccggcgggctggagccgcgccttggcgacgcgcatctgcgcgtcctgaccatcgtgggattccccaccgcgacgacgccaggcctgctcgacgaaatgaaccgccttccgttcccctacaggtggagcacacgggcgatcctgctcgacaagaccgatgcgacgcggctgctgacccgcatccgccgccaatggttcgccaagcgcaagagcgtcgccgcgattcttaaagaggtcatgaccaacgaggcgtccgctcttgtggacaccgacgcggcgaacaaggcgctcgacgcggacatggcgttgcaggagcttggcgcggacgtggcgggcatggcctatgtcacggccaccgtcaccgtttgggatgccgacccgcgcctagccgacgagaagctgcgcctggtcgagaagatcgttcagggccgcgacttcaccgccatggccgaaaccgtcaatgcggttgacgcatggctcggcagcctgcccggacacgcttacgcgaacgtccgccagccacccatcagcactttgaatctcgcccacatgatcccgctttcggcggtgtgggcggggccggaacgggacgagcatttcggtgcgccccctttgttcgttggaaagaccgaaggctcaaccccgttccggctaagtttgcatgtcggcgacgtaggccacacccttgtcgttggccccacgggcgcgggcaaatccgtgttgctggcgctcatggccttgcagttccggcgctatgcaggttcgcaggtgttcgccttcgacttcgggggcagtatccgcgccgccgcgctcgccatgggcggggattggcacgatttgggcggtggcctcacggaaggagacgaggcgtccgtttcgctccagccacttgcccgcatccacgacacctatgaacgcgcatgggcggcggactggattgccgccatcctcatgcgcgaaggcatcgccatcacgcccgaggtgaaggagcatctttggacggcgctgacttcgctcgcctcggccccggtcgaggaacgcacgatcaccggccttgcggtgctgttgcaatccaacgatctgaaacaggcgctccggccgttctgcgtcggcggtgcctatggccggctgctcgacgccgagacagagcatttgggatcggcggacgtgcaggcgttcgagatcgagggccttgtcggaactggcgcagcgccggccgtgctgtcctacctgttccatagcatcggcgaccggctcgacggccgccccacgctgctcatcatcgacgagggttggcttgcgctcgacgacgaagggttcgccggccagctccgcgaatggctgaaaacgctccgcaaaaagaacgcaagcgtcatcttcgccacgcaaagcctgtccgacatagacggcagcaacatcgcgcccgccatcatcgagagctgcccgacgcggctcttgctgccgaacgagcgggccatcgaaccgcagatcacggccatctatcgccgcttcggcctcaatgacaggcagatcgaaatccttgcacgggccacgcccaagcgggattattactgccaaagccgcaggggcaatcgcctgttcgagcttggcctgtccgaagtcggccttgcgctctgcgccgcatcctcgaaatccgatcagaccgaaatcgcgcgcatccatgccgaacacggaagcgacggcttcctcgccggctggctgcgcgagcgcggtgtcgagtgggcggccgacctgatcccgaacctcaccaatcttgccgaccggccggaatacgccgcgccggctcggctcgatacccaccccacagaggagattcttccatga

SEQ ID NO: 316803 - DNA, 921 bp, Proteus mirabilis
atgagcatcccaaaagagcaatataattttaacaaattacaaaaacgcttacgccgtaacgttgggcaagctatcgctgattttaatatgattgaagatggcgataaaatcatggtgtgcctttctggcgggaaagatagctatactctcctatctatcttaatgaatttgcaaaaaagcgcgccaatacaattttccttaattgccgttaatttagatcaaaaacaaccgggcttccctgaacatattttacctgaatatcttgagcaactgggtgtagagtataaaattgttgaagagaatacttacggtattgtaaaagagatcattccagaaggtaaaaccacctgttcactttgctctcgcttacgtcgtggtattttataccgtacagccaccgaagttggggcaacaaaaattgctttaggtcaccatcgtgatgatattttagaaacgctgtttctgaacatgttttatggtggaaagctaaagggcatgccacctaaattaatgagtgatgacggaaaacatatcattattcgtccattggcttatgcccgagaaaaagacattgagcgttttgctcaagcaaaaaatttccctattattccctgtaatctttgtggctctcaacctaacttgcaacgccaagtgatcaaagagatgctaagagattgggataaacgttaccctgggcgcattgaaaccatgtttagggcaacccaaaatattgttccgtcgcatctatgtgatacccaattatttgactttgctaatatcaaacagggtgatgagattattaacggcggtgatctagcatttgataaggatgatattccaacaagccctattctttccaatgatgaagatgagcgtcctgattttagccaagctagattggatgttgttgaggtaaaataa

SEQ ID NO: 316804 - DNA, 504 bp, Proteus mirabilis
  misc_feature (474)..(483): n is a, c, g, or t
atgacacaaaatttacctgataaaatcattgttaccgcatccccctcacaagatccgcaaggaccaatttcaggtttagtggcaacaaaaacactatcaacaaataaaatacttagtgatatagataagacaccacaatcaatcagtgtcattacacgtgaccagatggatgcgcaagatgtcagttctgtctctcaagcattgcggtatacacctggcgttttcactgaatatcgcggcagttcaaaccgaaatgatgaaatttttattcgtgggtatagctatgccccccgttttcttgatggacttagttatggtatgggagcctcatcttctacaggagctattgacccttggctattagagagagttgagctgatccgtggcccatcttctgttctatatggtcaattaaatccaggtggtcttgtggcaatgaccagcaaaagacccacttcaacaaccattaatcannnnnnnnnnatcatattcaagcacgtgtag

SEQ ID NO: 316805 - DNA, 828 bp, Proteus mirabilis
gtggctgtcgccggagcggacggcatgggctgtcatggtgatgccgtggttgagggcctgccgacgctgcatccgctgcgcccatgcgggcgggctgctggccgtgctggatggcgcggctgcggcatcggcgcttgcgccgccgaccgtgcccatggtggagctgccgccggtcgcgccgaaccctgccttagcgccagcggagaagctggatttgacgctttcggttgctcgggatgttgcgctggaggcagcgcgtttgagcggcgagatggcggccgaacctgccgctcgggcgacaccgccgaggccagaggcgacgcctgccgccccggactggccgagcgagccgacgctataggcagcggtcgccgctcccgcggcggtagcgccgccgcgaacggccgcggctccaccagacagggccgcagcgccgcccttggcggcaagcatggccccgccaccagccgccgcaccgcccgcaaggaccatgccgccggcagcgaggccggttcccacggctacgcccgcgccaagctgcgggccgcccgagacgatgccgttggcgatgccggggccgaagatgccgaggccgagcagcgacagcgcggcgagcacaatcgccatggcgtcgtcgatggtcggggttgccccgccgaaaccggccgtgaattgcgaaaacagggtgctgccgatgccgatgatgacggccagcaccagaaccttgatgccggaggacaccacgttgcccaagaccttctcggccatgaaggcggtcttgccgaacaggccgaaggggatcagcacgaagcccgcgagagtcactaa

SEQ ID NO: 316806 - DNA, 558 bp, Proteus mirabilis
atggccttcggctcgctgatcctttcggccggcttcgcctcggcgctggtctggcagtccgcacgcggaaccgtggttccttgggtcgtgcaagtggacaatctcggtcaggcgcagaccgtcgcgcccgccaacgccgactatcgcccgaccgatccgcagattgcgttccatctcggccgattcatcgagcaggtgcgcgcaatcccggccgacgcgatcattgtccgccagaactggcttcgggcttatgaatggaccacggatcgcggcgcggcggcgctgaacgactacgcccgcgccaatgatcccttcgtcaaggtcggccggagccaagtcgccgtcgaggtgtcgagcgtcatccgggcgtcccccaacagcttccgcgtcgcgtggaccgaacgccatttcgagaacggccagctttccagcacggaacgatggacggccatcctcaccatcgtcatccagccgccgcgcgacgccgagcgtctgcgcgccaatccgcttggaatctacgtcaatgcaatttcgtggtcgcgggagatgagccaatga

SEQ ID NO: 316807 - DNA, 513 bp, Proteus mirabilis; identical to SEQ ID NO: 52840

SEQ ID NO: 316808 - DNA, 1002 bp, Proteus mirabilis
  misc_feature (967)..(976): n is a, c, g, or t
gtggcaatccattcaagagctgggcaacatactcgtcaaagcgatctgattaatgtagcgcaattaaccgcacaatattattcactaaaaccgcaagcaaatcagaatgctcatcgtgtgaaatttggtacatcgggtcaccgaggcagtgccaaacgtcatagctttaatgaagcacatattctagcaattgctcaagctattgctgaagtccgagctaataatggtgtaacggggccttgctatgtaggtaaagatacccatgcattatctgagcctgcttttatttcggttttagaagtgcttgctgcaaataaagttaacgtgattattcaagagaataatggttataccccaacgcctagcgtttccttctctattttaacttacaatcaagggcaccaagacattgctgatggtatcgtcattacaccatcacataatcctcctgaagatggggggataaaatacaatccatcaaatggtgggcctgctgatactgatttaacctctgtgattgaaaaacgcgccaatgaattattggaaaataatttatcgggggttaaacgtctttcttatgatgatgcattagcgagtggttatattcacgagcaagatttaattatgccttatgttaaagcgttaggtgacgttgttgatatgaaggcaattaaaaaagcgggtttgaaattaggtgtcgatccactgggtggttcaggaattgaatactggaaacgcataggtgaatattacgaacttgatcttgagttggtaaacgatcaggtggatcaaactttccgctttatgacattagatcatgatggtgtgatccgtatggattgctcatcaccttgggcaatggaaggtttattgcaactgcgtgataaatttgacttagctttcgccaatgaccctgattacgatcgccatggtattgtcactccttcgggcttgatgaatcctaacnnnnnnnnnnaacgtttttatttagtgcaaaggtaa

SEQ ID NO: 316809 - DNA, 444 bp, Proteus mirabilis
atgcgttttttaaaattaccttttatttattggctgctactcaattgcatcccatttattggctttgaactacactcaggcaatataaaacccggtgtttttttctatttaggtgctctaacgatcatcacttcagggatttggctatttttctgcctttacttttttatcaaacataatacatctcctaaccctcaccagacaccgcgccagttagtcaccacaggtccatataaaataagtagaaatcctatgtatcttggctttctcgatattagtattgggctgttttttatttttggtaactggggatttttaggggctgcgcttgccttctactttattaccgatcgctatactattgtgcaagaagagaaaatattaagtgagcggtttccacaagcgtggcgacaatattgccgccacgttcgacgctggatataa

SEQ ID NO: 316810 - DNA, 414 bp, Proteus mirabilis
atgagtttgttatttacgcctaataaattaggacctcatcaattagacaaccgtattattgttgcaccaatgtgccaatattctgcgcaagatggaatacccacatcttggcatacaatgcactatgggcaattagcattatcaggtgccgctttagtgattatagaagcgacggcggtagagcctcgaggtagaattagttataaagatctcggattatggtctgaggaacatggtcgcgcattaaaacagcttattagcgatataaaacagcatactaatgctaaaataggtatacagttggctcatgcggggcgaaaagcatcaacatcgttgccatgggaaggtggaaaatcattggctcctgatgatgagaatggctggcaaaaagtagataaaaaacgcatttgttga

SEQ ID NO: 316811 - DNA, 420 bp, Proteus mirabilis
atgtgtgtgggagtaagaatatcggcgactgattgggttgagggaggatgggatctggaaagttctatcgcattaactcaacatcttgaagatctcggttgccattatattcatgtttcttccggtggcttatcagacaaacaagccatcaagctaggacctaattatcaggttccttttgctcaagccatctataatgaaacacaattacccgtgattacggttgggttaattacagagccagagcaagcagaagctattttactgactgaacaagctgattttatcgcattaggtagaggaatactttatgatcctcgttggccttggcatgcggctgaaaagttaaagcagaccattaaagttgctccgcaatatttacgttgtgcacctcatggtagtaaagaattttttaaatag

SEQ ID NO: 316812 - DNA, 627 bp, Proteus mirabilis
atgacgcccgtgttgcccatggtcagcgcgcctcgctgcggtcacggccgaggaagcggtcgcgggatgctgcccatgcggcgaggcaatccgtatcgctcgccgccgcctcgccaagttgctggcaacggcgcagggtttcgcgcagcggatcggccggggtttggaaggccggcgcagggggcggcgcggaaggttcgtccttccgcgccatgtcgattgcggtcactgtcaaggcaatcgcaacgagcaccacggccccaagccgggccagcatcttgccgtccatggcgagcctcccggtcagttgccgttgttgaacatctgcgcgttgccgggctggtagccggtgccgggcgtcaggaaccgctctcgccggatgcggccctgttcggcggcggtcgcgcgctcggcttcggtcagcgcgtcggcgcggccgttcgccgagatgaccgcgatcagatcggaaagctgctgcgactggagggcaaggagctggttgccggcctgcgttgcctgcaatgccccggtcgcaccttggctctggccgaccagggccgccatctcggcgcggttgctgtcgatgttgccgaccgcccctgcctgaacgcgcatcgcgtcctgtaa

SEQ ID NO: 316813 - DNA, 663 bp, Proteus mirabilis
atgacagaagaacgcaatgggatttacctccgaattaatggtgatcaatatcggcatatttgggtggttggtgatattcatggatgctttgatttgctgaatgaaaaattacaacaaattgattttgataaagaaaaagatttattaatttcagtcggtgacctaatcgataggggggatcgaaacgtagaatgcctagacctgattaatgaaaaatggtttagggctgtacgtggcaatcatgagcaaatggcgattgatgttgttatgcacaaaggcaatagagattgctggatgatgaatggtggcctttggtttttcatgcaggactacgataacgaagttttatctagagcctgtttagctaaagcggagcaactgccactgattatcgaagtaaacgctgatggcaaaaagacagtcattgcacacgctgattatccatccgatgaatatgatttcggtaaaccagttgatgaacggtatgtaatttggagtcgtgagcgtattggcgacgagaatgtgcgtgagattaaaggtgcggacctatttctatttggtcacacaccaatgattaaaggtatcgaaaagcgcgctaatcaggaatacatcgatactggggcggtgtttggttatgggctaaccatgaggcaaatcaaatga

SEQ ID NO: 316814 - DNA, 216 bp, Proteus mirabilis
atgagtaatcaaaatgaaggtggattttcaggggttattggcacggatggtaatttgaacctagaggagcaagtagaagcattagagcttgcattactccagcaaagtgaagctatcctcaccttaagcaatagaataggtaagtcagcagagtgtggagatgatgttatttttgtagataaattaacagcacccccaacaaagctccgttcttaa

SEQ ID NO: 316815 - DNA, 243 bp, Proteus mirabilis
atgccgattgttgaaaaagataaaacactcagagaaatacaagatgaagttgcagcacttcgaatcgcattcggatatctcggatgtgtaattccgcgtgataatgcacttgctctcgcaggtgtgattacggcaacagttgatcaccaagggtttgatgatagtgtaaaagaaaaactaaaacatcttgctgaacaattaaaagaaaacgccctggagcaaggtaagtttactcaattgtag

SEQ ID NO: 316816 - DNA, 420 bp, Proteus mirabilis
atgatagagtctattaaaaatattcgacaacatagagaaatccccctatctaagggggttgagtgtgaagttaaattcagcgaatttgataattttatcccttattttgctttatcagatgattgtgagttattaggacgcgaggtctatcaaaaatgtatatccggtgattacggtgacatattaccgccactgcctttaactgatgaagagcttattgcgatagaaaaaaatacacagcaagccctgttacaagaggcattaaatgttatagccccccttaaagatgcacaggatggcggatatattgaacatgaagatattcctcgtttaattgcgtggcaaaaatatcgctatgaattaacaaaagtagatttatcgacttacccagatattaaatggccccaaaaaccagagtag

SEQ ID NO: 316817 - DNA, 222 bp, Proteus mirabilis
atgaaaaaagaatggtatacagcaaaagaattagtagggcttgcagggttacctaattctccacaaggggtcaatttaatggcacgccgtgaaggatgggaaaatcgccgtaagcgtggagtacaaggtaaagccgttgagtactcggttaaaagcctccctgaagaggtggtgagtgtgttagcggcgcatgagcgagcctcctgcagaatatttatctaa

SEQ ID NO: 316818 - DNA, 441 bp, Proteus mirabilis
atgaatgtatttacaataggatttacaaaaaaaagcgcagaacatttttttaatgaactgaaggataacaacgtaaaaaaaataatagatgtaaggttaaacaatatatctcaactttctgggtttgctaaaaagaatgacttaatattctttttagaaaaattgtgtggtattgactacatacatttagatgagctggccccaacaaaatcaatactagaaccatatcaaaaaaagaaaataacttgggaacagtatgagattgaatttattaacctcatggaaagaagaagtattgaaaaatcaataaacatagcagaaatggataaatcatgcctactttgcagtgaagacaaacctcatttctgtcatcgcagacttgtgctacaatacttaaactcaaaaatggacaatatatttaaagtaaggcacctgctgtaa

SEQ ID NO: 316819 - DNA, 594 bp, Proteus mirabilis
atgaacaacttgttagttatctatcatgaagacttcctttgctatgaaaagctaaaaaggaaaataaaaaacataaccataaacatggatgatttcaaaataaccacaactcacgataaacgagggatcttattaaggttatcaaccgaaattactttcgaattaaacattgtaaaagaagtaaacttaaacgatatatctcattcaattatattcaactgctttaatgaatacgatgagataataacagaaataaaggaaaaaaacattccaattcggattataaatctaaagctagctaaagcaataaacataaaaggcacaacttttggcaagggtagtagcgaaacatatgaatatattggaagaggttctaagtggggaaatccatattcaatgtatgaaaatggcgatgatagggatgaagttattaggaagtttaaatacgacttcgattttgataagttcttgaatgtgaagaaagaggacttcattcatctaaaggggaaaaaattaggctgtttctgtaaacctcaagcttgtcatggtgatgttattgctgattatctaaattctctcgatgatggagagtaa

SEQ ID NO: 316820 - DNA, 471 bp, Proteus mirabilis
atgcaacaagccatccgtatgagaatcgaagccgatagcgcctcaggcaagatgacggaaacggtcaggcagtctgttaatgcggccttaacccaagtcgagaaagagttgaagcagactgggctagagcagcagaagccagctacagatgcgtttaatcaggctgccggcacggcgaaagcgatgatccatgagatgcgccgcgagatgtcgcgttatacttggaagtcagcgatttatattgcaatgacgatgattgcagttatgggaggttgtctctggggtatgtattactttatcgacagcggctatgcgcgtgttgcagaaatgcagcatatggaggccgtctggcagaagaaagcaccattagcggatattaagacgtgtgacggaaatccctgcgttaaagtcgatatcagccgaacctttggcgataaaaaagatacttatctgattataaaaggtaaataa

SEQ ID NO: 316821 - DNA, 183 bp, Proteus mirabilis
atgaacaacataagtcgctatagaaaaaaattgggaatcacccaaaacgacttagcaaaagagcttggatgtacaaaaggaaatgtcagtcattatgaaaacggtagacgtaaggctgacttctttaataaaaaaggtgtgaaagtcacaattgatgacttgtttccacctaaagttgcttga

SEQ ID NO: 316822 - DNA, 348 bp, Proteus mirabilis; identical to SEQ ID NO: 306443

SEQ ID NO: 316823 - DNA, 468 bp, Proteus mirabilis
ttgcctgaagatgaacctctactaaaaacctttattaatcaagtgaccaaagaagatctctattatcgctattttagtgagatcagcgaatttacccatgacgatctcgctaatatgacacaaattgattacgatcgtgagatggcttttgtcgccattcgccaccctcacgatgatccagaaattattggtgttgctcgagctatggcagatcctgataatcaacaggctgaatttgctatcttggtacgctctgatttaaaaggtaatacactgggtcaccaattaatgatgaaattaatcaactatactaaggcgcatggcatcaaacggttaactgccattaccatgcctgaaaatcgtaatatgataagtctagctaaaaaattagggttttctgtggaagtacagtttgatgaaggaatagtcaatctcaacttgcttcttgatcctctcagtgatgtatag

SEQ ID NO: 316824 - DNA, 330 bp, Proteus mirabilis
atgtcatcaaaatcctactttaccaatgaatcagaatacttaaatgagctgactgagcaagttgccaaagaaaaaccgcaacttgttaatttgctttcgcacaatgttaaagatcctgatacttcgcggattatggatgggctatcttatttatcgggtaatttacgccagcaaatagatagacaatttcctgaattaactaatagtttagccaatatgctttggccaaactacgcacgccctgtgccaagcatgacgattgttgaatatcatcctaattatgctcagtgccaacaacgcaacaaaaatttcagcaggacaaccctttag

SEQ ID NO: 316825 - DNA, 459 bp, Proteus mirabilis
atggggcagacacagtttatgccatcttcatttttgacttacgctgctgatggcaatggtgatggcaatattgatatatggaatagccgtgaagatgcgtttgcttcagccgctaattatttagcaaccgagggatggcaacgcgatctcccttggggggaacaagtcagtttacctgctaattttaatcaacagttggaaggtataaaaacagagcaacaaaaaacggtcgcacaatggaaggcgctaggggtgaaattacccgctaatagccaattaagtgatgatatgaaggtatggctgataattcctgatgatgatttgcatagaagttatttagtcacccaaaatttccgtactatcatgcattggaatagctcttacttttttgctttgagtattgtgacgatggctgatggcgttgccaataaaataaatacactgccaactcaacactaa

SEQ ID NO: 316826 - DNA, 330 bp, Proteus mirabilis
gtggttccagagtatgagcgcctaaaaggggcttatgaattactgtggcaaatgccaagtatcgaaggttatttgcagttagtcggtattatgcaaaagtttgtcgaccaagcgatttctgccaacactaactacgatcctactcgtttccctagtggtaaggttcctatgaaccagctgctaaaagatttgctgctcgcctataaatatggtgtaaaaacactctattatcacaatacccgtgatggtgcagaagatgtacaaggtgatctggaagaagtcgttgaaacggcagattcagattgtgaaggcggcgcgtgtaaaatttaa

SEQ ID NO: 316827 - DNA, 618 bp, Proteus mirabilis
atgaaagtgaaaaccaaattattatcattacttgtgatgggtgctctcagtgcccctgtattggcagcaacacccgccaatacattgattgtagtacaaggccttgatgatattgttagccttgatcctgccgaaagtaacgaattatcaagtattcagaccgtaccaagtttatatcaacgtattgttcagcctaaccgtgacaatccagaaattaacgagccaattttagtcgagagttggcaggctcaccctgaacaaaaatctatcgtctttaaaattaaacaggatgcaaaatttgcctccggtaatagcgtacgcccagaagatattatcttctcttaccagcgtgcagtgacgatgaataaatcccctgcttttattttaaatgtgctaggttggaaagcagataatattaataccctattgaaaaaagtcagtgataaagagattgaagtacgttggacagcagatgttagccctgatgtggtacttaacatcctttctacacccatcgcttctattgttgatgagaaattgattgccgcacatattaaaaataatgactttggtaataattggctaaaaatctcgccaagccattgtgttagaagctaa

SEQ ID NO: 316828 - DNA, 744 bp, Proteus mirabilis
  misc_feature (721)..(730): n is a, c, g, or t
atggagaagcatgatgatgatatgcctaaagataaaatacaacaagccaaacgttggcgcttgattttaggccaatacgctgatgatgctttagggcaagccacatttaatgctgatgatcttaaaattgaacgtacactcgattttctttatcgccgtgaatatcagcgccgaggattacgtcaagagcgcggtcgccatggctctctcgatgcatcgcaacttactgccgtaaactggctaaatcaagctcgcaaactttttcccaatagcacatttgaacgtatgcaatcacaagcgattgaacgttatcaaatcagtagctttcttaaagatcccaatacgctaaaagccatggagccgactaaagcgttagctaaaacactattaagcttacgcggacgaatgagcgaagaaacgcgagatgcagtaaaaaccattattcgtaaagtggttgaagatattttgcgtcaaattcgtaataactttcgccaatcattaaccggtcgtcgtaatcgctttagacgctcgttagtaccaaatagtcgtaactttgattggcgtgccactattgccgccaatttaaaacattacgatacccaaaatcgtcgtttattgattgaaactccttactttaattcacgaatgcaacagcattttccatgggatgtcattctctgtgttgaccaaagtgcatcaatgtctagttccattatgtatnnnnnnnnnngcgtattggcctaa

SEQ ID NO: 316829 - DNA, 303 bp, Proteus mirabilis
atgaaaataaaaaatgaaaccattggattggcagatcctaatggccatatagcctgcgttattgggctcctacctgataataatgtatcagaagtgaatacggaggataatgatatttttaagtcgacgataaaagataaaatttttataggtgaaacttggtcggatcatgatatatctttattggcgatatggaattcttttaccgatatacaacaagaggttataagtagcgttattcaaagatataaagatgagatatttaatttggaatgttctctttatgaaagaaatttcgattag

SEQ ID NO: 316830 - DNA, 555 bp, Proteus mirabilis
atgaatactaaaatatttgaaaaattatttcttgccgatgataaaactcgaaatgctgtattaacaatttgtgagaccgatactcccctcgtctcagttttaacactacatttaacttgtgaaaattttttagaagcttttatatcagctcatctaaatattgaggatttgtttgcagaaaaaccagaaaatattaacgatgttagatttagaatgtcctttgaacataaaaataagctagctcagcgattaggtatgccaaaacaagcatatgatgctttttgtcatattgatcagataagaaatcagtttgcacataaattattacatgcggaaatacccgcagatagaataaataaactttgcactcttatcgattcaatacgctcttcagaacaagaattaaaattagaagatgaaggtatacactattccccttctaatgcaaaaaaaacatttacctatcgaatgtctgatcccgatattcctcaaccgttaaaactttgcatcgcatacttctcattaataagaagagtctcgatgatgtatcaataa

SEQ ID NO: 316831 - DNA, 348 bp, Proteus mirabilis
  misc_feature (333)..(342): n is a, c, g, or t
atgaaagtctggtctttaggtgatgcggttgttgacctaattccactgcaaaatatgcaatatgaagcatgtgctggtggagcaccagtgaatgtcgctgcaggtgttgcaaaattaggacagcaaagtggctttattggtcgggtcggtgaagatgcatttggtcactttatgcaaaaaacgttatttgatctcggtgtagataccagcacaatggaatttgatgaattacatcgtaccagtacagtcttagtttcgttgcaagaaaatggcgaacgagattttacttttttagttgcggactctgctgatcaatttcttaccaataaatcnnnnnnnnnncaataa

SEQ ID NO: 316832 - DNA, 417 bp, Proteus mirabilis
  misc_feature (385)..(394): n is a, c, g, or t
atgaagataaaaaaattagtttggatagccttttttgcattattgattagcgctggcgcagccacattatatattatgcaaagccttcgtgggttagagaacaatgttgtggtaaagcaagatgaaatgctgcttactgttccggcaggaacagggcgtattgcgatggaacaattgcttattaagaataatcttcttaaacaaggagattattttcaaattttattaaaagtaaaaccagaactcagtcaatttaaagcagggacttatcgtttaacaaaaggtatgacactgcgggatgttttgctgttaataaaaagtggcaaagaggcgcagtttacgattcgatttatcgagggtagccgtttaagtgattggcaagctnnnnnnnnnngcaaatggtatggaaagcgataa

SEQ ID NO: 316833 - DNA, 249 bp, Proteus mirabilis
  misc_feature (185)..(194): n is a, c, g, or t
atggatacaaccaaagctggttctatcgcacagggtaatacccaaagtgattacaaaacatggcgtaagtcagacacagtatggatgctcggtttgtatggtacagctatcggtgctggcgttctgtttttacctatcaatgccgggattggtggcttaattcctctgttgattatgttagtacnnnnnnnnnnttcctatgaccttttttgcacaccgtggtatgtgtcgctttgtgctatcaggtaa

SEQ ID NO: 316834 - DNA, 177 bp, Proteus mirabilis
atgaagcgaaagttgcttgcccatatgattcaaggactagaaagcggtgcagtctatgattatgtgagttcacacagcggtgtttgtgcattagaacatgatggatttgtgagcttgcgtaagctgtctgatggcgattggaagcacccatatttggatatagtgttgaagcattaa

SEQ ID NO: 316835 - DNA, 2169 bp, Proteus mirabilis
atggcgactcaacaaaggatacaaacctcatctgagaaatcaccggtattccagttttcagtacgtcccgataaggtcggaattatcaccattaatgttgtagatgaaaaggtcaatacactgaaagctgcttttgttgaacagtttcaaaatgtattaaaacaggctcagcaacattcaggtgtaaaaggattaattatcacatcaggtaaacctgataattttattgctggtgctgatatatcaatgattgcagattgcaaaaccaaagaagaggccaccgcattagcgaaagcagggcaagatctttttactcaattagaaaattatcctttgcctgtcgtcgcagccatcaatggcgcctgtttaggtgggggattagaactagcattagcctgccatgggcgaatttgctccgataacagtaaaacacgtttaggccttcctgaagttcaattaggattactaccaggttcggggggaacccaaagattaccacgtttaataggggttacgaccgctttagatatgattttaactggacgacaaattaatgccaaacgggctttcaagcttggcttagttgatgacgttgtaccacaagctattttattagatgttgcagcccaatggattttaacagctaaaaaagctgctaaaaaacagactattatggagcgtttttgggcaaataccacattaggaagaaatatcctctttgatcaagctaaaaagcgcactttagctaaaaccaaaggtcattacccagcggcagagcgtattcttcacgttattgaacgaggcttagagaaagatattcaaacaggttttaaagaagaagctaatgcgtttggtgaattagccatgaccccggtttcatctgcattacggcatctcttttttgcctcaacagcattgaaaaatgaaacaggatcatctgcaaagccagataacttacaccatataggtattttaggtggggggttaatggggggcggtattgcttttgtgacagcaacaaaaggtaatttacccgttagaattaaagatattagtgataaaggtattgcgcaggcacttaactatagttggaaagcgttatcaactaaggtcaagaaaaaacggctctctgttcgtgaacgccaacgacaaatggggttattatcagggacattggattatagcggtttccatcaaactaaccttattgtcgaagctgtttttgaagatttggctttaaagcaaaaaatggtggctgatattgaagccttaggcgaaggtaagatcatctttgcttcaaatacatcttctcttcctatccataaaattgctgaaaaagcacaatatccagaaaaaataatagggctgcactattttagtcccgttgaaaaaatgcccttagttgaagtgatccctcatgaaaaaacggatgctaagacaatcgccacaactgttgcttttgctaaaaaacaaggcaaagttgccattgtggtaggagataaacccggtttttatgtcaatcgaattctcgccccttatattagtgaagccttaacctgtttggttgaaggggaaacgatagagaatattgacaaagcattagttcaatttggctttccagtcggccccattcaacttttagatgaagtgggaattgatattggtactaaaataacgcctattttagtcaatgagtttggtgagcgttttgcatctcctcctgcggttgatgcgattattgcggatgacagaaaagggcgtaaaaacggtcgtggtttttatctctataatcagcatgccttacctttctctttaggaaaaaataaaaagcgtgcagatccgatgatttatcgcttattacaggttaaacctaaaaatcagttatcggcttcagaaataaccgaacgttgtttattgcttatgcttaatgaagctgttcgttgtttagatgaaaacattattcaacaacctagggatggtgatattggtgctgttttcggtattggttttcctcccttctttggtggaccattccggtatatagatagtatgggaacaacaaaaatagtcgataagcttaatcaattaactgaaaaatacggtgaaaagttccagccatgtgagcgattagcagcaatggccaagttaaatgaacgattctatagctaa

SEQ ID NO: 316836 - DNA, 792 bp, Proteus mirabilis
atgaccaccctgaaaatcaccgggatgacctgcgactcgtgcgcggctcacgtcaaggaagccttggagaaagtgcccggcgtgcaatcggcgctggtgtcctatccgaagggcacagcgcaactcgccattgaggcgggcacgtcatcggatgcgctgactaccgccgtggccggactgggctacgaggcaacgcttgccgatgcgccaccgacggacaaccgcgccggcctgctcgacaagatgcgcggctggataggggccgctgataagcccagtggcaacgaacgcccgttgcaggtcgtcgtcattggtagcggtggagccgcgatggcggcagcactgaaggccgtcgagcaaggcgcgcaggtcacgctgattgagcgcggcaccatcggcggcacctgcgtcaacgtcggttgtgtgccgtccaagatcatgatccgcgccgcccacatcgcccatctgcgccgggaaagcccattcgacggcggcatgccacccacaccgccgacgatcttgcgcgagcggctgctggcccagcagcaggcccgtgtcgaagaactccgtcatgccaagtacgaaggcatcctggacggcaattcagccatcaccgttctgcacggtgaagcgcgtttcaaggacgaccagagccttatcgttagtttgaacgagggtggcgagcgcgtcgtgatgttcgaccgctgcctggtcgccaccctcgttcaaactaacgataaggctctggtcgtccttgaaacgcgcttcaccgtgcagaacggtgatggctga

SEQ ID NO: 316837 - DNA, 849 bp, Proteus mirabilis
atgcttatacctaagcgccaattaatcttttacttatttactagcatgttgatatatccagcttcctctatagccgctattttttcttatattacagaatcaaaaccagtaggtaatgaggggacaggggctgattacacttttattatccaacgttgggatcccgagccaccaacggctttaaatccttgttataaaaaaaaaccttgttatataaccataaatcatcgtcatcagcctaaccagtctggaggttcagcgaccagaactattttaagtgatgggcataaatatcgaagaatggaagatctacgtattgctgttatgaaagaattaggaggattcccttatggcccaggagttgccattcatcgatatgttgatacatcaaccatacaagagtgcgttggtatattttatcagccaaatgcttatggttttgctgaagatggctatttattaccgggttctatttgtgcaattgctccccctcctgttggacattgtgatgtgttaacccattctgttgagttggattacggcaatgtgggggaaaatgaattagacaatgcggttcgttctcaaactgtgaatgtgacgtgtaatcgtgatgtctctttacaggttgttgcaacaggaatgaataatcgtcaagtcccactacgtaatgacaatagcttatatgctgatttatatattaatgataaatctggcgaagagggagaggctatctttgtcgctaaaggcaaaatggtttctatacaagtgagttctaaattgagaaccaatggacatgttgctccagggtatttttctggctctggcgcgttgattctaacgttaccataa

SEQ ID NO: 316838 - DNA, 2175 bp, Proteus mirabilis
atgagaacgcaaagtcattctcatatcattgaattgactcatgtatcccaacattatggtgataccaaagcacttgatgatgtgacattgactattcctgccggaaaaatggtcggcttaataggcccggatggtgtcggaaaatcgagtttaatttctcttatttcaggagccagagaaattcagcaagggcaagtgatagtacttaatggtgatatgaatgatgttaatcaccggcgagctgtttgccccaaaattgcctatatgccgcaagggttaggtaaaaatctttatcacacactttctgtttttgaaaacgtcgatttctttggtcgcttatttggtcaatccaaacaagagcgagaagagcgcatcaatgatttacttgaaagtactgggttagcgccttttaaggatagacctgcgggtaaactatctggtggtatgaagcaaaaactggggctttgctgtgcattaattcatgatccacaattgctgatcctcgatgaacccaccacaggggttgacccattatcacgggcgcaattttgggagttaattaatcgtattcgtaaacgtcaaaccaatatgagcgtattggttgcgacggcttatatggaagaggctgagcgttttgattggctggttgcaatggatgcaggtaaggttttagccactggtcatgcggaagaattaaaggcgcaaacggcgacagatgtattagaagctgcttttattgagcttttaccggaagaaaaacgtaaaaaccatcaaaaagtgattattcctccacgggataaaagtgatgacgatattatcgccattgaggccaaagagttaacaatgcgctttggtcagtttgttgctgttgatcatgtcagttttcgtattcctaaaggcgaaatttttggtttcctaggttcgaatggttgtggtaaatccaccaccatgaaaatgcttacaggtttacttgaggcaagtgaagggcgcgcttggttatttgggcaagaggttgatccaaaagatatcgaaacccgtaaacgcgttggttatatgtcgcaagcattctcactgtatagcgaattaacggttcgacaaaatttagagctacatgccaaactctttcatatcccagaacaggatattcctcaacgtatcaaagaaatgagtgagcgttttaatttgaccgatgtggaagatatgatgcctgacggtttacctttaggtattcgacaacgcttatcgttagcggtggcagtgatccacaaaccagaaatgctgatccttgatgaacccacctctggggttgaccctatcgctcgagatatgttctggaagctgatggttgatctctcaagacgtgacggtgtcactatttttatctctacccactttatgaatgaagcggcgcgctgtgacagaatgtctctgatgcatgccggaaaagtgctagtgacagatactccggctaatttagtgaaaaatagtcaatttgatacactagaagaagtatttattgattatttgaaaaaagcatccggtgaaacagaaacgcccgatattgaagataaacagctacaattgcctgcctctagtgaagaaagtgcggaaaaagcgttaaaacaacgatttagtttacgccgtttatttagttatagcattcgtgaagggatggaattacgccgtgacccagtacgccttaccttagcattactaggcacggtaatattgatgtttattatgggttacggcatcagtatggatgttgaaaacctacgctttgccattatggatagagatcaaacagggctaagtcaggcttatagtcaaaatctatcaggctctcgctattttattgaaaaagcgccgattaccgattataaccaacttgagcgtcgtctccgcagtggtgatattactgttgcgattgaaattccgcctaattttgctcgagatgttgctaaaggacataaagtaaaaataggggtttggattgatggcgcgatgccaaatcgtgcagaaactgtccgtggatatattcaggcaatgcatctaacttggatgttagatatggccatgcgtcaacctaccaatatggttgatcaattttcccccattgatatcgaaacccgttatcgctataaccctgatgtaaaaagtttacccgccatataa

SEQ ID NO: 316839 - DNA, 351 bp, Proteus mirabilis
atgagtttagagctactgcttgcaggctgtacaacgactgtcactcatcgttttactaaagacttacgttttcatgttgaacatgctgatttggtggttgtggcagttggtaaacctaactttattcctggtgaatggataaaacctggcgctattgtcattgatgtcggtattaatcgccttgaaaacggtaaagtggttggtgatgttgatttcgcacaagcctctcaacgcgcggggtggatctcccctgttccgggtggtgtaggtccaatgactgtagcgactttgattcaaaatacgttgcaagcctgcgaagaatatcacgatcctgatataggaaataattaa

SEQ ID NO: 316840 - DNA, 477 bp, Proteus mirabilis; identical to SEQ ID NO: 147174

SEQ ID NO: 316841 - DNA, 168 bp, Proteus mirabilis
atgattgaaatatcagagcctgcattagaaagtattttggcggatgcattgccaaatatcgaagtgggacaattaggtattcaggtgatggtatttgagaaaaatggcaactgttacttatgtggtgaaaatatgtataccgtttctctacgcttaccttgtgcttaa

SEQ ID NO: 316842 - DNA, 519 bp, Proteus mirabilis; identical to SEQ ID NO: 298693

SEQ ID NO: 316843 - DNA, 345 bp, Proteus mirabilis
  misc_feature (331)..(340): n is a, c, g, or t
atgaaatttgtctcattcaatattaatggattacgtgctcgccctcatcagctcgaagccattgtagaaaaacaccaacccgatgttattggactgcaagaaacaaaagttcatgatgatatgtttccattagaaactgtcagtgccttgggctaccacgttttttatcatggacagaaaggccattatggtgtggctttgttaactaaggcgaaacctgtcgcggtacgtaaaggattccctggtgatggtgaagaagctcagcgtcgtatgatcatggcggatattgaaacccccgctggattattaacggtaatgaatggttatttcnnnnnnnnnnggtga

SEQ ID NO: 316844 - DNA, 468 bp, Proteus mirabilis
  misc_feature (454)..(463): n is a, c, g, or t
gtgaataaggatattaatgaacttaataaagatattaatattgtcggattacattggattgaacgctggcgagtgaataatggaaaacatcagtcttatgttattcctttcgcaacaacctatcctattaatattgtttatcacggtaaaagcgaatttaaatatgggcagtatggcattcatcttggccagcaagatacactcacctttttaggtgataaaaaacaaaagatactggctaaatttattgattgtcgtaaaaactcaccgacatttaaatcagaattaagtttagagataaccccatcatccgcaagaacacttattattccccctggagttgctcatactttttcccatctagaaaatgtttttaccttaaatagctactctctttttttacctactatcgagcaattagcaagtgaaacattaaattggtcacctaataatnnnnnnnnnncctaa

SEQ ID NO: 316845 - DNA, 252 bp, Proteus mirabilis
atgggaatatcgtcgaatagtggagaaacgataagacaattgtgtctcgaaggtaatggtattgcttgcctttccgattttatggtggttaatgatatcgaaaatggtcgatttatcgaattattccccgataagctgcgacctatagctatgccttttaatgccgtttattatagtgaaaaagtggttagccaacgcatccgtgtatttattgattctctgagtgagtatattgctaaaaaagtaggttaa

SEQ ID NO: 316846 - DNA, 351 bp, Proteus mirabilis
  misc_feature (336)..(345): n is a, c, g, or t
atgagtacatcttgtgtagaagaaggccgaaagacctccaatgatccttatcaacggatcgcatcagagctgctcgctcaagcagacattcatatcaatggttctgaaccttatgatatccaagtgcataataaagatttttataaaagagtattacaacaaggctcattaggtctcggtgaaagctatatggatggttggtgggactgcgaacgtcttgatatattctttcataaagttttacgagcaggtcttgaaaataaattgccaagtaactggcgcgatattttaaaaatagccatggcacgcatttttaatttacaaacacaaaaaagnnnnnnnnnngggtaa

SEQ ID NO: 316847 - DNA, 666 bp, Proteus mirabilis
atgacaaagccaaagaaccataaagcgacgcctttcctcggcacgaagatctttgtgcaaacaggcttaggagaggcgatgaccgtgaccgaagcgacgttatcacccgcaaccattactatcgccaatagtaagctgaaagccgatgacatgattatgttatcgggactcggggagttagatggacgttttcctgttgcacaggttgatggcaacaaagtgaccctgtgcgacgaagtggattggagtgataaaacgctacccactgatttttcaagtgttaaggcacaacgtattcaatggtctaataacttttgtgcggtaaaaagtttcagcaaagacggttcgacaaccgaacaaattgatgtcaccactatttgcagtgatggcaaggaatatgaatcgggcgatacggaatacggttcaattaaattgacctttttcttacggtatagctccagtgatgtgcagcgactcttgcgtaaatatgaaaacagcaaagaaaaattcgcagtgaaaatggtcttaacgcgagatgaaggctccatgttttattacggctccgtcgagacaggtatgaacattgatggcagtgtaggacaaatgatggattcggggatctcgattaaattgtctggccgtgattatttgaatgcgaaggaataa

SEQ ID NO: 316848 - DNA, 465 bp, Proteus mirabilis; identical to SEQ ID NO: 49359

SEQ ID NO: 316849 - DNA, 633 bp, Proteus mirabilis; identical to SEQ ID NO: 96874

SEQ ID NO: 316850 - DNA, 411 bp, Proteus mirabilis
atggttgagataaggacaacaacacccgcccccataacgaagccggcaatagagccgaaatctaaccagcttcccataaagccccgtttacggtctggtgaatattcggcaacgaaaatcgccgcacctgagtactcaccaccaattgagaagccttgggctagttttgctaataacagtaagacgggtgcccaaatcccaatggtgtcatacccaggaataagaccgatagcaaaagtacttaatgccataattatgatggtgacagataagactttttgtcgtccaaacttatcccccaacataccaaatacaaccccacctaatggtctaacaaggaatgggactgagaatgtcgcaagtgctgcgatcatttgtacgccaggtgatgcaccagggaaaaacacttga

SEQ ID NO: 316851 - DNA, 282 bp, Proteus mirabilis
ttgctcgaaggggataataaacaaacacacgcttctgaaattcctccccaagatgaatggcattcagtcagtgaatgggataacgatacccctctcaatgctgatgaagtcgagatccgttattttaaaagtattgaacttgccgctggtgatggctgctgtactaacgaagatcataatggctataaattgagattctccaaaagcacactacgccgctatggcgcttcaccacaaaatatgatcaaagttgatggcaaatggaaagttgaagttaagtga

SEQ ID NO: 316852 - DNA, 474 bp, Proteus mirabilis
atgcataccactctagggaatgcggtgaggtatgaatttgtggcagaacgcattgctgaaatggcgatgcacgtcagcatgagagccattgcctttgacccttatcgcattaaataccttgtacccaaactcgatgaagtgggggtgacggttcccttaatccaacatggacaaggattttacaaagccaaagattcagggctatggatgccacactctatcgaactgtttgaacagctcattgatgacaagaagattgagatccacgccaatccttgtttgagatggaatgccgcatccgctgtgcttgaggctgaccaaaaagataaccgcgtctttgccaagaaaaaaagcacgggtcgaattgatggtgtggtggcctctgcaatggcgattggggcttctgaaggggaattcgaggatgaaggggatattgatggtttctttgataacccaattattgtggggatctaa

SEQ ID NO: 316853 - DNA, 159 bp, Proteus mirabilis
atgaggcaagattcagataacaaaccatcttatgcctttggcggagctgtaaactctactgcgcaaggaaatccagttcctttactttatggattggacaggcgagaggtgggaggggcaatcatttccgcaggtatttatacagaagatcagcaataa

SEQ ID NO: 316854 - DNA, 279 bp, Proteus mirabilis
atggctgaaattgatgatatgttgcgctttggcgctcaggacgtttttcttaagcccgtaactaatttagctaagttaaaacagaaggtcattgaagtattatgtccaggtttttttgagtctgaattaattgcaaggggacaacttggacctctttggaataacttacgagaacagcctcattatattcaatcctttgttaaacagatgcaaccgcaagttaaacaaattgtcgcaggatataatgtgcatcccaaatggggttgttatttgatatag

SEQ ID NO: 316855 - DNA, 474 bp, Proteus mirabilis; identical to SEQ ID NO: 10335

SEQ ID NO: 316856 - DNA, 513 bp, Proteus mirabilis; identical to SEQ ID NO: 50974

SEQ ID NO: 316857 - DNA, 342 bp, Proteus mirabilis
atgaataaatacaccgaactatctgatttagagattaacaagcgcgtctttgttgctgcgaaaatagaacatgaagatacagacttacatagcaataaagttttctatggcgatggtgctaactggattgaatttaacccatgcaataacccatcagacgcaatgccgattattaaagataatttcatatctataacttatgacggaatagcgtgggatgttagctgtgtaaaatatccagaactaagcgtatggagtggattagaaaattacaatgataatttttatcgcaaagccatggaattatttctattaatgaaggatgcggagaataatcaatga

SEQ ID NO: 316858 - DNA, 249 bp, Proteus mirabilis; identical to SEQ ID NO: 50253

SEQ ID NO: 316859 - DNA, 390 bp, Proteus mirabilis
atgctataccgtcatccattcccaggaccaggtttaggggtgcgcgtattgggtgaaatcaagaaagagtattgtgatttactacgtcgagctgacgctatctttattgaagagctacataaagccgatttatacaataaagtcagccaagcatttacagtattcctacctgtccgttcagtgggtgttatgggcgatggccgtaaatacgattgggtagtttcattacgtgctgtagaaaccgtagactttatgactgcacattgggcacacctaccttacgatttcttaggccgtgtttctaatcgcattatcaatgaagtaaatggtatttctcgcgtggtttatgatatcagcggaaaaccaccagcaacgattgagtgggaataa

SEQ ID NO: 316860 - DNA, 504 bp, Proteus mirabilis; identical to SEQ ID NO: 52325

SEQ ID NO: 316861 - DNA, 504 bp, Proteus mirabilis; identical to SEQ ID NO: 52325

SEQ ID NO: 316862 - DNA, 327 bp, Proteus mirabilis; identical to SEQ ID NO: 308393

SEQ ID NO: 316863 - DNA, 474 bp, Proteus mirabilis; identical to SEQ ID NO: 10335

SEQ ID NO: 316864 - DNA, 327 bp, Proteus mirabilis; identical to SEQ ID NO: 308393

SEQ ID NO: 316865 - DNA, 411 bp, Proteus mirabilis
atgataaaaaaattgcgagagcgaaaaaattggtctcaagagcaattggcaacaatgtcaggtttaagcgttagaactattcaacgcattgaaagtggcaacaaagcaagtattgagtctcttaaatcactggcttctgtgttcgaagttgatatttcgaagctattggaggagataaccgtgattgataaagattctgaatactggaaagaacaaccaggttggttcaagttcagccttcttggtgtgaataaaagaagtaaacttgttctgattgagtatctcagcattgtgctgggactatttagctgggttttacatgcaaatatgtttgccacccctgcgttttttctaattgcttatttaattagcaagctagtaaatactgctgattctaaaaaggtttggtaa

SEQ ID NO: 316866 - DNA, 363 bp, Proteus mirabilis
atggctacgaaggatgttcaaacactggtagacgacatttaccatttgggccacgaacaacattcgatggttgaaggtgttcgcaagttggtgaaggcggtcgtttcgccgctttcggaagaggtcaagtatggcggcatactgttcacatcagacgttcagttttgcggtgtctttgcatacaagaagcatgtttcagtggagtttaacaaaggcgcccaagtcgcggatgagttcgggcatctcgaaggtggcgggaaaggccgtcggcacgtgaagctgtactccgtcaacgacattgagtccaaacatctagctcactatattcctttagcattagaggctgcgagagcagattcctaa

SEQ ID NO: 316867 - DNA, 690 bp, Proteus mirabilis
gtgtgttcgtgggtcactaatctaccggagggacgcttttctgtttggccggatggctgtcgtgatctgatcgcgatagtttcgaaagaaagtcctgtcaccgttatttgcagtggtttggattccgccccccggcaagtagtatgcgatgatgacactctatttgttggagttcggttggcagcgggggtaacctttccatgggatatgaaggattcgtgcataaagcatgatgatcaggttctttcacaaagttcgttttccagttgccacggatgggaatctgaaagtgattgtgatgaaatcctcggaaagctgattggcgtggttaatgactttgcgagccccgcgccttcttgggtatcggaatgtattgatgagttgcggatcggtgaagtgcggcagtctatgtcgttaagtgaacgcagcataagaagaaaacttgccgacattaccggagccccgccacggttctggaagtctctggctcgcgttcgccaggccacgttggagatagtgcggtctgaagtttcgctggtatcggtcgccacaaatcatgggttttcggatcaagcgcatatgaaccgggaaatccggcgttggtttggggtaacaccggtaacgctgcggaaaaatcgggagcagatcattgaatggctgtctgctcccaatgtattccagaacgtttag

SEQ ID NO: 316868 - DNA, 405 bp, Proteus mirabilis
atgtcgataaaatctgcgagcatgaccatcgtcacacaaagccttcccgatacgcggaagttctatgaaacttactttaatgcgcgccccattttcgactgtggctggtacgtaatgcttaggttgactactcgtcatcaggaaccggaaatctgcctgatgagtccacaagaaggaatgcaaccattctctggtggcgccttttttaacctgctcgtggaagatgctgatgagcttcactctcgactaacccaagcaggcctgacaccaacggtgccactggaagatcatccctggggcgatagaggattcggtctgcttgatccctctggcgtcatagtttattgctatcatcctattgccccaagccccgagttcgaaaagtacatcatgaaagaaggctaa

SEQ ID NO: 316869 - DNA, 1065 bp, Proteus mirabilis
atggctgaaaccgaaaatattggcaagatggcggaattagtatctgaacagttactatcagtattcaagtgggaaactgtaaagttatacaatacaaatttcgactgtagtaaacctaacgaacattctagctctaagagtgcggacaaccatactcatccagtagatgtggtttttcattatcttgatccatatacgaataaaagagttctttttaacaccgatttaaaaagttacaaagaaggatcaataagtgagaaaaatgttcgaacagctcttcagtcattagcaaaaacaatcgaatgtgcaaggttaagcaaggaatggagaggtcgctatgctaattttgaggagccaactgagattagagcactactattcacttataatcacgatggaaaattcgatagagagttttacgaacgatttttcatcaagactaaaaacgatcctacaaccaagagagtcataaacacaagcaatattggtctaaaacgagatcaaatgattcatataatcgaaccttcgcaaattaattatctgaatacaatagttgccgatttaaattacctcgcttcaaagcagaaattccctcacttatacgaacaaaagcattggttccattatccagaactatttttgcacaaaactcacttcgacaaatatcttcgccctgcaacaatagagcttttatcctcaccttttctaataatcgggtatgaaagtgtgtcaaatcctaaagatggaagcatagtcgaacagcaaggccatataatttattacaacggaaaaggtgaaacacaagaagaattcatctacttactcgatactatatctaaaaatcagatgcttgatagttctcaacctataaaaataagatgcgcagcaagtgaaaaacataaggatatagtaagtaatttcaaaaacgcaatttctacttatgcagctgcatggggatatgacacatacaaaaaacaacgactaaaggaaattgaatcacagttcgagacaataactcaaacgaaggaattattgactgacataaatgtaggttggagagagtaa

SEQ ID NO: 316870 - DNA, 1092 bp, Proteus mirabilis
atgaaaggaagtttatacagcgttagcgataaggccatgtttgatgcaattaatcagtcaaaagtaacaaatagtgagctaaaggatatattcctgagtagaggaattattgtatctcatgagacgaaaagggaaaaactagctaggtacttttctttatttccgcattcttaccaagattataaaagacttgctgacatactgggcgcaaatacacgaagagaaaaaaacaccagtactacagtaaatagaattgtagacaaagacgtcatagaaactgttgcggctggacttgtaagtgaccttgaacatttcggcgcaacctgcactattgaagagtcagaaaagaattcaataagtattaaggtagagtatagagaatttaactacagcaattcagaattcaaacaaatatcaaataaagaagcagtaatctcaatagaaataaatgaagaaaatttgattatacgtcacccgcaaaataagactgttgaagaatggaagtctctttacatatcaaaactagaatccgagcttgaagaggaagttgaaacaacaaatataaacttgtcgaatacaaccgatcatgaggtggttacaagattcttcaacgagctaataaatggcattgacggatacaagttatatgatgtcaccgatgtttatgtttaccaccccgaagaaaaacatcttgatgaagatgaagatgaagatgaagatgaagatgaagatgaaaacgattttgaaaaccccgagttaggaacacacatttcaaaggcttctctaaaaggtcaaaatgttttacgttccgaggaattactacaactatacaaaaaaggattttatatatctaaaattgtttggcgatcaaagtcagaaaaactagatgatgaattgtacgagtttgaagctcaattttccgatgctgaaaacaaagattatttttcttatttagttaaagggttctactcctataaaggttcaggcgaatacgtaaaaggtaggaaatcattaacgtctattcaagagcgtgaactcacaaaaaaagtggaaactgctgcacataatgcacttaaaaaggtaatggagtag

SEQ ID NO: 316871 - DNA, 681 bp, Proteus mirabilis
atgaagtcaaagtggatatacttaacagttgaaaaagatcccgatgaaattatcaattcgcttttaaaatgccacttttcagaagacaaaagctatggctttgaagttatttctattgataatgacgaaatagaagcttcgtacttcgaacaaataacaattcttgatatatttacactccctgatggtagaaaaattgaaaacaagcaaataaaaataataaatttcgatttcagattaattaaattccaaagtcatagatacatcatcgaaatatcatcaccacctagaagcattaagacttttattgacaagcttgaactaacactagacaaagaaacttatatcagcaacgtacaaattaacataaataaatttataacccaccttgaagagtcaagagagataaaaaatgtagacatctcttatcttgcagcatcaaacattaagattgacgctaacaatattgcagacatccaaattagatctagaaaatccattttagaatcactaaacaaagtctttgatgaacagtcgtataacttcaaaagcatacatgcgtcttttttttatttcgatgaaaaatttaaaatgaaagtttcgagcaatggcggaattgagtcatccagccctaaccatggtctaattgttgattttctaaaaagacaggaaactcagtga

SEQ ID NO: 316872 - DNA, 693 bp, Proteus mirabilis
atgttagttgcggcaaactttcgcaaagaagtgaccagtactgcactttggctattggggcaaggtattagtattgcatgctttaaaattaccccttattcgttgggtgagcagctacttatcaatattgaccagatcatccccacgcccgaagcgaaggagctgatgatcggtattaatgccaaagaagcggaagaaaaaacgaccgaagtggtactgaaaaaccgtcatacggtgcgtcgcgaatactgggagcgagcattagaggcgtttcagaaaagtccgtgccagctctacaacaacattagcccgagtaaagatcattggctatcagccggttctggactgagtggttgtccgtataacctaatttttctgcaaaaagagcttagagttgagctttggattagccgtgggattaccgaagagaataaatatctctttgattccttgcttgagtccaaacaggaaattgaacaagtatttggtgcggagcttgaatggatgagattggatgaaaagaaatcttgtcgtattcagttttcgaccaaagctgatggcttcaataaagatacgtggcccaaagcggttgcgtggcacttagagcagatgactaagttagaaaaagctttaaaaaggccgctgcaaaaagcggctgaagcgctaaaaaacaaaccggcagaggtatcctga

SEQ ID NO: 316873 - DNA, 1836 bp, Proteus mirabilis
atgccaacgttggattttaaaggtaaacagtttgtttattcacaccacctgagtgtgccgtttcgtgaactaaaagtggttgaagataaatcgttaccacagcaaggcaaggcggcatcgctggatgataacctcatcatccatggcgacaaccttgaagccctcaaggcgttactgcctacccatgcgggtaaagtagactgcatttttatcgacccgccatacaacacaggcaatgaaggctggtgttataacgacaacgtgcgttcaccattgatgcaggaatggttgaaaaagtcagccaaccctgttgataaagaagatatggaacgtcatgacaaatggctttgcatgatgtggcctagattaactcttttgagggagctattggcagatgagggaagtatctggatgactcttgatgataacgagatacaccgagcaaggatgctttttgatgaaatatttggcgaggaaaattttgttgcgtgttgtgcatgggagaaaacctatacgccgaaaagtaatgggagagtcataagtaccgatcatgattatgttctgatctattcaaagacttcatcttttaccgagcatggctggaattaccttgctaaaaatgaagagcaagttgggcgctacaaaaaccctgataatgatcccaatggtccttggagaacatacccattggatgttcgaactgaggatagcgagcgcagggaaaaataccgttatgaagtagttcttccttctgggagggttgtaaagcctgctaaaggaaggcactgggcgctacctgaagctgagtttataaaacagagaaacgctggcgaaatttatttcggtaaaaaaggcgatgctatgcctacaaaaaaggcatattacgatcctaatgaagataaaggggttatcgcacgcagctggtggacttataaagacgttaaaggtaatcaagacgcaaagaaaacactgttagatatttttggtgatgttgagactgatttccttactccaaaaccatatcaattaattcaaagggttctggaaatagccacagacaaagattctataattttagattcttttgctggttcaggaacaacagcacatgctgtgcttgaagctaataagaatgattcagggaatcgaaaatttatattaattgagtgcgaggagtattgtgaccgcaccacggcaagtcgtgttcgaggggtgattaatggctacaaattcaaaggtactcaaaaacaagagctttttgcagaaaaaatcacttggtctgtatttgaaaagaaacagtctaagcttctagaaaaaattgctgaaatagaagcaaaacacagcaaagatttcgacaaaatcaaaaaagagctcaaagacggtgtgctgactgtcaccggtgagcgcaaagtggatgagtttgcccctggcattggtggcagttttacctattgcaccttgggtgaaccgattcaaattgaaagcttacttactggcgaagcgatgccgtcattcgacgcgctcgcacgttatgtgttttataccgcaactggtcagtcgttagaaacggtcgctaaagcctctgccgatggttttatcggtgaaacagacttattccgtattcatctgttctatcgtccagatagcgaatggttgcgctcaaatgaagccgcattaaacgcggacaaagtcgaggttatagcgaaaaacaatgctacgaagaagcgcaccattgtctttgctgtggcgaaatttatgagccagaaagacttaactgaaaaacgcattgagttttgccagttgccttacgctatccatcgcattatgggggcgtaa

SEQ ID NO: 316874 - DNA, 1503 bp, Proteus mirabilis
  misc_feature (1488)..(1496): n is a, c, g, or t
atgcctatttacgaacaacaacctgatgatattttatctgcggatattaatgctgttcagcaaacagaacctacttatggtgataatgtttcaccatcttggtatgaccctattaatccgcttgatgatagacggcaaactaaagaattacgtgatgcggcgtttcgtatagataactcagtgggtagtttgattgctactgcaccttttaatcaatttgaagatgtagacggttataacccatttgaagatgaattgacgctttcaggctatgaagactatgccgatgcctttattcattcaaactctcctcaagaaaccgcagcaataaaacaacgcattgatcgtgagaaaaacgacagacagcaattaatggattcaggcggtgccggtattgtgagtagtatagcaatgggggttattgatccaattaatgttgccgcaatgatgataccaggtggtgcaatagtaaaaggaggtagtgttggtgcaacagcaggtaagtttgcattggcaaatactgctggtggcgtagcttctgaaatggcattgcatagtacccaagaaacacgaacattaactgaaagtgcaattaacattacacttgacgccatgatcggtggaaccctaggttcagccgcacagttagtaaaaaaccgtggtgaattggtaacaaaagtaagaaatgatttaattggagaacaacaatcagggcaacaaaatattccaaataatatccctgataattctagtgttggtgcaatggaagtacctaacaccacattagaacaagaaaccttaaaagggccatcatttattaatcgtacgatgaacgttagccctgttggccgtgttgctcaatccccctctaaaacagcgcgccaaattaaccaacaactcacagaaaataactttacctttgctaaaaatgaagaaggcattgcgacatttaccgctgttgaaacaaaagtgagaggttatgaaacacttgtttataagcaagtagaatcaacgaaagatcactttaaacagtatcgtcaatctggtggccgtgatatgagctattaccaatttagtgaggctattggtgatgctatgcgcaatggtgatactcatgcaataccacaagtggcagaggcagcacgttctattagacctattgtcgaagcaaccaaagatagaatggttgaattagggatcttacgtgaaggtgtaaaggtgacaacagcacaaagctacttccctcgtatttataaattcgacaaaattttaaatgatcgtactgaatttaagaaaatcattgctgactggttagaagagattaatcaaacctcgataaataaagccaaaggtagccttgatcgtgctgaaatcggtattgataaagcacgtaacgcttcaccgcaagccgaacgtttagggcttgaaattaaagaagctgagaattggtcaggtaaaaaatctttgttgatggatgatattaataannnnnnnnngtgttga

SEQ ID NO: 316875 - DNA, 228 bp, Proteus mirabilis
atgatcataggcatgaaaaaaaagaagcccgttccctgccgaatcgccgcgaaatatctttttgcccgtgcatttttcaagaacgtaaaacccggcattaaaattggcattattgccggacgcgaacaggttgaaaaatacatgtcaggtgcatggtggaatactgatccggtaataacggcccgccatattcacatcatgtggggaggaattcagaatgaaggatag

SEQ ID NO: 316876 - DNA, 273 bp, Proteus mirabilis
atgattacaccagaagaagcccgaaagcgtacccgtgaaattatcgaagaccatatcaataagtgcggatgcagaaacctcaccgatgttcagtgtgtactgacggcattaatcagtatggctgcacaggcggtcgtggcaacaaacggcaaaccagccgccattgccgtactgaaagcaacgcttatccatacggcactgcatgaagtgccatatcagatggaaacaacggcggatggcgacgtcagaattactgttgcccgtaaacactaa

SEQ ID NO: 316877 - DNA, 339 bp, Proteus mirabilis
atgataggattgcgaataaaagaagaaagggagcgtttatctctcacacagcaaggtatagcggatgctataggtgttgcgaaaagaacctttatcgattgggagaaagatcgtacctcaccaacagcagtgcagttatctgcactatctcaattgggaatagatgttttatatataattaccggggtcagaagccagccggttttaacatctcaaatgtcctctgataaacaaaaactaatggacgcatttgatgaaatgacaccggaacaacaacgctcatttcttgaggttgggcgattctatacacagcccaaaccgggtaaatgtgccggataa

SEQ ID NO: 316878 - DNA, 477 bp, Proteus mirabilis
atgacacatacactgaatccggtcatcaccgtcaccgtgtccggtcctgtgggcagcggtaaaagttacgtactggcgcggatagaagaggtggtgaaacaggaactcggaaacagcgtcattgtcgatgctgctgacgtggagaatgagcgccgtatgagtggggatgatctgagtgtatggctgaaaccacgggcaggttcgattatccgactggaggaatacacggagcagactcccatgtcatacagtgaggggcgcatcttccggacgaatgaactgctggatgttatatgccccacaggacgaaatccctggatactgcctgatgcgctgcatgccgctattgcggcactgatgacaatttacgatcaggagttgctcatgcgggaactacgtaaactcacaggccagccaccagaatgtttttcgtccccgaagtacggcaaacaggaacacaccccggataatccttaa

SEQ ID NO: 316879 - DNA, 138 bp, Proteus mirabilis; identical to SEQ ID NO: 290170

SEQ ID NO: 316880 - DNA, 1092 bp, Proteus mirabilis
atggcaacacttaatgaatccgctgtctgggaagacggtatttatcagctggaagtctcagacccggtattaggcgggccgggaggtatcgccaaccggcaggccgaacaactggccaaccggacgaattatttaaaaacactatcggaaaatcacaaaggtgaactggctgcgcatattaaagcgtcagacccgcatacacagtatgcaccaaaacattctccggcactttcaggtataccgacggcaccgacagcggcacaaacaacccgttccacccagatagcgacaacagcatttgtgcatgcggctgtcagcgcactggtgaacagctcaccggcagcactcgatacactgaaagaactggctgacgcactgggcaatgaccctgatttttcagccaccatgacccgactgctgtctgaaaaggccccattgtcaaatccggcattcaccgggaatccgacagcaaccacgcaaccggcgacagataactcaacccggattgccacaacggcttttgttcgtcagatttttgctcagattactcaggacgggtatcttccgataggggttcccatcccgtatccgctggcccaggcacccgctaactggatgatttgcaatggtgcgggtttttcggccagcatctatccggagctggcgaaactgtaccctgatttaaaagtgcctgatttaagggggctgtttatccgcggctggagtcatggttataacccggattcagggcggacgttactgtcacggcaggagagtgcatttgctgaacacaaacacaccacctatgtctatagcggtcagcaacagccacagcaattatccctgatatcacgtgacccttcagacacgatgctgatcattacaaccaataaaggtattaatacagcggatgggtcagacagtaataatgctcagtatatgacagggattggccatatgaattgtgtgatcgaaggcaaaaaaaataatctccggacagcggctgccatctcaacggcaaaaatgatcaacggtgtaaatgaaacacgtccggtgaatatggcatttaactatatactgagggctaaataa

SEQ ID NO: 316881 - DNA, 780 bp, Proteus mirabilis
atgacacaggctgcactggagaaagggctggcgataacagaaggtgaattaccggtttttcattattctcctgaaaccggggagtatttataccagagcacagaatatctgagcgttggagtggggcttccggcaaacagctgtactgatgctcctcttccggccagagagggatacagtgtttaccgtgacacaaaacagggtctctgggtctatgttgaaaaccattgtggtgagacggtctttgatacccgcaccggtcagccgataatcattgatcgccccggtgcgtatcctccggacaccacgacgctggccccccgcacatcactggacagatggaacggcacggcatgggtcattccgccagatgtgctggcacaacatctgagcgcattaaagcagagtaaatttgaggaaattaaccagtggcgggacgaacaggagctggccggtattatttttgaatggaacgggcaccgctgggatggcggtcagacgtcccatgcccggttatcaccggtattagcagtggccaaagccggggtattgcctgcagattttttctggacggatgcggacaatcaggatgttgcagtaacggcagaagaactgattgagctggaagtacaaatgctacaggcaatggtcagtcagggatttcgcattcatgagaggcagagagccatgaagaaagtggtttcttcttttgccacacctgaagaggtacaggcttatcgcattgggtgggatgaggctgaaaaggaacatgcctcataa

SEQ ID NO: 316882 - DNA, 546 bp, Proteus mirabilis
atgaagcttaaaattaatcgtagaacattacttgctgttatggaatgtatggctgtgaaagatgtgcgctggtggattaatggtatttgtttcttacccgatggaaaagttgcgggtaccaatggtcacatgttggcatacggtgaacatgataacgaaattgaaaatgaagttattttatcaataggaaaactaccaactaaatcatttgaatatgctgaattcgatactgagcatggaattgtaaaactttacacagaacacgacatagttgtcggtgtaacgatgtgtagcgttatggatgataaatatccagacataaataaactcattaattcattaaaaaagaaagatgaacagctcccatcagcaataggaataaatgctgggtatatggctaaattagaaaaaatagctaagttcgttaatccaagattaccagcctacaaaatacaagttaaatcagcagaagatgccattgtatgcgaagtaaataatccacataaaactcctgtaacagtattaataatgccaatgcggctttga

SEQ ID NO: 316883 - DNA, 960 bp, Proteus mirabilis
atgagtcttaattttctggattttgaacagccaattgccgagttagaagcgaaaatcgattcgctaaccgcagttagccaacatgatgaaaaaattgatattaatattgatgaagaagttgcacgcttaagagaaaaaagtttagaacttactcgaaaaattttctctgatcttggtgcatggcaagtggcacaacttgctcgtcatccattaagaccttatacccttgattatattaatcgtgtttttactgattttcaggagttggcgggcgatcgcgcttatgctgatgataaagcgattgtcggtggtattgctcgtttagacggtcgtccggtgatgatcattggtcatcaaaaaggacgtgaaacgaaagaaaaaattcgtcgtaattttggtatgccagctcctgaaggttatcgcaaagcgctacgtttaatggaaatggcacaacgttttaaattacctattatcacttttattgatactccgggagcttatccgggggtgggcgctgaagagcgtggacaatcagaagcgattgctcgtaatttaagagaaatgtctcgctttggtgtgccaattatttgtaccgttattggcgaaggtggctctggtggtgctttggcgattggtgtgggtgataaagtgaatatgttgcagtacagcacctattccgttatttcgccagaaggttgtgcttctattctatggaagagtgctgataaagcaccattagctgctgaagctatggggatcacggcaaatcgtttaaaagaattaaaattgattgatacggtgatccctgaacctttaggtggtgctcatcgtcattatgatgaaatggcagcatcactaaaagcacagctaaaagctgatttagcgcagttagatgagtttgatacagaagaactcactaaccgccgttatcaacgcttaatggaatatggctattgctga

SEQ ID NO: 316884 - DNA, 201 bp, Proteus mirabilis
gtgttgttagagcaactggaaaatcacggttatgctattccctatagttgtcgtgcggggatttgtggctcttgtgttattcaattagatgaaggtgatgtcaatgcattaaaagcaggtgccataaaacgttctggcagaatactcgcatgtagttgtgttcctaaaggcaatgtaaaactttcacttaataaaaaataa

SEQ ID NO: 316885 - DNA, 753 bp, Proteus mirabilis
gtgttaagtagccgcaaaaactcagcgctctttgatgctttaaattatcgtcactatcaattagcactattttcaactaacggatttaaatcgccattatttacacaagcggtgctggctgattactcactacctacttcacgtagtgaggataacgacacaacgattaatagttggcgttcatggttgttaaaaaataaacaaagcacaccttggttctctttcttacaaatcaacggtgataagcatacatcagcttctcaagcacagttaaatagtcaattagagaccatttttactactttaaaagaaagcaacatacttgataataccgttgtggtcgtaacgtcaaattatcatcagaacaatgataaacaagatagccaatggcttattagcaaagacacttttaacttaagtcaatcgcaggttccgctggtaatacattggcctaatgttacaccacaaaaactagataaactaaccagtcaccaagatataatgacaacgctaatgcaacatgtattaggtgttattagccctgcagataactattctcaaggcgaagatctatttgctaatacgcgtaatcacccttggatttttactggtgataatgaaactctagtggtctttttacaagataatacgttaatgatagataaaccgccaaacctgatttacgcctattattgcaagtactggctgagcaaaaacgatttattgagcgttagtattaaaaaaagactataa

SEQ ID NO: 316886 - DNA, 168 bp, Proteus mirabilis
atgtcagactatctatcatttttactgggaattgttcctttagccgttctgatttttatgattttaaaaatgaaatcggccgttcatcacgctgtcctcgtttcgctatttttcattggaataacaccctacaatttgcctctgtatctgtactttatggtgcggtaa

SEQ ID NO: 316887 - DNA, 228 bp, Proteus mirabilis
atgacacaaaatcagttaccgctgttagggatcaccgcttggagtggtacaggtaaaacaaccttactaaaaaaacttattcctttgttgcgtaacagaaatattcgggttggtatgataaaacatacccatcatgatatggatgtcgataaaccaggcaaagacagctatgaacttagaaaagccggagccgaacaaacattagtcgctagtcaacgaaactcctga

SEQ ID NO: 316888 - DNA, 312 bp, Proteus mirabilis
atgatttcttggcgtaaattctttgttattaccggatttttactgcttttcctcgccgtttccttgctattaaaagcagtagaagagatagctaatctacttattgaaatggatattgaattacctgactttttgatttatccactatgggatcttagccatattctggatgattcaagcatttttggtaatttcttagtttcattctttgcttatcgctcacaacccatcggtttaagtgttgttacttttattgtgttttggttggtggtcgcactgttatttaaacaaggggatcgtcatgccaaatag

SEQ ID NO: 316889 - DNA, 1581 bp, Proteus mirabilis
atgcaacgtcgtgaatttttaaaattaggggcaacattaagcgccgtcacactattaccaagttggagccgtctcgcattcgcccaaactaacacgccttcactcgctattccacctcaaattagcccagacaaacaacaaaagattgttcttaatatccaacaaggtgtttcccagtttactgctacagcaagtacaactacttgggggtataacggtagcttattaggcccagcattaaaattaaaacgtggtgaacctgttactattgagatcaataacacgctgccagagactacgacggtgcattggcatggtcttgagataagtggtgaacaagatggaggtcctcaagcgactatcgcaccgggtaaatcacgaacagtaacttttacgccagatcaagcggagtcgacatgttggtttcatccccatactcatgggatcaccggaaaacaggtggcaatggggttagggggattagtgatcatcgaggatgacgaaacggccaagcgaaagttacctcaccgctggggagtggatgatttaccggttattttacaagacaaacgcttagacagtaacggtcaaattgactatcaacttgatgtgatgagtgctgcagtaggttggtttggcgacatgatgctcactaatggtgcgattcaaccgcaacacattgtaccaaaaggttggattagattacgtttcctcaatggttgtaatgcacgtagtcttaatttagccaccagtgatggccgaccaatgtatgtaattgctagcgatggtgggttattagcggaaccagtcaaagtgacagaactccctattttaatgggggagcgttttgaagtactggttgatacctcagatggacgtgatttcgatattgtcactttacctgtccgacaaatggggatggtattagcgccatttgataatgtattacctgtattacgtctactgccttcagcagaaaaagcggtgggtattttacctgatcaattagccttaattcctgcattaccatcactaagtcatattgcgacacgttcattacatttacgtatggatatgcgtttagatatgcaaggtatgatggcgctaacggagcgttacggtgataaagcgttagcgggaattcaccatggtatgagtcatatgcgtcagggcaatggaaatggcatgatggggggcggcatgaattgtggtcatggctctgcggatgttgatatttataatgcaaatagcatcaatgggatcccattctcaatgaccgaacctgcatttgatgttaaacaaggggtttatgaacgctggctggtttctggtcgtggcgacatgatgttacatccattccatgttcacggaacacagtttcgtattttatcggaaaatgggcgtaaacctgaaaaacatcgccaaggttggaaagatattgtcagagtggaagggcaaattagcgagatccttgtaaaatttgaccatttagcgacaaaggaacacccatttatggctcactgtcacttattagaacatgaagatacaggaatgatggcgggctttacggtgagtcgataa

SEQ ID NO: 316890 - DNA, 1140 bp, Proteus mirabilis
  misc_feature (1116)..(1125): n is a, c, g, or t
atgtcatttactaaatcaatgcttgcactcgctgttatggcggtttcttttactagtcacgcagccaaacaggctgatttaatgattgtcgatggcacagtgttaacaatggacgcacaaaatcaggttatcgaacaaggaacggttgttgtaaaagaaaataaaattatcgccgttggggggcctgagttaacacaagaataccaagccaacaaagtgttagatgtggatggtgatatcgtgatgccaggattaattaatacccatacacatgcatcaatgacgatttttcgctctttagccgatgacgtgccagaccgattacatcgctatattttccctttagaaaataaaatggtgtctcgcgatatggttcgcgtgggagcaaacctcgccaatgttgaaatggtaaaagggggagtaactacctatgttgatatgtattattttgaagatgaagttgctaaaacgattgataagatgggaaatagagccatcttaggtgaatcagtgattaattttccggtggctgatgcacaaacccctgaagaaggcattcaatatgctgtcaattttattaatgaatataaagatcacccgcgcattattcctgcctttgcacctcatgcaccttataccaataccacagagaacctgcaaaaaattgctaaactctcggtagagcttgatgcccctgtgatgatccatttagcagaaaccgatagagagaaagaagaaattgcaaaacgaaccgatggtaaaagcccagttcaatatatggcagatattggcgctttaaataataaagtcattgccgctcatgcgattatggttgatgagcaagatattgatttattaaaaaaatatgatgtaggtgtggctcataatattagtgctaataccaaatcagccaaaggtgtttcgcccgttgttgccatgctagaaaaaggtgttcgtgttggtttagggactgacggtccaatgtcgagcaatacactcacaacgatgaatgagttaaatttagtaggcaaaattcataaattagagaataaagatcgcgccgcaatgccaccattaaccgtcgttgaaatggcaacaataggctcagccaaggcnnnnnnnnnnacatatggaagataa

SEQ ID NO: 316891 - DNA, 795 bp, Proteus mirabilis
atgagatatttaatcaataattgtccacttattattttagggagcgttgttttactattatcaggttgtcattcactaatttctaagatagatacaacatttttgcccccagaaaatggcagaacagttaaaatttcggttgatgtaccggatatggctgaactatcgccaatgaaagtcatgtatcgttcaaatctttgccaaaaaacatataataataatgaagttcctaaatatacagtgcctggctttaatagtgagataatagcattagaaaaaagagagaatagctcattatatagtgcagagatcccttatagcggaggcggaaaatgtgattggcaattaagtaatgttacattaagattgacattaaaaaagaataattcttttactaaagatattgttgatatagtaggaactggagtaattattatttttgataataatcaacctcaacaaactggtcataaaccaattaaaataaagggtagttttgatatagtagagcattatttcccgtgggtaagtgattcatttaaaaatagtaatgatattagtttatggttatatggaaaagctcttttcctttattatcaatctcgtgatgctcaacaaataacatggaagcccatcattcatagtgatattgtggtttattctgaatatccagcagaggaaaaaacagaaggtgtaagtacaatctattcttatccagatggtacaaaaagtgcaaatagggatgggaagcctgattacaaaaaactactctctttaattaagccgtcatcgtaa

SEQ ID NO: 316892 - DNA, 258 bp, Proteus mirabilis
atgccatttgatttatctattgttatattatcagatataaaagggggaatacttgaagagctaaggtcaggtgctctcattaaatccccatctttagaaataccgaaggaaacatccattaaaaaagataaatctacagcaaactcattattttcaacagatacaatcgtagtaaaacattctaccccaaagattttaccgctttcattcaattcaacatcaagaccaagtatccagctggctctgctttgtaagtaa

SEQ ID NO: 316893 - DNA, 147 bp, Proteus mirabilis
atgtcttgttttcgtgcggggggtaatgcgcatatcgttttattcggtatcaatactgagaaagattatttgcaagcagtagaattaggtgctgatgcagttatggttgattctccagctaaaataaaagcattcagaaaagagtaa

SEQ ID NO: 316894 - DNA, 207 bp, Proteus mirabilis
atggtgaaatatcgtcgtgcaaatattgatgtcaatgcactggtaggtaagcgcatacaaaaaagacgtaaagagttaggttacacaggtagccaattggcggcaaaactaggggttagccaacaacaattctcacgctatgagcgagggttaaacaaaatagatcctgtctcttatacacatctgacgctgccgacgaaggcttag

SEQ ID NO: 316895 - DNA, 255 bp, Proteus mirabilis
atgttaggtgaactcgcaccacaagatagattaaatttactctgtgaacttaacgtgatagaacaagtttataaccttggtcactcaactattatgcaagccgcatggaaacgtggacaaaaagtgatgatccacggttgggtttacggtttaaacaatggtgaattacacgatttagatatcacctcagacagtcgtgaaaaactagaactctcttatcgccaagctattgcaaaattaagccatccacgttga

SEQ ID NO: 316896 - DNA, 1629 bp, Proteus mirabilis
atgcataaaaaggatatttcgcgaaaacagcgtttaataagctattgtgttatttatttaaccgctatttacccattgcatcctgcttggggctctgtcattacttcatctgataaaacgataacaataaatcagcaaaataatattcctattattaatatagcaacacctaatgacagtggtgtttctcataataggtttaatgtctttaatgttaataaacagggggcagtacttaataattcgcaagttgatgccaatagtcaattggcaaaaaaaatatctgctaataaaaatttaaaaggtaatacggctaatttaattattaatgaagttgtcggtaatagtcgttcacagttattaggtaaattagaagttgcaggacaacaagcggatgttttaattgctaatcctaatggaattagttgtgatggttgctcatttattaatactccatcaattactctcacgacgggaaagcctcaatttagccctcaaggtacctattcggcactagaagtaaaaaaaggcagtattgttattggtaagcaaggtatgaatgccgatttgcaaaattatgccgatattattagtcgtagtattgaaataaatggaaagataaatgctaaaaatctctctttaatgcaagggaataaccatattgatttcggcaaagggacagtaaatagcattaatggagaaggtgtaaaaccgaccgtcgctattgatacaaaagcattgggtggaatgtatgccaatcaaatacgcttagttagcacagaaaagggggtcggtgttaatttaactgatattcaaacaaaacaaaatagtatcaatttaacagttgatggcaaaattacctttaatggcaatattcaatctgagcaagatattaatgttagtagcaaagcgctacaaatgaatagtaatgccagcttaaaagcgcaaagagatattacattagcaactaatacgctaacgaatcatagtgatattatcgcagaaaaggatatgcgtttattcgtagataaattcactaataaaggtgaaaaagcgcttattcaagcaaaagataatttatggatacaaaaaaatgcacagggtgaaccaagtagtttaattgaaaatcaatcagccaccataaaaacagaaaagggtgatttgattattagaaccaagaaattggttaatgaatctattactcctttatttaaagaaataaagcaagagcctgattctacatcgtctataaatataggtactcattttcttcatccttacaatagtcctacgaataatttccttataattattttacttgctgaattaaaagaactctctgataaaaagtggtttgatatattagatttaaaaaataatggaggtgttaatgtagaacgctcattatttgaaaagaataaaaagtatgttcctagtgttatttattctggtaaaaatttatatatacaatctaacgagttttttaatacccaatctgatatttttgcaactaatgatcttatcgcaacgggaaacaatgcaaaagtatactattatcggtttggacaccttaataaatgggatctttattctcatgataatgctcatatttttatcgagatgatgtaa

SEQ ID NO: 316897 - DNA, 135 bp, Proteus mirabilis
atgttggtgattaatgtttacctatatgatttttcaggtaatttattttcaaataaatctcagattggaatggagatcacttctttggaggggagggagcataaaaaaagccctcacggggagggctatttataa

SEQ ID NO: 316898 - DNA, 231 bp, Proteus mirabilis
atggcaggtaaagaaattcaactgtatggagtaaagtgggatgaaaaaacactttatcttcatgagaattcaatagctggattctgggaggataatgaagataaagaaaatattaaatcagcaattatgctaactagcggtaaagacttaatttgttcagtaccgctatctgagcttttagcacaattaaaagcggttattaattacaaactaccatcagaaaatatctag

SEQ ID NO: 316899 - DNA, 717 bp, Proteus mirabilis
ttgatagatgatttagttatgaaagatgaaaatgatttgtatgaaaaaagacgtcaaaagctagctgaacttgtttcccgatatgagacgcaagaagagttttctcgtgtcataggcaaagataaatcatatgtatctaggatgctgtatccaccgacaaaggctggttacaagagaattggggataagatggttttagctattcagaaagcattagggctcccttctggatggatggatggtataacagaatcagaattcaccccaccgcaacataatgataagttcaaggttgaaatactagacgtagaggcaagtgcaggcgctggcgtgatggttatcgatgattttatcgagactatcacggctattgagtattcagcggatgaagcaaaaagattattcggtggaagaccttcaaatacgataaagatgatcactgtaaaaggtgattcgatggctgaaacgttcgaacctagggatcagatattcgtagatataaccacaaacttttttgatggtgatgggatttatgtgttcgtattggataaccagctctacataaagcgattgcagaaacagtataagcgcctagcagttatatctgacaaccctagatatgaaacttggtatctggacgaagatgctattaatgggctttatatatgcgctaaggtgctagttagccaatctattacttataaattccacggctaa

SEQ ID NO: 316900 - DNA, 978 bp, Proteus mirabilis; identical to SEQ ID NO: 313444

SEQ ID NO: 316901 - DNA, 594 bp, Proteus mirabilis
ttgaccaacagtgagggtgaaatagtttggcaagggcaatacagtgcttgggggcatttacagcgtcaaacccgccccacaagcacatttaatcgtgaacagaacctgcgttttcaagggcagtatttcgacaaagagacgggcctgcattataatacgttcaggtactatgccccggatttaggccgttttacccaacaagacccaatagggttggcaggggggataaatttatatgcttatgcgccaaatccgattttatggactgacccgttgggattatctgcatgtggtgttaatttcaacaaatcacaaattcagaaaaaattcaaacatgctgaggattttggtatatcaggtagtgctaataagcaaaactttgaagctttcgagcaagcaatgaaaaatcatatagagttgccaacaacggtgaatatatcgggtacatatcgttggaagcaagatgtcattcattattttgatccaaaaactggtcttaatgttatggcagataaaagtggtaattttatatctggttggaaattatcagagagacagatagctgacttggtggagcttgggaatgtattctaa

SEQ ID NO: 316902 - DNA, 642 bp, Proteus mirabilis
atgctgctgtctgacttagactatggtttagccatagtaactttgagtgttacgttacgccgagtccccatggcggtatggcatgaagccgaacgcaccggcaccactgcccgcgtagagtatcaagacaccctgacctttacctacgataaagtggggcagttggttcgagaagccagtgctcgcggtgattatcagcatcactatgatgtgctgggtaatatcactcgcaccgagttgccccatcaacgggcatttgaatacctgtattacggctctgggcatttacaacaaacgcaatggcgagataatgcgcaactgacggtattggcggaatatcaacgagaccgtttacaccgagaaacgttacgtaccagtggcgccttagacaatgaaacgggctatgactgtcggggacgtattacgcaccaagtggcgcgccaaatgaatgcctcacagtttgtgaccccggtgatagaccgtcgttatcgttgggataaacgcaatcaatttatcgagcgcagtgtcagttatggtcaaacgggcgaggtttttatcgccggacattggtactaccacagttatcagtacgacccgctgggacaattgacggcacatttagggtcggtgcaaacctactag

SEQ ID NO: 316903 - DNA, 468 bp, Proteus mirabilis
  misc_feature (376)..(385): n is a, c, g, or t
atgggacaagttctatttgttgtttggcgagaaagttttgaagctctgctggtggtagggatcatttatgcatggataaaacgctctcctacccctaaacaaggtatgaaatatctctgggggggagtaatagtaggaatactactctctattcttttagctcttagcatttatggggtatttagctccttagaagatatctggcaatctctgtttatgattatgatggaaattattgcctgcctattaattgttcagatggtctattggatgaacaaacaaggtaaatcactaaaagccaatatcgaaaacgaattgacacaaaaaacgcaacaacaaagtgtctgggggattttactgatcatcgccattgccnnnnnnnnnnagagaaggcagcgaagaggttgttttcctatcaagccatattatggctctcacagcacaaaccgcgttgcctttcttgattga

SEQ ID NO: 316904 - DNA, 945 bp, Proteus mirabilis
atgaaaaataataccgattttcgtttcatattagtgatgcgaaaaagtcgcctacaagaattaattgagcgttttaacacttggtcacaagccaaattctatttagaacataaccatgttgaggtaacagattatcttaatgaacataatctctatcaaaaacaactcacagaagctgagcttattttaaaatcatttggacgttttcagctcttggaaagaggattattgcctagttatcaattttcctctcatgatattgtagtggtaataggtcaagatggcctcgtcgctaatactctgaaatatcttaatcaacaacccgttattgctatcaatccagacccttcaagatgggatggtaagctcttgccctttgaaatagggcaattgaaagagattataattaatacaataaatcacaaaatgccttttaattcggtcacttttgcacaagcaaaaaccaatgatggtcaatcactgttagcggttaatgacttatttattggccctaaaagccacacttccgcacgttatatcttacaatggggagactctcaagaagtgcaatcctcatcaggcattattgtatcaacgggacttggctctacagggtggtttcaatctattcttgctggagccatggccatcaccggaaaagcatcacaccctcttttacaagggtttagctggagtgataaaaaattacaatttagtgtaagagagccatttcctagtagaacaacaggcaccgctttaacttttggcacgattgagccggactctccattgcaattaggatctttaatgcccgaaaatggtgttattttctcagacggcattgaagaggattatttacattttaatgctggctgtattgtgcaaatcaatatcgcagatagacaagggcaactcatcgcccctaaggggcgtcagcctatttaa

SEQ ID NO: 316905 - DNA, 978 bp, Proteus mirabilis; identical to SEQ ID NO: 313444

SEQ ID NO: 316906 - DNA, 666 bp, Proteus mirabilis; identical to SEQ ID NO: 293796

SEQ ID NO: 316907 - DNA, 852 bp, Proteus mirabilis; identical to SEQ ID NO: 313446

SEQ ID NO: 316908 - DNA, 741 bp, Proteus mirabilis
atgttagaacaagtcagcgaattagcccgccaagcgggtcaggcgataatgcaaatttatcaacaatcagcgccaattgaagtacaggaaaagagtgaccattcaccggttactgcagcagatttagccgcccatcaaattattaagcaaggacttgccagtattgcgccagatattcctcaattatctgaagaagatcctcctgcgtgggaagaacgtcgccattggcaacgttattggctgattgatcccctcgatggtaccaaagagtttatcaataaaaatggtgagtttacggttaatattgcgttgattgaacagggtgtgccagtattaggcgttgtgtatgcaccagtacaaaatattctctactcagcagccaataaacaggcatggaaagaaacttgtggtcagcgtttaccaataaaagtcagccgtgctgaaccccccgtgattgttattagtcgttctcatcaagatgatgaattaaaagaatatttatcgcaattgggtgagcaccaaacggttgctgttggatcttcattaaaattttgtctagtggcggaaggaaaagctcagctttatccgcgttttggacctactcatacatgggatactgcagcaggacacgccattgcgatagccgcaggggcacatgttaccgattggaaaggagtgacacttgattattcaccgagagaatcactgataaatcctggttttagagtctctattttctaa

SEQ ID NO: 316909 - DNA, 1449 bp, Proteus mirabilis
gtgaaaataactgacaatccctatttccgtgaacaaggatatattgacggtatttggtgtgatgcaaaaagcaaagacacggttgaagtgattgatcctgcaacaaatcagcccattggtactgtgccaaatatggcaacagaagaagccaaagcggctgttgatgcagccgccaaagcattaccgacatggcgtgcgttaaccgcacatcaaagaagcactttactgcaacgctggttccaactgatacaggataacaagcgtcaacttgcagaactgatgacgtttgaacaaggtaaacccgtggccgaagcggaaggcgaaatcacctacgcagcctcatttattgagtggtttgctgagcaaggtaaaagaaccaacggtgaaattatcccctccccttcatcagataagcgtcttatggtgatcaaacaagggattggtgtttgtgcggctatcacaccttggaacttccctgctgccatgatcacccgtaaagcagccccagcattagccgcggggtgtactatggtgataaaacctgccaacgaaaccccctatacagcccttgcgttagctgaattagccgcgcaagcaggaatacctgccggtgttattaatattgtcaccggtgatgcagttaaaatcggtgaagtgttcacatcagacaaccgcgtgcgtaaattgagttttactggctctacaggggttggccgtttattaatgcgccaatgtgctgacagtgtgaaaaaagtctcactggagctagggggaaatgcgccatttattgtctttaatgacgccgatattgagaaagcggttgcaggtgctatgggggcgaaattccgtaacgccggacagacttgcgtgtgtgcaaatcgtttttatatccataaagatgtatatcaacaatttagtgaacgctttgttgcagaggttaaaaaactaaaagtcggtaatggctttaccgaaggcgtgactattgggcctcttattaatcataaggcggtagaaaaatcacaatcactccttgctgataccttacaacgcggtgcgacactgctatgtggtggtgaaagagataaagcaggtgaaaatttctttcagcctaccgtggtcggtaatgtgcctgctgatagtcatattcttgaagaagagatctttggccccgtggcacctttagtcatttttgacaatgaagaagaagtagtacacctagccaataacaccatctatggcttagccgcttatttctacagtgaagatccacaacgtatttggcgtgtggctgaaaatctagaatatggcatggtcggtattaacacaggtctaatttccaatgaagtggctcctttcggtggtataaagcagtctggcttaggtcgtgaaggctctgagcatggtattgaggactatatggaaatgaaatacctctgccaaggcctgtaa

SEQ ID NO: 316910 - DNA, 648 bp, Proteus mirabilis; identical to SEQ ID NO: 306848

SEQ ID NO: 316911 - DNA, 126 bp, Proteus mirabilis; identical to SEQ ID NO: 295415

SEQ ID NO: 316912 - DNA, 249 bp, Proteus mirabilis; identical to SEQ ID NO: 295416

SEQ ID NO: 316913 - DNA, 660 bp, Proteus mirabilis
atggttcgtgctagtatggcaacaagaaataaaaaagaggttacaattagtgatagtgattcacagttcaatcatgaggtgaatatgggcaaattcccaggcttacatcgtcgagcaatcgttgttattgccattattttgttagtcgtttttttctggccaacaagtgaaaataccaccccacctcaaccctcatcttcgacacaagatcttcctgtgcctgtagcaccttctgtctcaaatgaaacacaaaatgtccctaatacactaccaccagcacaagatagtctaaatgctgagcaagagacagaagacttaccagaagaaggtgaagccaataataccaatgacaatacgccagtaaacacaacgcctcaaacaccgtcaaccgcgactgaaaattggcaaacttataccattaaagaggggcaaacccttgcacaactatttagagataatcagttgcttgtcaatgatgcgtttactatggcgaaatcagaaggcccacaaaagccgttaagccagttacgcgccggacaaaccattcgtttacaacgaggttcacaaggtgaagtgagtatgcttgaagtgactgacaataccggtactgttattaccttcacacggctaagtgatggtagttattatcgtacgccatag

SEQ ID NO: 316914 - DNA, 450 bp, Proteus mirabilis
atgcaaattattctgcttgataaagtagcgaatctgggtagcctgggtgatcaggttaacgtaaaatcgggctatgctcgtaactatttaatcccacagggtaaagctgtttctgcgactaagaaaaacatcgagtttttcgaagcgcgtcgtgctgagttagaagctaaattagctgaaactttagcagcagctgaagctcgtgcagcgaaaatcactgcactgggatctgtcactatcagctctaaagcgggtgacgaaggtaaactgtttggttcaatcggtacacgtgacatcgctgatgcagtaactgcagctggcgttgaaatttgtaagagcgaagttcgcctgccaaacggcgttctgcgtacaactggtgaccacgaagttcacttccaagttcacagtgacgtattcgctgaactgaatgtaatcatcgttgctgaataa

SEQ ID NO: 316915 - DNA, 228 bp, Proteus mirabilis; identical to SEQ ID NO: 295419

SEQ ID NO: 316916 - DNA, 318 bp, Proteus mirabilis; identical to SEQ ID NO: 295420

SEQ ID NO: 316917 - DNA, 396 bp, Proteus mirabilis; identical to SEQ ID NO: 295421

SEQ ID NO: 316918 - DNA, 744 bp, Proteus mirabilis
atgagcgaagatattatttatggtattcacgcagtaaaagcactgcttgagcgtgatccgacacgttttaaagaagtttatgtgttaaaaggacgcgaagatcgtcgtttaatgccggtgatccatgcgctggaagaacaagggattttagttcaagttgctaatcgccaatggttagataatcaaactgaaggtgcggttcaccaagggataattgctaaggtaaaacctagtcgtcagtaccaagaacaagatttaccggacttattagctgaagtaggtacaccttttctattagtgttagatggtgtgactgatccacacaacttaggggcatgcttacgtagtgctgatgcggctggtgttcacgcagtcattgtaccaaaagatcgctcagcgcaattaaatgccacggcgaaaaaagtcgcttgtggtgctgcagaaagcgtacctttgatccgtgtaaccaatctggcacgtactttacgcttactacaagaagagaacatctggattgttggcaccgcgggggaagcggatcatacattatatcaaagcaaactcacagggcctttagctttggttatgggggctgaaggtgaaggaatgcgccgtttaacccgcgaacattgtgatgagttaatcagtattcctatggcaggctcagtctcttcattaaatgtctccgtggcaaccggagtttgtttatttgaagcaatgcgtcagcgtatttctgtaaaataa

SEQ ID NO: 316919 - DNA, 2490 bp, Proteus mirabilis
atgtccaaagatccttttcaggatagagaagccgaaaaatacgcctctccaattgctagtcgtgaatttattttagaagaaatgaagaaacgcccggccccgatgagccgtgaagatatcgcgcaggcattgaaaatttcaggtgaagaaaatctggaagcattacgtcgtcgtttacgggctatggaacgagatggtcagttagtttttactcgacgtcagtgttatgccttacctgaacgcctcgatctttggaaaggtaaagttatcggtcaccgtgacggctatggttttttacgtgcggaaggccaaaaggatgatctctatctttcacaagatgaaatgaaaaaaaccatgcatggtgatgtgattttagcgcaacccctaggcatggatagaaaagggcgtcgagaaggtcgcgttgttcgtgttcttgaacccagaaacagccaaattgttgggcgctattttattgagtcaggtatgggatttgtggtacctgacgatagccgtttaagttttgatattcttatccctaaagaagatatcatgggcgcacgtatggggaatgtggtggtggttgaagttaccacaagaccaacacggcgtactcaagcggtaggacgcattgttgaaattttaggtgaaactatggggacgggaattgcggtagaaattgcactacgcacccatgaaattcctcatacttggccacctaaagtagaaaaagaaatcgctgatttaaaagaagatgtgccagagtcagcgaaacaaggccgcgttgatttgcgtgatctccctttaattaccattgatggtgaagatgcgcgagactttgatgatgccgtttattgccagcgtaaaaaaggcgggggctggcgtttatgggtagcaattgcagatgtgagctattatgtacgccctcaaactgcattagacacagaagcgcgtagccgaggcaattcggtctatttcccatctcaagttgtccctatgctgccagaagtactgtcgaatggattatgttcattaaatccacaagtcgaccgtttatgtatggtttgtgaaatgaccgtttctgagcaggggcgcctttcatcttataaattctatgaagccgtaatgagctctcacgcgcgaatgacttacaccaaagtatggaaaatcattcaaggtgatgaagagttacgtgagcactaccaaccgatcgtaaaagatattgagcacctttatgagctataccaagccctcgataaggcgcgtgaacagcgtggtgccattggttttgaatcggaagaagcgaaatttattttcaatgcagaacgtcgtatcgatcgtatcgaaccggttgtacgtaatgatgcacataaattaattgaagagtgcatgattttagccaatattgcggcggcgcgttttgttgagaaaaatgaagagcctgcgttatatcgtgtgcatgataaacccaaagaagagagcgtaatgaatttacgttcggtatttaatgaactgggtttaacattaccgggaggattaacaccggagccaggcgattatgcgcgggtcatgaaagaagtcgaagagcgtccagatcacgaaatgctacaaaccatggtattgcgctccatgaaacaggcaatttacgatcctgaaaatcgaggtcactttggtttagcattaaaatcttatgctcacttcacttcccccatccgtcgttatcctgacttagcattacatcgtgctattaaataccagatagcgaaacagcaaggccatggctcacaacgctggaccccaacggggggctatcatagtgatatggataccatgcttcaattaggggagcactgctctttaactgaacgtcgggcggatgaagcaacccgtgatgtggctgattggctgaaatgtgatttcatgcttgatcaaattggtcagcaatttaccggtattattaccagtgtcactggtttcggtttctttgtgcgcttaaacgatctatttattgatggtcttgttcatgtatccacattaaataatgattactatcaatttgataatgttggacagcgtttaattggtgagtcatccggtcaggtgtatcgtctgggtgatgaagttgaagtgaaagttgaagcggtcagtatggatgaacgtactattgacttctcattgatttcaacaacacgtaaagcacgtaaccccgggaaaacagcacgtgttcgtgcgttaaaagggggaaaagacaagaaaaatgcgagcagtagtaagtctcgtcgtcgtgatgccagcaaagacaaaaactttgaacctgatagtgcctttagaaaaggtaaatcaagtaaagaaaaacagagtaaagataaagtcattaaagagaaaattgcgaaggacaaggcgagtactaaacgcaaaaaagcctctgcacaaaccaaaaagatagaggcgaaattaaaagccaaacgtgcggcgaaacgcactaaagcgtag

SEQ ID NO: 316920 - DNA, 429 bp, Proteus mirabilis; identical to SEQ ID NO: 295424

SEQ ID NO: 316921 - DNA, 1299 bp, Proteus mirabilis; identical to SEQ ID NO: 306859

SEQ ID NO: 316922 - DNA, 1005 bp, Proteus mirabilis; identical to SEQ ID NO: 295426

SEQ ID NO: 316923 - DNA, 1275 bp, Proteus mirabilis; identical to SEQ ID NO: 306861

SEQ ID NO: 316924 - DNA, 1284 bp, Proteus mirabilis; identical to SEQ ID NO: 315748

SEQ ID NO: 316925 - DNA, 291 bp, Proteus mirabilis; identical to SEQ ID NO: 306863

SEQ ID NO: 316926 - DNA, 942 bp, Proteus mirabilis; identical to SEQ ID NO: 306864

SEQ ID NO: 316927 - DNA, 2010 bp, Proteus mirabilis
atggcgattaatttattacctcctcagttagcaaatcagattgcagcaggggaagtcgttgaaagacccgcttctgttgttaaagagttacttgaaaacagcttagacgcgggtgcgacaacaattgatatcgatatcgataaaggtggcgctaagctaattcgtatccgcgataatggatgcggcatttcccgtgatgatttgaagttagcacttgctcgccatgcaacaagcaaaatatcgacactggatgatcttgaagccattatgagcatggggtttcgtggtgaagccttagccagtatcagctctgtatcacgtttaaccttaacatctcgtaccgcatctcaagaggaggcttggcaagcctacgccgaagggcgtgatatgacagtggcagtcaagccagcagcacatccggtggggagcacagttgaagtgctcgatcttttttataacactcctgcaagacgtaaatttttacgtaccgaaaaaacagagtttggtcatatagatgaagtagtacgtcgtatagccttatcccgctttgatgtgtcaattaatttaacccacaacggtaagcgggtgcgtcaatatcgcgctgcgaaagaaactcatcagcatcatcgtcgtttaagtgctatctgtggtaatcattttgttgatcaagcaatgcaactgacgtgggagcatggtgatctggcaataaaaggctgggtagagcatcctttagctccagtgcaaagcagtgaaatacagtactgttatgtcaatgggcgcatgatgcgcgatagattgattaaccatgctattcgtcaagcatatgaaggttatttgcaaggtgaacagcaaccctcttatgtgctttatttaaccgtcgaccctcatcaagtggatgtcaatgtgcatcctgccaaacatgaagtgcgttttcacgaatcgcgcttagtacacgattttatctatcaagctgtcctgagtgtgttaaggcaggttacagaagatacgttatctttagatgaagaggataatggggctttaactgccacaacatttcctgaaaatcgccaagttgcgggagaaaatgttttttcgcagccttatcaagcaccagtaacctcatctacgcaaaaaaagagcacgggagcttaccaaggaagtgcaggaaaagggttaacagatacgcaaaagagtccccaaaaaacgctagatacacgtcagtttggtgagagttatcaacgtacgcaaggcatgctttatcaaaaaatgatgcaagaaagtgcgagcgatgttgaaaataaagaaaaaatacctctatttccccctcgtcccccattgaatttggttgatgttggtcatacaactaataacaatgaaacaaatgtaatttcagtggtgcctcgttctgttaatgccagcgcagcgcaaacagattatacttttggccgggtattggcgatttatcagcagaaatatgcgttaattgaatcttcgcaaggtctagggctgttagcattggaagaagctgattttctgttaaaatgtgcccagttattgccagaaaatgaaaatctgaaaccccaacctttgctagtgcctttaaaagtcacactcagtaaagatgaaattaatacatttaagcagtttcaggcgttaatcagtgattttgggattgttatcgacatctctcatggtaaagcgacgatccacgcggtctcgttgccgttgcgacagcaaaatttacctgtattactgacaaagctattagcttatttggcaacagaaaaattatgctctaaacaacaaattgggcattggttagcaaaacagttaagtcatgagtcgggtgtttggtcacaggctcaggcagtaggattattggctgatattgaacgattatgtccacaatatgtcagacagccgtccaaaaacttattacaattaatagaattacaacctgtggtagcggcactgaataatgagcgaagtaaaaacgcaaataaaacctaa

SEQ ID NO: 316928 - DNA, 1317 bp, Proteus mirabilis
atgtcgagtctcatcactattgtgagccaatgtcagcgttatattgccacctttttgttggttgttctgtcactttttgtggtgcaaatagcacaagccgctacggtaacagaagtgaaggccgaaaatggggatgtggctacaacacttacattttcgtttagtggtgggaaaccaagctatagatattactcactgaaaaatccagataggttagtgatggattttaagcaaggtagccaaataacgggtttacctgtgacattaaatcgtcagcaattagcacagaaaattcgcacgacacaatcaaaagatagccaatatcaaagtatggtggtagagcttgccaaaccagtggtggtgacggagcgcttgttaaatagcaatggtgaatataagttagtacttactatcaaacctattaatgctcgacaaaataacaatacatcaacgacggtcagtgtagtggcgttatcagcaaacaaagccacaaatacggtggctaatcaacagatggcgcctttagtgagtacacctaagcaacccgttgcacctgtagtaccagtaaagcctcgcacaacctcgaataagcccgcatcgagcgatcggcaaataattattgcgattgacgcagggcatgggggtcaagatcccggcgctattgggcaaaaaggtaatcgtgaaaaagatgttaccttaagagtggcaaaaaaattagaagcgattttgcgtaatgatcctatgttcaaacccgttttaacccgcaatggcgactattttatttctgttgctggacgctctgaagtggcccgtaagcaaggtgccaatatgttagtgtctattcatgccgactctgcacctaatcgcagtgcgcgcggggcatctgtttgggtattgtcaaatcgtcgcgcgaatagtgaattaggtaaatggcttgaacaaagcgaaaaacaatcagagcttctcggtggcgctggtgatgcactcgcagaaggggttgatccctatttaagccaagcagtattagatttacaatttggtaattcacagcgtgtaggctatgacgttgcggtagcggtgttatctgaacttagaaaagtaggatcattacataaaaaaacaccagagcacgccagcttaggggttttacgttcacctgatattccgtctattttagtcgaaacaggttttattagtcatgccgctgaggaacaattgctgatttcagatgcttaccaagagaaattagccgcttcaatctatgccggattaaaaaattactttctcgctcatcccttacagaatgggccaaaataa

SEQ ID NO: 316929 - DNA, 474 bp, Proteus mirabilis
atgaatatgaaagaatgggttgttacattagaagatgaagctgcaacagtaaaactagggcattcagtcgcaatggcgacaaataaccaagggcttattatttatttatttggtgatctaggggcagggaaaaccacctttagccgcggatttttacaagctttaggtcatcaaggtcatgttaaaagtccgacatataccttggtagagccttatatgctgacaccacgcccagtctatcatttcgatctttatcgcttagcttcagcggaagagttagaatttatggggatacgtgactattttgcacaagatccactgtgtctcattgaatggccttctcaaggggaagggtttatacctaatgcggatttagagcttcatttaagctatgaaaatgaaggtcgtaaagcccattttattgccctttcacagagagggaatgctgttttatcccgtattcagtctgcataa

SEQ ID NO: 316930 - DNA, 1155 bp, Proteus mirabilis
atgtcatcactcgatcttcatcaccttgctcaaaatataaaacgttggggaactgaactaggattccaacaaacaggaatttgcgatactgatttatcgctcgaagagcctcgtttacaagcttggttagataaacagtatcatggtgaaatggcatggatggctaaatatggcatgactcgagcaagaccccatgaattggtgccgggcacattgcgtgtgatcagcgtcagaatgaactatttgccaacagatgccgcttttgctcgtacccttaataatccagagcaaggctatattagccgttatgcattaggtagagattatcacaaagtattaagacaacgccttaaaaaattaggtgaaaaaattacgcaatattgccaacagtttgaatatcaaggtattgttaattttcgcccttttgttgattcagcgccgataatggaacgaccattggccgtgaaagctggtcttgggtgggttggtaaacactcacttgttatcaataatcaggctggctcttggttttttctcggtgaattattaattaatttacctttgcctattgattctcccgttgaagagcaatgcggtaaatgtgtagcttgcatgaccacttgcccaacaggcgccatcgtagagccttacaccattgatgctcgtcgctgtatttcttacctaacgattgaacttgaaggcgctattcctgaagaatttcgccctttgatgggcaatcgtatctatggttgtgatgattgccaattaatttgcccatggaatcgtttttcttcgctcacagaggaagatgatttttctccgcgccgtgccttacatacaccagaattgctggatctattccaatggagtgaagaaaaatttctgcgtattacagaaggttcaccgatccgacgaattggctatttacgttggctaagaaatattagtgttgcgttaggcaatgccccttatcaggacaaaattgtactggccttgcaagagcgctttggtttaggggaggttttagatgaacatttgcactgggctatcgcccaacagaaagccaaaagagaagaaaaaacactaaaaatacagacttcgcaacaaaaacgtctagtaagggcaataacaaagggcctacctcgtgatgcttag

SEQ ID NO: 316931 - DNA, 270 bp, Proteus mirabilis; identical to SEQ ID NO: 315755

SEQ ID NO: 316932 - DNA, 327 bp, Proteus mirabilis
atggcgtcctataaagtggtaatgacgaaagatgccgaaacagacttagaggacatcaataactatattgccgaccacgacagcatagataatgtagattatgtattagatgagctgcttaaggtcactaatacactggctaactttcctatgaaaggctgtattccaaaggaattacaaagtttaggtattcgtgaatatcggcaaatcttttttaaaccttatcgtgtcatttatcacacaatagcaaaacaagtggttatctttattattgcggatggcagacgagacatgcaagccctgcttactcggcgacttttagggtaa

SEQ ID NO: 316933 - DNA, 231 bp, Proteus mirabilis
atgcttaattggaatgaatatcgaaaacaattaatggggcgtattggtgagttaggaaaattaacacctgatacggttactggctaccaagcactttccaatgcaggtaaaaaaactaatcatttagatgcaaaaacaagagaattaatcgcattagcagttgcagtcacaacacgctgtgatggggtttattctgctcgagtattggatgctattgcacctgaaaattaa

SEQ ID NO: 316934 - DNA, 258 bp, Proteus mirabilis
gtgcctgaaacatgggctgagtttgatattaataaattcttttttgtttccaataataaggtagagcgttatcgagctcctcctaatttaatttatgctgcatttcaagatgaattagataaagttgaagaaatatatgcaccaattaggagtagacgtatcataataaattatctcacaaatagaaatttaatgatgggagaaaaagcatttcgagagtgccatttaactttatttaaaggaatttatgcttgctga

SEQ ID NO: 316935 - DNA, 192 bp, Proteus mirabilis
atgccattaagtaacacactatttgaattaattactcaagctaaacgtcgtcctaatattcaagcgtttagaaacctgcctgcgcctgcgcagaataaaaaacgtaaaggtgcgacgaaaaaaagtgcacaagggaaaagtcgttcagcgcagtctcaatctacgaatcgcaatataaagagtgatgcttag

SEQ ID NO: 316936 - DNA, 267 bp, Proteus mirabilis
atgaattataaagaatttgcaaaacaaattctcgctattgttggtggcgaggataatataaagtcattagtacactgctccactcgattacgttttacattacataatgaagataaaattgatccttcaaaagccaaagcaaatagtaaaatattatctgatgtgatgaagggaggacaatatcaactggttatcggtaatgatgttgataaagtatttaatgacctcatgataataataaagaccagaagaaacagtctatcgtaa

SEQ ID NO: 316937 - DNA, 417 bp, Proteus mirabilis
atgggagggtttgtaactttatttaattatattggttatcgcctattagatgcaccttattcattaactcaaacaaccgttggtttaatttcaattgtttatttgagtggaacttatagtgcatcgaaagcaggcttattaaccaataaatatggattaggtaaagtgtttattgccggtgtttctatgatgctagcgggtatattaattacactatttgactctctagcaattatttttataggtatgcttattctaactacaggtttttttgctgcccatgcggtagcaagtagttgggttggacgtcgagctaaacgaggacgtgcgcaggcctcttctctttatctatttacctattatgcaggctcgagtctgtctcttatacacatctccgagcccacgagaccgtactag

SEQ ID NO: 316938 - DNA, 177 bp, Proteus mirabilis; identical to SEQ ID NO: 300067

SEQ ID NO: 316939 - DNA, 492 bp, Proteus mirabilis
atggggaatgatgtaaaagcgcaaggtagtcttgatgttatcattcgtgaagtagccaataaattaggcttccagcttcgccaaaaagacttgtgcttcgagaaagtaaatgcctcacaagatgaaattattgttgaagtggatgctccaagagttaagcgtaagcttaacatcaatgggaaaattatttgctttcgtagttatagccgtaagtctgctactaaaaatactgcatttaaattagccaagacacctcctactcaaggggttgctcgttatgtagcagagctagctcactattataaaatatcttattgctacaatatgatggatcagtgggctgatgctgtaactcgcctagccggtgatgaggtggtacatgatactgttgaggacctccttgtagctctaaaacgagcagggaaaatcaccaagcaagaagttgcgatgctgtcagtcaattacctgcgggagcaaaaacaaagtgtttga

SEQ ID NO: 316940 - DNA, 243 bp, Proteus mirabilis
  misc_feature (180)..(189): n is a, c, g, or t
atggcattaataaatgcaggttttgtttattctcgccataatcagcaagtaaagtcattaagtggtggtgaacgagctcgtttactttttattggtctcagtttggcaaaatattcattattaatgctagatgaaccaacaaaccatcttgatatggaaggtaaacaggcattagctgannnnnnnnnnaaattcaacgattttcagggggaattttactcgtcagccatgatagagaattga

SEQ ID NO: 316941 - DNA, 429 bp, Proteus mirabilis
atgtcaaaagcaaagaaatcaaaccttattcaaattctacggtgttttgaacaagatgaggtgcaagttaatcgtgaattggctaatttaacatttagaccggctattgcagtattttttatatttctgctagttttatctattaagtttgagataagtttgtttttgtcttttcctttgtcaattctggctggatacattatttatagagtatacggagtaagagttgcaaataataaaactgaatatttagaccaactacttactaattacacgccaaaggatcaagaggcttatgaattattaaaagaagcagtcaggaaaaatccagaagaattttacaccctcctaggtgagtttatacagcatgaaaagaatctgcttataaaagttaaagataagaatgtggattttaaatttacaaagtaa

SEQ ID NO: 316942 - DNA, 939 bp, Proteus mirabilis
atgtcaaaacaacatgacactgttgactataccatacgtggtaactctatggcagtagacaaagtagttactcagctcgctgccgcatccggtataccaaaatctacttttcttcgaaataaattagaagaaatatttcaaaatcggtatgaccagtatgcagcatcaagttcgctggttgctgcttatgatgaaattttggcaagagatcttggtacgaccataaaacaggttcccgtagataacgctatggctacacctgataaagtagctctttgtgaaatactgaacatcaaggaggatcgtcagctagagaatattctgattgataacggaaagtacatattgcaaagagcacgtcaaacaatgcttggcaatggaaacgtccccgttcttacggctaattctctttggtttgcattattctgtgaactagctggctctgagatatctcaaattaatttagcagaaactaaaatttttaacccatataatactaaccacggttattacaaatattttgaaaatataaacgctattcgtgtgaataaaggaatgaaaccggtgccccttcgagaagctaacaaggaaacgagccattgccatgtacgtatctataaacctgaaaattatcaatttggggcatggcacgtagagattactctaagtaaaaaatccggaccaatcatggaaggtattggaataaattatccagatatcaagcatagaatatttatagcagataaggcttctggttattcaactgcggttctatatgatgataaagattgggagaatggttttttaattaaaaatggaggttctcattttgatttatattcaaatggaattccagaggaagaaaatccaacaccaattattgaagtagctgaagtattggctgaccatatcaataatattattttgaagaatttataa

SEQ ID NO: 316943 - DNA, 351 bp, Proteus mirabilis
atgaatacctatcactatttagctattgggtgtgttgtttttaatattgctttatttttttactatctttataaaatctctaaagataatgggagttatattaatcgtcggttattattaattccacttgtgcttgcagctatattatattcacaagctgtttattatgaagaaaaggttttgctaggggaatattatgtgaagcaatgtaaattaatagaatcaaatatatccaatgggtttttaaagtccaacactaataaaatagaatgtaatggggtctttgataatgtatcaacatctaaatataataatgcaattgatgcgtataatgaaagattaaataaataa

SEQ ID NO: 316944 - DNA, 759 bp, Proteus mirabilis
atgcaagtcccttttttgattgcaatttttgttgctatcatgaaaagatcttttttattggtacgtataatgaaggtctttgaaaccggttttggagaaaatatgagtcaggagaaagaagttgtcgattcaacgactacacaaaaaacaagacggaaaaaagtaacttctgtaccgtcgtctgaatacaaaatgcacttggacactactattgcaattgatgcatatcatcaacggttctatgtagcaagccaagctgcctatttgatggaacagcgccttgaacgctgtttgatgcatcgagataaattactacgtgatcgtgctgctgctatcataaaaacactcaatcaggctgttgacagtaatttaactgatttagaaaattacaaactcacattggtgcaagtcatatctgaagttgggaatgaacgtggtgataaatatgagttattaacctattctacccctcgcgatatgactattgaaaatcgtacttattttgcaactagaatgtgtgtagggttagagactctcgatcttgtagttaagtatcttgatgtttgccgacattattctttagtgccattgcctgagattcttgaaacgcaaagcaccgctgataaacgtatgcgaggcatctttagcacaatcattcgtcatggtgaaacaatgaagcggttggagattgagtatgccaagaagaaggcagtccgtgatgataaacctgtgtcagatagcgcaactgaaaatgattaa

SEQ ID NO: 316945 - DNA, 729 bp, Proteus mirabilis
atgacggacactggagggtccagcgacattatctttggcctgttctggctgctgggctaccagttttcgccccgcctggcagatgccggtgaggcggtattttggcgtgcagataaaaatgcgaactacggggtactggatgagctggcgcggggatgcgttgaactgtcaaagatagaaacccaatgggatgaaatgatgagggtttccggttctctgaagctgggtacagtccacgcctcagaacttgtgggctcgcttttaaaaagttcccgtccgtcagggctggcgcaggcgattatggaggtgggacgggtcaacaagacgctgtacctcctcaactacattgatgatgaagaatatcgtcgcaggatactgactcagcttaaccggggagaaggccgtcacgccgtggcaagggcgatctgttacggccaacgtggtgagattagaaaacgttaccgtgaggggcaggaggatcaactgggtgcgctggggcttgtcactaacgcagttgtattgtggaacacgctttatatgcaggaagcgctatcacatttgcgcagcgctggtgagatcccggaagacgagcatatctcacgcctgtcgccactgatgtacggtcatatcaacatgctgggacattatacgttcacgctgccggaaaatattctgaagggagagttgaggccattaaatttcaattcaaacaatgaattattgccttaa

SEQ ID NO: 316946 - DNA, 474 bp, Proteus mirabilis; identical to SEQ ID NO: 290939

SEQ ID NO: 316947 - DNA, 441 bp, Proteus mirabilis; identical to SEQ ID NO: 7434

SEQ ID NO: 316948 - DNA, 174 bp, Proteus mirabilis; identical to SEQ ID NO: 292964

SEQ ID NO: 316949 - DNA, 777 bp, Proteus mirabilis; identical to SEQ ID NO: 292965

SEQ ID NO: 316950 - DNA, 315 bp, Proteus mirabilis; identical to SEQ ID NO: 292966

SEQ ID NO: 316951 - DNA, 570 bp, Proteus mirabilis; identical to SEQ ID NO: 292967

SEQ ID NO: 316952 - DNA, 165 bp, Proteus mirabilis; identical to SEQ ID NO: 292968

SEQ ID NO: 316953 - DNA, 711 bp, Proteus mirabilis
atgagtggcaaagggatacacatcgaaagtttaagcaagcggtatggcgatggtgacaccgctgtctttgccttgagagacgtgaatatgcatgttgcgcctggtgaagtggtgggactgatcggcccttccgggtccggcaagagcacgctgctcaagtgtctgggtgcggtgatcgaaccgaccgccggtcgcatgacgctgggcgatgaagtgatctacgccgatggctggaaagtccgcgacctgcgcgccttacggcgtgacaagatcggtttcgttttccaggcaccgtacctgattccgtttctcgatgtcaccgacaacgtggcgctgctgccgatgcttgcaggcgtcgcgaatggagagtcgcgcgcgaaggcactggaattgctcacagcgcttgatgtgcaacaccgagctcgcgcaatgccctcgcaactctccggtggcgagcagcaacgggtcgccatcgcgcgcggactggtcaatcgtccgccggtgatcctggccgatgaacctactgcgccgctggattccgagcgcgccatggctgtaatccgcatcctcaacgacatggcccggaagttagagaccgccatcatcgtcgtcacccatgacgaaaagatcatccccacattcaagcgcatctaccacatccgcgacggcgtgacccatgaggaagctggcgaagggcgggagttcgaatga

SEQ ID NO: 316954 - DNA, 1206 bp, Proteus mirabilis
atgatcagcctggccggccgcgacattctccatgcctgggggaaattcgtcttcaccggcatcggtctgggtctgctgatcggcgtcaccctagtcatggctggggtgtaccgaggcatggtggacgacggcaaggcgttgctcgacaacagtggcgctgacctttgggtggtgcaaaaggatactctgggtccttatgcggagtcgtccagcctcaacgatgacgtgtatcgcgccattctcgccatgccgggagtctcacaggcagcgaacgcgacctacctgaccatgcaggtacgcaagggcgagagtgatgtacgcaccatggtggtcggcatcgcgcccggtgcgttgggggctacacccggatggcctccttatctcgtcgctggacgccagatcacgcgcggtcactacgaggctgtggccgacatcgccaccggcttcaaactgggagatcgtcttgccattcgccgcaatcattacaccgtcgtggggctgacacggcgcatggtgtcgtccagcggcgacccgatggtattcattccgctcaaagatgcccaggaggcccagttcctcaaggacaacgatgccatctggcaaagccggcgtcgcaccgaagccaacccggtcttcaatcgacccggtgatccaggtttgctggatgccgtgattgcttcacagagcagcaacgcgttcgtcaataccgtgctggtcactctgaaacctggtcatgcgccggacgaggttgccgaatccatccagcgctggaagcgtttgacggtctacacccgggcacagatggaagacatcctcgtcggcaagctgatcgccacctcggccaagcagatcggcatgttccttgtgattctggccatcgttagcgcggccatcgttgccttcatcatctattcgctgacgatggacaaaatccgtgagatcgcggtgttgaagctcatcggcacacgcaaccgaaccatcgccgcgatgatcatgcagcaggcgctcgccctgggcgtgattggcttcgtggtcggcaagatcacagccaccttttcagcaccggcttttccaaaatatgtcctgctcacgccaatggattctgtcgccggtttttttgctgtgctcgtgatctgcgttctagctagcctcgtcgccattagcatggcactcaaggtcgatccggccgaagccattggaggttga

SEQ ID NO: 316955 - DNA, 1152 bp, Proteus mirabilis
atgaaaaagttacccttgcaaggccgcaccctggcactgcttgccgtcatcattcctttgctggtgctttttatttatgtcggtctgcgatcagggccgctcgccccggtcgctgtgacggtggcaagcgtggaatcacgggctatcacaccggcgctgttcggcatcggcacggtggaggcgcgctacacctacaagatcgggccgacgtttgccgggcgcgtcaaacgcctggaggtgcatgtaggcgaccaggtcaaggccggacaggtgctcggcgagatggagccggtcgaccttgatgatcgggtgcgctcacaggagtctgtattcaagcgggcggaagcggctttgcgtgaggcagaagcccggcaagcctacgcgcaaacccaggcgcgccgctatgagcaattgtttgcggtgcgctcgaccagcgaggaaatcgtcaccaccaagcggcaggaactgcagatcgccgatgccgccctatccgccgctcgggaagatattgcccgggcacgctccgaccacgaagcactcgtcgcgcagcggagcaatctgcgcctgatcgcgccggtcgacggtgtagtcgccgtgcgcgatgccaatcccggcacgaccatcgtcgcgggccaggccgtggtggaagtgatcgaccccaagagtttgtggatcaatgtgcgcttcgaccagatcagcgcatcggggctggctggggggctgccggctcatatcgtcctgcgttcgcgtggtggccagaccttgaaaggtcgcgtgctgcgggtggaacccaaggccgacgcggtaaccgaggaaacgcttgccaaggtgacattcgataacaaaccagaacctttgccaccagtgggtgaactggccgaagtcacggttgacttgccggcgctcccggccgctccactgatccccaacgctgccgtccagcgtgaaggcgataaagttggtgtctggcaaatcgtggatggtgatctgcatttctccccggtcaagctcggcacttccgacctcaatggttacgtgcaggtgcgcgaagggctcaagaatggggaccaggttgtgacctatagcgaaaaggcactgacggcgcgcagccgcatccatgtggtcgagcatatcccgggagtttcacgatga

SEQ ID NO: 316956 - DNA, 609 bp, Proteus mirabilis
gtggacacccatccaaagcatctgccggccgatgaacgtcgtgccgtaactgtcgagtccgtcgtggcgcttgccggttcacaaaacccaagcgagataaccactgcggctatcgctaaacacatgaacttgacccagggtgcgctgtttcggcacttcccgaacaaggaagccatttggcaggcggtcatggagtgggtagcagagcgtctattagccagaatcgatcgatccgcacaaggaatcgagtcgcccttggcagccatggaggcgatgttcatgagtcacatcgaattcgtagctgagcacccaggcgtgccaagaatgatgtttggtgagcttcagcgtgccgaatcgacaccggccaagcgcatggtgcaaaccttgattcagcgctacggcgaacgtttgcatcgtctcatcgagaaaggcaaggccagcggcgagttgtctccctcgcttgacaacgaggcggcggcaacgctgttcattggcacgatccagggcttggtcatgcaatcgctgttggcgggtgatgtgggacgtatgcaccgcgatgcgccgcgcgtctttgcaatttatcggcgtggcataaggagtgcgcaatga

SEQ ID NO: 316957 - DNA, 228 bp, Proteus mirabilis; identical to SEQ ID NO: 292969

SEQ ID NO: 316958 - DNA, 594 bp, Proteus mirabilis; identical to SEQ ID NO: 292970

SEQ ID NO: 316959 - DNA, 393 bp, Proteus mirabilis
atgaaacttacaatatccttacctttcattctgatagcttcactgatcgcagtgccagcattgggtaatggttattctgcaatggaaggaattgaaggacagcgatattctgatttagagaaatacaaagccaactgtccagcttgtatgagtgttgtacaaaacattaaagatatccgctatcaggtatgtgcgcagtcagtcacggcagatgatgtgatagttagggaccctttatatggctatctgaatagtttgaaattcatgttgaatgatgatgcttataaacaggtattgacaatcattggtcatgagaaggattgttctaatagtatgaattggcttgaaaaatccaatttaataatagaaccaatggtcaacagcagacactaa

SEQ ID NO: 316960 - DNA, 1071 bp, Proteus mirabilis
atgaacgataacacgacagctatcaatatagcccttgaaaaaatagttcttcttaataaagaatataaagactatttaggtagctgtgaacaagaagccattgacaacatcaaaaataaaaacatatttatgccgttttaccatgttatgcatttatgtgtaactaaattaatgaacgatgaaaattggcgtctgattcaaaaagatgtaaccgctaggttgtatctttcagtaacagaatttatagaaaaaaatgggttagataattatggcaatatagactggataaaactatttaggaataactatgaccataggggtatcccgccatcatcagtacctactatactcccatggaaatatacaaagtctgtttatgaaatggacagagatcttgctagtgaattaatgaattcaccattgccagaatacataccgactgagtattttaaacgaataccagaatggtctgtgtttttaactggatttaaatatatagttaaagcaagtggtgatttatgtggttgcactataattggattttgggtcagcttaactgatcttgatggaattgatgcagttgcattcacatttttattttcaaacaagaacacctccagcttcaatatttctttaaaccacaataatattattgactcatttaatgatgctgcaaaactcacagaccatcgaattaaaagcgagctaagagatatatatgttgagttgtttaagttggctatacctataacaacctattttattaaagattttgtagatataccgaacagcacaaatccaacagtctctgataaaaacatcaaaaaaaccaaagggaaagagcggttatttgaggctaaaaaaataaaaagaaccattatcggtgccaatgtaggtgatagtattcgagcattcaatgaaaacctgagaagtacccatgtactagggactatgcgcccacacattaggcgagctcactggcatgggtattgggtaggtactggtgaaggaaagaatttcctcctgaaatggttaccagctacattcataaacccagaaaatagcatgtaa

SEQ ID NO: 316961 - DNA, 267 bp, Proteus mirabilis
atgaatcttactattttgataaatgctgttaatgaagccgattctttatctgctttagcttccgctttaaatgaactggaaacttttattcgacaatcagaaaacgagaatttaaacagcattgatgatgtcttaaaaagctcagagctaaagttatttggcggtaatgaccctgaaattttgggtgcttatagttgggatgatactggtattttgttttatgagaatggtgaatggtgtatcactcctcgttctgacttcaactga

SEQ ID NO: 316962 - DNA, 459 bp, Proteus mirabilis
atgattaaaaaaatctttcggttgataattggggacagatttatccaattgaaaaatatagataaaaatgattttaatcgaatttcagattttgagtcagtagagtggcgagtcagagttatccaaaatggggggatttataaaagggattggctgaaacgccttgataatgaaaggaaaggaataaaaacaaaaccgaaaattaaacctgaaaagattaaaatatcaaggaaagattacgagataatatctaaaatcacagatacaggatttgtgtttttaaatcttcaggcaacggaaaaaataggtagactatctgatgttgataggattctgttagaccatctttcaaatgaaattaaaatggagttattaaattcaaaattaagtcttactaacctcgatgaaattgaatatctacatttggctgtttttttagataatgtggtaattcaataa

SEQ ID NO: 316963 - DNA, 1530 bp, Proteus mirabilis; identical to SEQ ID NO: 286717

SEQ ID NO: 316964 - DNA, 1851 bp, Proteus mirabilis
atgccaaaacataataccagaaagagaaaatatctacttccaggtaaaaacttaataaaaggcaaggccgaagttaaaaccttacatttagccgatatggttatatgtgtaaacggcagtattcttcgttttgaaaggtttgcttttaaatcctgtccagtattgtttcgaggtttcagaaaggttgaaactagtcagttcactgacatgaaacgaagcagttttgtgcgtcaaatatactctttgctaagtgagaacgtcacctctaccacagcctctagatatgaaacgctaataaaatacgttaggtgggtggatgatagtaacgacactgaattaatcgataaagccatgtttcactgggaactaattgatggattcatgacatggtgtgggaggcaaaacagtaagggattactttctcgacctgtctgggggaggcacagaacaaatatttcatggcttttaaagcaattaaataggacgcaggataccaaaagacttcctaaaatatcaaatgtttcaggacacacgacaccccacaaaagtcttgatattgagagagaattaaaaccgatcacaaaaaggttgtttaactcgtactttaagcttttagaacactataatgctggcacaatgcctgaaaaacatccgctttatgataaagaattgctagaactaatagcccaaaaaaaagggataaaaggcagtgacagagttgcccattttgctgcgttttcaagagcagtacaacccagctcagggcataaaaacaaccccatcacaaaaatagcaatgatgctgtgctatttgtttacgggaatgaatacaacgcctttagctaagatgaaaatttcagacgttaatttcaaagaggtgcagggtggaaagtacattctggattccgtgaaaggtagagctcaacaccaagagcaagataacgcacttggtttcagtaaacacgcaaaggacttcattgaaagctggttaaatgtagctaaaagcatggcaaatggtgatagcaacagccctctcttcccctactatagtaaagatggtcagataaagctttactctgaaataggtagttccccccatgcaagcatcaacaaactattgaccagactggacttccctaaaataaccccttcaatactcagaaaaaccaaaatggacactctgtttcaagcaacagagtctgtttatcttgttgcaatgtcggcaaacaacagcattaaagttgtttcatcacagtatttacatgggacatctggagagcacgaaaaaaaattaaatgcggcaatggatgctaaattttccaacgctaaaggcgttgatatcaacaccgcagttgaagaggctaaatacaaacattcaaacattcttgatcattatgagtatgaagcactgagagagggctctaacaggtctcatgaagcaagaacccctacagggatacgttgtaatgataataaacaaggtgctgtaaaaaccataaataaaatgctagagcgtatcggagttgaaatgaattctgatgaagaagcttgcaccagctttcttgattgctttgagtgtgagcaccattcattggtctctgatgtaacagatatatggctaatgatgtcattcaaggaaacattacaagagcttgaagtaacacctgcaattaactcaatgccacctaagaaaatgaatacactattaaacaccattgaaactattctaggaggatttagagataaatctccagaaaattataagcaagcctatgagctacaaaaacaaacatcacaccccttgtattcgaatatctacagtctaaatgatctgcatgaggtgttttcatga

SEQ ID NO: 316965 - DNA, 1419 bp, Proteus mirabilis
atgatctcagtattaaaacataatttagcttcagtaccagattatgacgaaaacataccagtaagtagttacagtgatggcagtgttgaaagctacatttttgataaaaagtggaagtttagcggcgctattcaagtaggcgttggtggtctaacagatatctctttttcacggattgacatgaaataccgaaagtacattcagtccacactcgcatacatcatggatgaatataaacaaaagaacaaaacgcatccaactatcggacaacttcaacactggaagaatgggctgaaatatattgttcaaagccttggcgagtgtaactggaaccttctatcagacgacagaatattcaagcaattcaagaaatctttcagtgagctagcaattaaaaggagcctttctcaaacactaatcaacaatgtagtaaccacttttggtctgctaaatagcctgaacctgtgccataggattgtaacgataaaaagcttaaacatacaaagtataaagccaaccaagcaatacattgcaattccaacgaatatctaccaacaaatacttaatgatgctatctcaacagtagagtcactgcacccccatcgtcatgaaatatcggctcttatgaaccgaattcagactatatacgacgaagaaaaaaatcgaaaagacagatcgtcttctctaggccagataaacgacaggactcgtaatagaattcggaagataggtcataacattcctgattttaagcttactcgtgacggcacaaacatttctaatattctgactccctgtgcgatagttttactggcatttagcggtgtaagagttggagagttaaatagctttactaaagatagttacgaagaaagggaaggagaacacggcgataacatatgctttttgaaaggtgaaactactaaaacagtcaatggtattcctaaaaaagaagtatggcaaacacaccgcatatctaaagatgcacttgagttagcctatgactgcacagcatatcttcgcacaacctacatagatgatgtgaacaagcaatacactgaacaaaagatcaatttagatgagtacaaaaaaaccttacgggtgctagagtctgtatttctgccagtaacactaggaggctctaaaaagaccaactacagctcaacggctgcacgctcaaaaaacctcaagtcttatttggaacaactaaatattaaagcaacaaaagaagatgttgattcattcaatacccttaacccttcatggcacggagaactcaaagaaggtcaattcttacctaagatcagtgctcatgactttagacgaacattcgcagtattctttaagcgttatggatttggaacaacgtcaacaatcaagtttcaatataaacacagaaatataaacatgtccgaatag

SEQ ID NO: 316966 - DNA, 198 bp, Proteus mirabilis; identical to SEQ ID NO: 25167

SEQ ID NO: 316967 - DNA, 435 bp, Proteus mirabilis
atgaccttattagaaacgacagttaaagaatgtctaaacaatgtagtgaagcaatatgcgtcacaaacggccttaattgaaaaccaaagtaaaaaaacactgtcttggcaacaattacaacaagaagtcgagagtgttgcgcgtggctttttatccatggggttaacaaaaggcgatcgtttaggtatctggtctgctaatagtaaagaatggataatttgttttcttgcagctgctcaaattggtattccggttgtttgtattaactttcatttaaaaaaaagagagttattagatttatgccgattaactggaattaaagcactctgtttttctgatggttttaaaagtaatcattttattgaggttattaattatctttctaaaaaagcatcaaaaaataaagacgcattaccctcaattaaaagaaattag

SEQ ID NO: 316968 - DNA, 426 bp, Proteus mirabilis
atgtacttggttgtttatggtttaagaaatgcagggttaaccgattatctttctgaaacgctcaattaccttgcagacaaagggttatgggtagcaacaattggtacgggatttataactgcatttttatcctcaataatgaataacatgccaacggtgttaattggtgcgctatccatagaaggaagtgaagcatcagggttaattcaacaagcgatggtgtatgccaatgtgattggcgccgatttaggtccaaaaatcacaccaataggtagcttggcgacattgttgtggctgcatgttttatcgcaaaaaaacatgaccattacatggggatattatttcaaaacagggattatcatgactatccctgtgctcattgtcacactcgttgctttagtacttcgactttcactgttaaattaa

SEQ ID NO: 316969 - DNA, 441 bp, Proteus mirabilis
atgaatgagatcactatctaccataaccccaattgtggcacttcgcgtaatacccttgcaatgatccgcaatagtggtgttgagccaacgattatttattacctagaaacacctccgactaaggatgtgttagtgcaacttattgcagatatgaaaatcacagcgagggagctattacgaaaaaatgttgagccgtatgagcaattaaatttagaaaataacctttattccgatgagcaattgattgattttatgttgcagtacccgatactgattaatagaccgattgtcgtcactccgctaggcgtaaagttgtgtaggccttcagaggtagtgttagatatattacctaatcagcaacaaagtgaatttatcaaggaagatggtcaaatagtgattggtagtacacgatgtaaaaatgcaaatgaagaggccagttaa

SEQ ID NO: 316970 - DNA, 210 bp, Proteus mirabilis
atgactactcaagctattcccttactagatgaccaattcgttgatatgaaatttataactcgcctaaccggtttgacggataaatggttttacaaattaatccaagagggtgattttcccaaccccatcaaactggggcgtagctctcgctggttaaagagtgaagttgaaaattggttacaagcacgtattgccgaatccagagcataa

SEQ ID NO: 316971 - DNA, 588 bp, Proteus mirabilis
atgtctagttacacctacaatgagcattacattcaaaagataaaccaaactatccgtaaagcacttttaattcacaatcgtgttactgctattcgggttgacttgcgtttcccatctgaaaatatatttcactttaacgattcgagggtcatcactcgattctttgaatcgttaaaagccaaaataaatgctgacctaaaacgtaagaataaaatatgggagcgtaaccacatatgcccgttatcttatgtctgggtcagagagttcggtgagataaacaacaaaaaacactatcatgttcttttgctgttaaataaagatgtttattgggggttgggtgattttgttaaaactgaagggacgctctatgcattaatacagcaagcatggtgtagtgctattggtgtgaactaccctgcggagcgttatttaattcatattccagataacgccataacgtggctagataataataaacccaagaatgaaagcacgatattcgaattaaaccagcgctgtcgttacttagccaaagaacatacaaaatattatggtgatggtgagcgttcttttgggtgcagccgttaa

SEQ ID NO: 316972 - DNA, 939 bp, Proteus mirabilis
atgataaatataaatgtcaatgataattatttggagtgcagacaatattatgctgttctgttctatatgttttcagaaaaaacactgtcgcctaatgaactttataaaatgatatccgaagcaaagaataagaatgtgtgtacattacttagtgagttaaatcagcatgtcgggagtagatttaaaaatgttgattattatctcagaacgatagagaaaaagattatcccaatagaacaattatcttttttaacggatgaaagaatatcatttgttatcttaaactttcttatgaagtcgtataataaacaccttatagaaaatgattacccatcaattatgactggcgtgtataattactctcccttgaacttgaaccctatcatgggcaggaatatcccttttcattatattgtttgttttttagactttttagttttgtttataaaccctaaagattttaatgagacagtcttttacatgaaagataaagcttcgtctgtttctaaagaataccccgatccttttttatttttacccagaaagaatgaagcattaaaatggatagccgagaggatgatccgcgcaaatattgctgttgatgatgatgttaatgttcttattcaaaatgaaaaatggaaattgattatttcctgttttgattattgggctattatttcaagcgtagaagcggtcaagctttttctatctcaaacaagaaaagcttggagccaaaaaaaatatcgtgacggtgttaaagataaggctgtactgaatacgtatatttccaaatcatcaatggtaaaattaaaaaaaatagccaaaaatcataataaaaatattaacgaaattatcgaggcgatgattgatcaaattgatctaccacgggattccattgaagaactcatactgttagttaaaaagaaaaatttaaaataa

SEQ ID NO: 316973 - DNA, 873 bp, Proteus mirabilis
atgaatcaacatattgaactggagaaggctctcgcagcctttcccttttcatttaaaacaacattttttaaccaactcagtcagcttatcaattactctcccaccatcggtttgatgggtaaaacgggagcgggaaaatccagtcttatcaacgcactattccaatcgtcattatcacctgtgagtgatgtttcaggctgcacacgccaagcccaacgcttcagcatggcgatgaacaaccatactctcacttttgtagatttacccggcgtgggggaaagtatcgaacgggataaagagtaccaccgcctctaccgtaatttgttaccagaactggatttaatcatttgggtactcaaggccgatgaccgagcatggtcttccgatgagcaatgctatcgctttcttaccgagcaatgtggctaccaacctaagcgatttctatttgtcttgaaccaagccgataaaatagagccctgccgccagtgggatgaacataaccaccagccatcctcagagcaaactgctaacttggaattgaaacaacaagccgtagtaacagcttttaagccgtaccaccctgtgatggttgtatctgcaatcggaaactatcaactgactgaattagcagagcagctcatacaggcgttaccggtgcaagccagtagcggggtagctaggcaactgaacagctcttaccggacccaatcggtggaaaacgccgcacgtaacgattttagtcaatgtgtcagtgatattgtggatgccttaatcgatatcattcctttgccgccattgataagaagtacggttagcagcgttaaaaacagtatcgtatccgtcgctaaatccttgtggagcctgttcttttag

SEQ ID NO: 316974 - DNA, 426 bp, Proteus mirabilis
atgaataacacaactgaatccactattgcaatgacactcgtccccgatgagcaacgccttgatttttggctcaatcacttcggaagcgtgaaaggctggaccacctttgaagtggtgatttttactaccatgggccagttttgtgaggattactacggcgggtattgggaatattgcactttatccaatggtagcgcctttatttatcccgatttaaatcaagaggagcttacgctattcaacccacataacggcaatgaagccatcgtgagcccagaagcggcagggattgtagtgtgtctgatcctgtacagcatttggtcattccaaacagaaagcgaagtgatgtgcgaccgcttttatcagttgcgtgactacgcgttacaacattctgaatctgctgtcattttccacttaattgattaa

SEQ ID NO: 316975 - DNA, 708 bp, Proteus mirabilis
atgtttcagaccaaccgaaaatatgaccgcatggctgtgcgactctctgcgttgattgcccgcttaatggcaggagaaagccttgtgctttcgcatttagtccaagaattcaatgtttctgagcgcacgttacaacgggatttacgtgaacgcttggcttatctgggtgtagaaggtcggcaaggttgttatcgcttgcccatcaatacgctaaaagcttaccgagacaaagatgttcttacctttgtgaaacagattggaatgactcggttgtttccggggctagacagccgcttactcgggttactgttaacccagcagcctcatgcaccttgtttgatttggcatcacgcccataagatttcggctttgcatgctgaccatttctatcaattggtgtatgccattaccagtaagcaatctattagcttacttacacctgagcgtcgatttaatccactacaaccttatcaactgatttaccgtgaaggccagtggtatttattggctgaatatcatcagcaagtgcatgttttactgttagaggatatccagcaagttcaaccacttaatacccccttcacaccgaaacacgtagtgatgcaactgtcacaacaaaacaattttatcgcggccttaccgcattttcgattgatatcacaagtagttacctctcttccatcacacaaagaaaggagccgaccatga

SEQ ID NO: 316976 - DNA, 150 bp, Proteus mirabilis
atgaaaaaagcccgttttattgaaactcaaatcattaatattttaaaactcgctgattctggtatgaaagagaaagatatttgtcgccagaatgggatcagtaatgccacttattatatctatggactacctccgttttgcaagtactga

SEQ ID NO: 316977 - DNA, 177 bp, Proteus mirabilis
atgaatcgtgttgttatgcaggaggcgtcagaatcatttcaggttgaacacgcggaacaacgcattgccagtgctctggccgcacttaacgaggcaaaaggcgcacacacggccagcatgggaaaactcagcgacattgaagcttccattcagcgttgtgagtaccgttctcagtga

SEQ ID NO: 316978 - DNA, 513 bp, Proteus mirabilis
gtggtcatttcgctacattcgccctctcaagctaaaaaaagccttggttcttaccctgccatcaatcttgctgatgcacgtagttaccgccttgaagcaagaacactgctcgctaaacatatagacccacaagatcaccataaagagcaagtcagtatcggcttagaagctaaggcaaatacctttcaacttgtcgctgaactttggtgggaaatgaagaagcccactgtaacagaagactacggtaatgatatttggcgttcacttgagcgagatgtgttccctaccattggtgacatcagcgttactgatatcaaagcccatatattggtccaagcaatacaaccggttcaagtcagaggtgcattagaaaccattcgtcgcctctgtcagcgcactaacgaagtgatgatctatgctcaaaatacgggtttaattgatgctattccaagtatcaatattggcaaagttttgaaaaaccaaagaaaaaaacatgccaagtattcgccctga

SEQ ID NO: 316979 - DNA, 603 bp, Proteus mirabilis
atgccaagtattcgccctgagcaattaccacaattgatgcaaacaatgcgtacagctaatattatcttacctaccagatgtttgtttatgtggcaactgcttaccatctcccgccctgccgaagccactgaagcccgttgggacgaaatcaactttgaaaccaaggaatggaagatactctcagccagaatgaagatgaaccgtgaacacactgtttcattatctgacgcagccttagctattttagaactaatgaaaccactcagtggtaatcgtgagtttatcttccctagccgcattaaacctacccaaccaatgaacagccaaaccgtcaatgctgcattaaaacgcgctggattcggtggtgtacttgtttcacacggtcttcgctcaattgctagcatcgctctcaatgaacaaggtttcccacctgatgttatcgaagccgccctagcccacgttgataaaaatgaagttagacgcgcctataatcgtagtgactacctagagcaaagacgccccatgatgcaatggtgggctgattttattgaagaagcagatagaggaagtattattgatgcgggtttagagggatatcgctag

SEQ ID NO: 316980 - DNA, 216 bp, Proteus mirabilis
atgttacctcttcttttatttataactcaacttaacgaatcaattactttatttaatatgctctgcgccgggtgcttggatcaatctggttcaagcattgtgccaataccagaaagagaaaagccccggaaaatatacagtatattaaccgaggcggactcaaaaacagacagtttgattctgcctacattcttatcggagcgcaagaggaaatga

SEQ ID NO: 316981 - DNA, 762 bp, Proteus mirabilis
atgtttacggtcattatcccaggtcgatatgcgtcgactcggttacccggtaagccacttgctgatattcatggcaaaccgatgattgttcgtgttatggaacaagcaaagcgttcaggtgctaaacgtgtcattgttgcaactgataacttagatgtggttcgtgctgttgaacaagcgggtggagaagcgtgtatgacccgtgaagaccaccactcaggtacagagcgtttagctgaggttatcgaaaaatatcaattcgcagatgatgagataatcgttaatgtacaaggcgatgaaccacttattccacccgcaattattacgcaagtggcggaaaatttagctaattgtggtgcaggtatggcaactcttgctgtgcctatcgtcgactcaaaagaagcctttaatcctaacgctgtaaaagtggttatggatgcgaaaggttttgcactgtacttttctcgagccactattccttgggaaagagatcgttttaatctctctcatgatgaaataggcgagcattacttacgtcatatcggtatttacgcttatcgtgcaggctttattcgtcgttatattacttgggagccaagcccattggagtctatcgaaatgttagagcagctacgtgtattgtggtatggcgagaaaatccatgtagcaaaagcgcttgaagtgccgggtgtcggagttgatactcaagatgatttaattgccgcgagagctgcttttcgggcactaaaccaagagttctaa

SEQ ID NO: 316982 - DNA, 1296 bp, Proteus mirabilis
  misc_feature (1233)..(1242): n is a, c, g, or t
atgagattatttattgcagaaaaacccagccttgctcgagctattgctgatgtattaccaaaaccgcataaacgtggtgatggttttattgtttgtggtgataaccagtatgtgacgtggtgtgttggtcatttacttgagcaggctgagccggatgcatatgatccgcgctatgcgcgttggtcgttagatgatttgcccattattccgaataaatggcaactcaaaccgcgcgctgatgtgaaaaaacagctagatacgatcaacacattactaaaacaagccgatgaagtgatccacgcaggagaccccgatcgcgaagggcaactgttggtagatgaagtacttaattaccttaatattagtgatgctcaaagaaaacaggcacgccgctgcctgattaacgatttaaaccccgccgcggtatctcgagcaattgataagctccgctacaatcatgaatttattccattatgtgtttctgccttagcaagagcgagggcggattggctatatggcattaacatgacacgcgcttacacgttattaggacagcgcaatggttaccaaggcgtactttctgttgggcgagtacaaaccccggtgctgggtttagtcgtacgccgtgatgaagaaattgaaaactttgtaccgaaagatttttttgaagtcaaagcgcatatcgttactcctgcagatgagagatttaccgctatttggcagccgagtgaacactgcgagccttggcaagatgaagaagggcgtttattacatcgcaaattagcagagcatgttgttgatagaatagctggcaagcctgctaatgttaccgattatcaagataaacaagagtctgaaatagcacctttgcctttttcattatctgctttacaaattgaagcggcgaaacgctttggtttaagcgctcaacaagtgttagacacatgtcaacgcttatatgaaacgcataaacttattacttatccacgctccgatagtcgctatctgcctgatgaacactttgctgggcgtcatgcggtgatgaatgccattagtgtgcatgataatagtcttttaccacaagaaacattagatattgataaaaagaaccgttgctgggatgacaagaaagtagatgcgcaccatgccattattcctactgcgaaaacaggtaatatttcattaagtgaaaatgaaaagaatatttactatttgattgcccgacaatatctnnnnnnnnnnacaatatctaatgcaatttatgccagatgcggtgtaccgcaaatgtgtgattga

SEQ ID NO: 316983 - DNA, 561 bp, Proteus mirabilis
atggctgaaataggaaagcattttgaatttgaaaaaagctatcagccaattaatctccgattttcctttgaaacatttgatttataccacttatacggcgatgaaaaaatttatctaagatctatgggaagtggtgcaaactggctatatagtcatgtcactctatttctagctctacataaatattttgctgaattaggaaataaatgttcaataccatcgatcttatttttagaccaaccaacacaggtatattttccaaattttagtcgtgatgatgctgaaacttttaaacaacaaactcaacaagaagcagaacagcgaacagcgaaagaaagaagcattgatgaagatatgaaagcagtagaaaatctcttcagtcaattatcaatttattgtgatgagcttaaaaaagaaaatggttttagccctcaaataatagtaactgatcatgctgatggtttaacattatcaggaaactctacatttgaagctttagtcaatggcaatagatggcgtaccagaggccttattaatccagtgataaaaaatgaacagtaa

SEQ ID NO: 316984 - DNA, 657 bp, Proteus mirabilis; identical to SEQ ID NO: 16007

SEQ ID NO: 316985 - DNA, 1185 bp, Proteus mirabilis; identical to SEQ ID NO: 16006

SEQ ID NO: 316986 - DNA, 435 bp, Proteus mirabilis; identical to SEQ ID NO: 25497

SEQ ID NO: 316987 - DNA, 177 bp, Proteus mirabilis
atgcaaaataattatgtgttacgcagtgtgcgttatatgttagatcttagcgatggtcatattgttgatataatgaaactggcggatttcacagcgactaaagagcaagtcaatcagtggttaaaaaaagacgatgagacattttttaaatgggcttatcttttatcgtcgtggtaa

SEQ ID NO: 316988 - DNA, 138 bp, Proteus mirabilis
atggttcaacgggatagccatctaaaaacagtaaatgctaaagattataataagttatttgatgttcataatagagattcaaaaactctcgaagcagcatttaaacaagctttctgttttatccatagacatggataa

SEQ ID NO: 316989 - DNA, 297 bp, Proteus mirabilis
atgagcaatccatttacagtatcacaacaccctgaacagctagagacttcctctttaatagatgaaagccatcactatgatgaccctttaccgccaaaagatctgatttttttacaaagtataaatgaacacacatgtaaaattaaatcagcacaagtaaatagtagattatcaaatatattcccaatgtttttagtaatattgatgttaatgttttatacattgtttattttttatgagaatcatagtgctaaaagatttacttttgaagaaaacgttcaaaatctattattataa

SEQ ID NO: 316990 - DNA, 303 bp, Proteus mirabilis
gtgtcaggggttgctattgtctctggcacaggtaccaaatggacagttaataatcctgctattcgctcaggtacgattattttaattaaaaatggtaatgctgattttatttacatggtggatagagttaatagcgatacagaattagtcatttcacagccagctacatttaccgtaaaaaacaccagttatagcattaatctcactgagctgaactcatacagcgatgctaataatcgtatgaccgctattgtcagatacgacgtattttctgcgagcaatggatcaatgaatgatgaataa

SEQ ID NO: 316991 - DNA, 1272 bp, Proteus mirabilis
atgaataacggtgtggtgacagtagagctatctaatgggcaaaaagtaacgttagatagtattaagaagatgcagggggatattgccaataagttggatattaaaacaggaggtaatgtcaccgctagagtatctgcaaatccaatatcagtgactagagatggtaatgactatttaaatatttatccacccaaagtaggggatggtaaggacttaggattttttcaatacaatttagataaggcgtggaatggaatattaaagattccaagagctccatcagggggaaccgaaacaatacttacagacggtataaattatggcacaggaagagttttgtcttttaaagcagattataaagataaagctagttatattgagtcgatatgggttgataactcttttcgatggagaattgggtcaatggatgccacgtctgattttcaaataaatacaggtggtggcgctaggtttcatctaactaaagatagtctcactgttaacggtaagaaggttcttgataatgtcacacctaacacagttaaaaagcaatctataaatagaaatgggttttatcaatgccaagatattgagccttataatgtaatgtttatggggattgcttgtactcacgtgagtaacgagcaatatgtattctccttatgggggagagggaatagatttttatttagtacgaaagatgcaggaaaatggtttggtacttgggaggtatggacaacagcaaatgcgagggctgatacaaatggctttatcaaaaaagcctcaccaattatcgacatcaatcccgacggtacattcaccactaacgacgaatcagaaggtgctacagttactcgagtagctcagggtgaatatcttatcgaaggcgttttaggctttaactcagatgcaggttgggggggtgttgatggtggtattgaaattccactcgatgttaataaacagccgttgatatgggtagactctaaagttatggaggacggttctatcctcgtgagaacgtatcatcgaactcaccctaacgcacctaaattcgcccgtaatgatattgatggttacaaagacggtgacccgattgatatccctgatggtcgtttcatttccgttcgtgtacagatgccagagcaatcaatctataacgtgagaatgcgtgagatggaagaggcacagaaagcggaagaggaactcagacaaaaagaagaggagatgaaagcacaattcgggttaggcgaaaatgacgaattgttttaa

SEQ ID NO: 316992 - DNA, 480 bp, Proteus mirabilis
gtgccccccggaagaaatcatgcagaccctggttcacgaaatggcccacctgtggcagcaccacttcggcaagccaggccgaagggggcaataggcaaagggtgggatataagtaaatatctaggtatgttggatgcgtggcattatgaagtagttcatgaggattttgttgagtggctgtcccagcaacaagatagtaaaaataactcaaagggttttaagaaagtattccatattagggagaaggatgaagatggggaggtgttggctcgcggaggggcaactgtagtgtttgtagaaactgatgtggggtttgctgcccatatcgctctctgccacccagaggacaactacaacaagaaagttggtgttgaggttgcattaagtaaaaattgttatttcaaaattcctgaagttagtgataagtttattcgtgacacgtccctaagttactggaagagagtagttaagtctgtttag

SEQ ID NO: 316993 - DNA, 549 bp, Proteus mirabilis
atgtgtgagagatctttggttgttggtgtagtggctgtagacgaggagtgggggattggtaaaggtaatactatgccttggtataacaaagctgatttcaggtggtttaaagcagccacagagggcaattctgtcatcatggggaagaacacttgggatagcttaccagtgaagcctcttcccaaaagaaacaactacgtccttacaagtggattagagcctctaggagcgcttaaagctactgacactataaaaggtatggatggggatattaaatgcgttataggaggtttaggagcttttaaacactatatggatgagatagacatattcctgattagtagaatcaacggaaaacatgattgtgatgtgttttttgataaagatttgctaaaagggtttaacttatttcacaggtttttcttaggggatggagaagatgaattcagtgtagacatctttattaaaggcagaggattaagtgatgtgggtgcggaatatataaactctctactactaagtacaaaagcgtttataagaatgaggtag

SEQ ID NO: 316994 - DNA, 225 bp, Proteus mirabilis; identical to SEQ ID NO: 13704

SEQ ID NO: 316995 - DNA, 456 bp, Proteus mirabilis; identical to SEQ ID NO: 39382

SEQ ID NO: 316996 - DNA, 456 bp, Proteus mirabilis; identical to SEQ ID NO: 39382

SEQ ID NO: 316997 - DNA, 219 bp, Proteus mirabilis; identical to SEQ ID NO: 311603

SEQ ID NO: 316998 - DNA, 597 bp, Proteus mirabilis
ttgacgttagcgcctattgggcaggagcctatttctactattggtatgcctgaaaatgatcagaaagcatttaggcaggcagcggatagtgaaaatgtgattattggcgttaggcctatagatgcgcgatcaacgacattaattcaatctagagaatacagcagtaaagggcttttaattaaagggaaaagttctgattgggggcctatggcagggtttattcctgttgatcaatctcttgctaagttatcagctagaaacaatgtggctaaatataatttagcgaatcaggaagccctcgataaagggcatgctatctcagtaccacttacactttcaccagagcgtgttagagaactacagcaatataatattttaaattattctgatctcttaacagatattattcaggtaacatgtcgtgttgataataaagaatattatttctatttatctaaagttaatcaagacgggaaagtcacctatacagttaattcttacgataatggaaaattaatccctgttaatgtactggctgatccaatatcgaaaaaacctatgattgcagattatgatctgtctcttatacacatctga

SEQ ID NO: 316999 - DNA, 138 bp, Proteus mirabilis
atgacttttaagttatatttatttgcgattgcttgtattgctgtgttatcacaaggagtcccatatacatggacgggaagaatagctgatgttttatctgttattgcttcttcaatttttttaggatcaagattataa

SEQ ID NO: 317000 - DNA, 225 bp, Proteus mirabilis; identical to SEQ ID NO: 13704

SEQ ID NO: 317001 - DNA, 306 bp, Proteus mirabilis
atgactgaagataaatattatgactatctagttattggtggtgaacatgatggacgggtatttagcgcccctcatgtaagagagttaaaagttccatgtgaaaagcaaccgcttccaaatttttattcgagagatagtagtgctgaaactcttacgccaagaactgttacgtataaggttattgagcatataactgaaagcggacttcactacttcatcgcatctaatgatgatttagatggcaaagagatcgatatcactcgtagaataaatgaatcagaacctagaatttcaccaataaactag

SEQ ID NO: 317002 - DNA, 468 bp, Proteus mirabilis
atgacaacaatcgcatgggatgggaaaacgctagcatcagatagtcaatctcaagttggcaatatgataacaagcacagaaagccagaagatatatagccctcagtatgggaagtgggtgataaacagtagtgaaattacagccatcggtattgctggtgacacatcgtgtattgatgaagttatatctaagttactacttggtattaattacgagactgagttttcatctattgttgatttctgcttgattgcagtaacaaccaagggggcagcgtacgggctaagtaaagataagggtgacactttaccttcaatatttaaagtcggagacatgttcactattggctctggtgacgcttatgcaatggcagccatgaaaagtggcaagacagcgaaagaggctgtcgaggtcgctatatcactagatgtttatagtggcggtgagattcaagaattttctctataa

SEQ ID NO: 317003 - DNA, 267 bp, Proteus mirabilis
atgagcgagcaagagtgccgagcatcacaggcatcggcagcagaggtcgaagcagagagtatgcgttggcctctggagctggctgaagggggcaaattcgcagtgcgttggttgactcttgaggagcgacaagagctgcgcagtgacatggcagaggcatctgcctgggctcggactgagcttcggaagcgcagagctgcaaaaaatcaaaaaaattctgcacatgttatggatgatggtatcgagaaagtctacctttccgactag

SEQ ID NO: 317004 - DNA, 243 bp, Proteus mirabilis
atgacaaccacacataatatcgaagttcagcaagcaattcatcaggctgcgatcaagctggccgccctggagttcatcgatcaggaaaccgcccggcaggttttgccagtcgcggaggcggtcgccaatatgttcacgatcctgtactaccaggctgaaactggccgagtgacgccggaggacttcgagcaggcgttggatactatcctccaggtgacaaagctgagaacggacttatattaa

SEQ ID NO: 317005 - DNA, 255 bp, Proteus mirabilis
atggagtttagctttccacctcaaaaccttgcgggggtatttggtttcttcgcagtgatgttcattgtgatgctggccttctattttttggggcagtggctgcacaacaccggacacggcccgaagatgaaagccattgccgttaaaatggaggtatcccaaaacaggttggccggacgtacttacaaggacatgacgagatcggtcgatgaaatcgacaaaataagacgctggccatttggccgacgcaagtag

SEQ ID NO: 317006 - DNA, 288 bp, Proteus mirabilis
atgacggggatgacgacgacaaggagggcgactgacgacgcttcccctgcatttgacaacgatagcttaggcggtgtcggcactggctggatgaatcaaacaggcggctttgatggcctgtccagtgaggaccaggaagaagcccgccaagcacacgcagaatggcaagagcgcgacccggaaaagcataccttcgacgttgagggctacgtgtcgtatgcccaggaacgccagcaggagcgcaacgaagaggttgccagttttgttaaaaagggtcgcatggcctaa

SEQ ID NO: 317007 - DNA, 774 bp, Proteus mirabilis
atgatcggtgctcaagccggtggccttccgagagacctaaccccatcagagcctattagtattgcgttcgacattattgtgaaagctggtgagtcctacagcatcacaagcccgatagataacttgtctatcttcttaatcacgctggcaattttggcatgtatggcggtagtggcggccaatgtgttgttggccttggtgacggcttggatattgatttatgccggtgtcttcgtgctgggttttggtggttcgcgctggacttcagatatagcaatcaactacttcaaaagcgtattgggcgttgctttgaagttgatgacaatgacgttgctcattggcattgccatgtcgatcatggacggtttctatgccgatctatccaatgatgcccctatgcgcgaactgctggtgatctttgtcgtttcactggttctcgtgatgctcattcactctgttcccaatgtgatcgccagcctggtttctggaggcggtgcgtctgctattcaggctgcatttgcaaaagcaggtgagaacgtagcgaacaatactcacgttatgtcgagcctgggcggagcatttagcggtggccgcgattctgatgaagctggctccttttcccaagcctctggccaatcctctggcggtgactttaaaggcagcgctgtaaaagcgggtcgtattgcagcggataccggtgcgaatttgatgaagggaatgagtgatatggccgggggatcgaattggccgcattgctggaggtcgtttagctag

SEQ ID NO: 317008 - DNA, 330 bp, Proteus mirabilis
atgagcaagatattcgttcgacttgtgatgctcctggcagttgtactgacttcacaaactacgtcagcggccattgagcctaatggtgtcttggatgaggtggctgtttgttttatgacagccagtgctacttggggcacggtaattacaaactatgccgcctggctgttctggacgctgggtaccataccccttgtttggactggcgggaccttaatccttaaacaagcggatataagggagtgctttgccgagttcgtgcgtttggtttctttctctggttgttcagaaacgatccagactttgcgacgtcaatcatcgactcgttga

SEQ ID NO: 317009 - DNA, 645 bp, Proteus mirabilis
atgcaaaaagttaaaagaaaaaatttagccgctaaaattgctctggctgtcgctatgacgacctgcaccttgcagcccgtttacgccggtattccagtagttgatggcaccaacctatcgcaaaacatcatgtccgcgatggaagccgtagcgcagacgctcaagcagattcaggaataccaaatccaactccagcagtacgaaaaccaactgcaaaacacgatggcaccggcggcccatatttgggaccaagcacagcgtacaatcaacgatcttaaccaggcgactaacacgctcgcctactaccaaaatcagcttggtagcctcgatgcctacctgggcaagttccaggacgtggcctattaccgcagctcgccatgcttctcttcggcggggtgcagcgatgccgaacggcagcgatggctgagaaccgccgcctggcgtctgaatcgcagaagaaggccaacgacgcgctgtttaagggcctggagcagtagcaagacaacttgcaggccgacgctcgacagctccagcgtctgcaatctgccgcccagggcgcggacggccaactggccgccattggttacgctaaccagctcgctagcaaccaggccaaccagctcctgcaaatccgaagcctgttga

SEQ ID NO: 317010 - DNA, 828 bp, Proteus mirabilis
atgacaattggtaacaaggtcgctccaaccagtaccagtgcacaggcacgagtaatgctttaccaggccagccagcgccctagcctgatggaggccgactggatggaaacatcctttggccgctgtcgcattaagggaaggcttggccagtggcacgcagatgttgttgaggcgattttgcactgtgctgaacgtcgccgcgatgtgtcagatggtggtgtagagcttttggtagaccctgccaaagtacggataacgttgtcagacagccggtatagttcctcccagcttgagaagctgctgacagagctacgagcagcaaccgtaaccattgaaacgccacagttagattttccgataatcggcggcttgatcgatcatgttatcccttcagctatgacacgccctgatcccttgacgggaggagagcggaatctgtggagagttcggcttggtatcgccttggtcatgctattggagcatgaccttagcctgtactacgatcccgcacccattgctcgcttgcggcatgggattagtcaggctgtcgctcgacacatattgacccacaagaatgacccagccggagggtggcatgttgatactctcattcgcgcagtctgtggtgaaaatatcaatagtaagaagatgcgaaatgggcgttccaggcttagggaagatgcggaaaaattacatgaagttggaataacgatagatgcagagaataggataaagcgcctcacacccgcccgatttttggctgttttggcaggatattcaggatatctcaggatatccagcaacctccagctgggtgctggaggttga

SEQ ID NO: 317011 - DNA, 864 bp, Proteus mirabilis
atggcccttgatcttatggcggccttttcggaaacgccgccgcctcttgattatgttttacctaacatggtttccggcacggtaggggccttggtttcaccaggtggtgccggaaaatccatgctggccttacagcttgccacgcagatcgctggaggcccggacttgctggaagtcggagaatttcctgttgggccagttatctatcttcccgcagaagatcctcccgctgctatccatcaccgattacatgcgcttggagcgcatctcaccgccgagcagcggcaagctgttgctgaaggcttgctgattgagctgctgataggaaggtgccccaacattatgtgtctcgattggttcgatggccttaagcgagcggctgcggaccgccgccttatgatcctagacaccttacgtcgtttccacatcgaagatgaaaacgttagcggtccaatggcgcaagtgatcggacgtatggaagccatcgccgccgatacagggtgctctatcgtatttttgcaccatgccagtaagagcgccgccatgattggtgcgggtgaccagcaacaggccagccgtgggtcgtctgttctggtcgataacattcgctggcaatcgtacctgtctggcatgacgcaaaccgaggctgaggaatggggtgttgatgatagtcagcgtgggtacttcgtccgctatggcgttagcaaggcgaattatggctctcctttcgccgagcgttggttcaggcgtcacgaaggcggtttgctgaaacctgccgtgctggagaggcagcgtaaggccaaaggagtattaccgttcaagaaatctaaagttgctatggaaggcgctgatgacaattggtaa

SEQ ID NO: 317012 - DNA, 231 bp, Proteus mirabilis
atgcaaacaatggcaaataaagttctcatcaacaggaaacagctcctggagatgattccactttcaacgcgcacaatttataacctggaacagcgtggggagtttccgaagcgcatagcccttacaagtagaaacgtcgcgtgggacctgtcggaagtagagcagtggattgaggagcgtaagtcttcaggaatccaggctactcggcctggcaacaccataggggcctaa

SEQ ID NO: 317013 - DNA, 1044 bp, Proteus mirabilis
atgaatatcgaacaccaagctagactagacctagggcaagactacatagccatccttccaggctgcgcccagcttgtttctcttgctatagccaaatttagaacgcgctggggaccttactctgccttctctcggcgctatcccattcttcgcctgatacaagaactgatcgatcctgccatagctgagtacatggattccctcccaaacagctataaaaaccatgttgcgggtattggctcaggagttggatttagcgaaatcatccggctgatagggctggaagcaatggtgcgcatgcagcgccaactgctacgtcagttcataaagacaagtgatgaacaaacccaaagagatcagtgcttcgccgcaaccattgaatcgttaattgaattaacctgggattgcgcctgtaagcgtccgaagaaatcaacagcgaccaaaggcgtcaacctaaacgtacaacgaaaacatagtttctgcgaattctgtggaaaccttacggagtactcaaaattcatgttcacagtagagcagagacaaacaaatgaggttgaacttatagaccacaagaaactagaacttaaccacaattactgtaaagagcatcgccccaaacttgccaatgacgagtggaatccaagttacaaacaggcaaagcgctccctcgcacaattcaatatcgaactttccaggttaactcatcaatctgcacatcgcgctaagcctcatgctatgtcaggagacaaactgatcgatgactatttcttcctattcatgttgaatttaacattacaaccagcagacgtagcggatcttcgcaatctggctcgaaagatggtcgactctaagctttcagacaataagaagaaaatgctggtacttcagcattatggttacactcaatctcaaattggcaaaaagctactaagcagaaaacaacaaccaatgacacctcaagcagtatctaaagcattagcagcagttcgcaaagattttttgcttcctgctaacaggccaggaaaaagccaacagaaattttag

SEQ ID NO: 317014 - DNA, 1866 bp, Proteus mirabilis
atgacccgcgtaagcagagacgactgggtacctcagggtgtcagtggtctggaagggagggcgtgggaggctttacgtgaaaccgatagcagcatccttgtgaccgctggtgccggtgccggaaaaactgagtttctggcacagaaggcgacctatcttctgcagacaggtatttgtccggcacccaaacgtattctggccatcagctttaaaaaagatgccgcccaaaacctcgccgaaagggttgcaaagcgttgcccgagagagcaggcgcggcgctttgattcgatgacttttgatgcccttaccaaggggcttctggaccggtttcgtccggctttacctgagccgttcaatgcgcccggtacgtatcagattgttaatccgtttcgtagggattatgacgattttattgagcgacatggctatcacggagtgagtgctcaacagcttgagagaagactgcttctgacagacctgccaattgacttgtcaaatggatctgaagtacatcgtgcgttagcagattactggcatgaacaattcttcgggggcgacgagatatccctgtccttcccgatgataaacaggcttgtaaaactgctgcttcaggagaattcatatatccgccgggccttacaggcaacatatcccatcgtctttcttgatgaataccaggacaccacctatgcccagtatgacatgctgctaacggcattcgatggtagcgatgctgtctttacggcagtcggcgatgataagcagcgtatcatgggatgggcgggagccatgaatgacgcctttgaccagtttgaaaacgactttgctgccagacgcataacactgctttctaactggcggtcacatgtggatctggttcgtattcagcacgagattgcccgccggatagacgataatgtggaagaagtgcaggcacaagggacccgtgaaatcgaaggtgaggtttctgctatctggcaattccggagcgcagatgacgagaacaattatctggctgaatgggtgagccgtgaggttcagtcagagcgtgttgcaccacatgatgtagcgattctgatcagaatgcgggcagatcaggttgagggtgaaatagccccctcttttgcggcacgaggtctcaggatcagaaatgcggcccggtcagtcggtgaaattcagatacaggatctgcttggtgaagagctgaccggtatatttgttcctttactccgcctgggagcgacggagcgaagcccggaaaactgggagcagacccagcagaactatctgtttttggaggctgccgatccggataacgatctcacgcaggaacgattgctggttaagcttgaagcattcgtccgtaaattaaggacagagctagcgcatcgccagcctagtccggattcggcggaagagattgcagagatgcttcttgaatttgtcgggacccctaggcttcggcaatcctttcccgcttaccagcgtgcaagagattttgagagggtgtggagtggatttgtcactctcctgaaagagtgtgcagaacacagcagcagctggacggaggcgctggatgagttcgaaggtattggccaggtagctctgatgaccgtccataaaagcaaaggtcttgagttccatacgatgatattttatgggctcgacaatcagacttggtggagccttacgccgcaacggggtgaagagctaaacactttttttgttgcctttaccagagcaaagcagcgtgcgtttttctcccagtgcgttgagcgagggcatgctattggctggatacagcaattattggccccggcgggagtcgaaaccatagatggtatgactatattgggtactacgtga

SEQ ID NO: 317015 - DNA, 1962 bp, Proteus mirabilis
gtgaaaatagagaagataaagctacagaattttcgttgtttcgggcatgaggtggtcgagctaaattttgaggaagaactgacaatacttgtcggcggaaacggctccggaaagacggcagtgctgcaagctgtgtccaggttgtttggtacatcatcagtgcagcgatcggtaaagcgtcgagattttcacatacctattgaccggcaggagctgcagtctggcgacagtttgtttgtcgaagcggtacttgccttccctgaactggaagagcaagacgcttctcctcttgatgccgttccggagttctttaatcagatggcggcttccggtgagggagagccccttaaggcccggatacgactacaagcaacatgggcggatgacggtacgccggagggagcaattgaggaggatatacgctggataagagccctggatgataattttgaatgggatgactgttccagggttcaggctgtagagcgctcttcaatccagtttatttacttaccggcaaatcgtgatgcgacgactcaagtgaccgcccttctaaaagggcggttatggcaggctgccaaatggtcgacggcatttagggatgcaagctatgttaatgccggtcagatccagagcagtttcgaggaagaggagccgtcgaagtttctgctggagcgtctttcgaagcgttggcaacaggtccatgaagccgatacagacagtaaaccgcgtttaaggctcatcgagaaccgttttgaggagcttgttcgtaaagccgaatttacttttacgcctgatgaagaaggtcaggagcgtcgtttgtccgagctgagtgacggtcagcgctctctgttccatatcgctcttacagcggcaacgctcgaaaccgagcgggaagcattttctttgcctgctgatgacagctcatttgaacaggataagttacgccgtattcacctgacgattcttgccatcgaagaaccagaaaacagcctgtcaccgttctttttatctcgcatcatcaagcaggcgagagagattggcgcactgccttccgcgcaggttctgctatctagccattccccatctatcctgagccggatagagccggaggaagtgagatattttcgtatggaccggagcgctcggtgctcatcgatccgagaactgaccctgcctgaagatgatgttgaggcaagcgtttatgtcaggctggctgtaaaggcataccccgaactttattttgcgcgatttgtaatcctgggtgagggagactcagagcgagtcgttattccgaaaattgcggaagagatgggtgtttcccttgatccatcattcgttcccgtcgttccgctcggtggacggttcgtagcgcatttctggcggctgctgaatgatcttgagattccacatgccacattgctcgatcttgatctggggcgccgacatggtggggcgaatgccatgagaagctgccttcagaatttggccgctatcgggagtaattttgggagcaccaatggtgctaatgctgctcagcttaccgaccaacagctttataatgaaggcatgcaaggtcaatggcttcaagcattcaggagggaaggtgttttcttttcctatcccattgatctcgattttgccatgttgctcgcctttccaaccgcttatcaggttgccaatccaggtggcaatggaccccagagtagtgctgctgctattcaagccaaaaaggtcagtacgctgaaaacaggtggtaatcctgccttgtataccgcgcattatgatgacgttttcaaatggtatccgtatctgttcctgagccgcagtaagcccgaaactcaccttgcggctttttcccgtatcgcgggcggcggtgttactgcgtccgctcctgtagagctcagggcgctcattgagtacgttacggataagcttaatctgtcaggagagaatgaatga

SEQ ID NO: 317016 - DNA, 1248 bp, Proteus mirabilis
atgacctggttttcgggtgatctcccagcatggtattggaatcgaagaaggataagactcttgctgaccgataccaagctgcgcaacctcaagccgagggataaactctacaaggtgaatgaccgggatggcctctatgtggctgtcactcctgccggctctatcttattccgttacaactactcgatcaatggcaggcaggagacaatcacctttggccactatgtcgttggggggatcacgctggcagaagcccgtgagcgacttagtgaagccaagcggatggtcgctaatggaaagtcgccagcgaaggagaaggcacgggacaaggcgcgtgtaaaaggggctgaaacctttggtgcctgggcggaaaagtggctacgtggctaccagatggccgacactacccgtgatatgcgccgctcggtttatacgagagagctggaaacgaaattcggcaatcagaagctgaccgaaatcacccacgaggacttgcgagcacttaccgacgccatcgtagagcgcggtgcgcctgctacggcggttcatgcgcgtgagattgtactccaagtataccgctgggcgactgagcggggtcagaaggtcgaaaacccagcagacctggttaggccagcaagcattgctaggtttgagccgagagatcgaaccctgacgcccgaagaaatcagtaccatgtaccagtacatggagcgtattggtacatcaccatcgatccgggcagcggtaaagctactgttgttgacgatggtgcgtaaaagcgagctgacgaatgctacctggagtgagatcaacttcagcgaagcgctctggacgatccccaaagaacggatgaagcggcgaaaccctcacctggtgtttctatccaggcaggccatggacattctcatcgctttgaagacgttctccggtggatcggattatgttctgccgtcgcgttacgattctgacgtgcccatgagcagtgccacgctaaaccgggtgatgacgatgacttacaagctggctcagaaagaagggcagtcccttgccaaatttggaccccacgatctgaggcgtacagcaagtaccttactccatgaagccggttacaacaccgattggatagagaaatgcctggcacatgagcaaaaaggtgtgagggcgatatataacaaagccgagtatcgtgatcagcgtacatatatgttgcaggactgggctgatatgattgatgaatgggttatttag

SEQ ID NO: 317017 - DNA, 414 bp, Proteus mirabilis
ttgattgttaatggcattaaaattactgctagtactggtgaaactggtatagataataagttaaattatatgtatgtgtcatcatctgatatttacgctgaaattatgggagttacatggaatgctacgggaaaattatgggccgattttacaggtagatacgcaccaacaaaacttacattcacaaacttacctggtttagaagtgcgtagatatggcttgtttaatgctgtttcgttttattatggttacaatggaagtatagcacctaagcaggacaattattggatattagattgctatgacggttcaataattgatttacgttttaatgggtctagaacattttgtaattatccaaacgtgaatattaattattggatatggaacggaaacgaatgggtgtctagatag

SEQ ID NO: 317018 - DNA, 609 bp, Proteus mirabilis
atgaaactaaaaaataacagcttaaatgctggtggattcgctcaccctaaattcagcgacgagactattttaaatattaactcagatgatatttccgttattcgatttgaaaatgttcaggtgcggatagttaaaattaataacgagccgtggtttattgccactgacttatgtagtgccttagagcaaagcaatacagctaaggcggtaaaagggttagatgatgatgaaaagatgactgtaactttaagttatagtcaagttgcctctcatggcggagtcaggaagttaataatcgtttcagaatctggtttttataaactgattatccgtagccgcaaggcagccactaaaggaactttagcccataggttcactaattgggtattccgtgacgttatcccatctattcgtaaaactggcgcgtatggtgtgccattctcggcgttaaatgatttcaccaaacgtcagcaacaataccaaattacagcctcacagcatgggcgtgacctgcaatcttgtaagcaaaagaaagctgatttacagcatgaagaacgcgaactatggaagaagtaccagcctgattttcttgatggagaaatccactaa

SEQ ID NO: 317019 - DNA, 1185 bp, Proteus mirabilis
atgatatatttaagtttgttcaacggtatatccgctggaagattagcgctgtctcgcgctggaattaaatttgataaatattacatcgccgaaatagataaattcgctaataaagtgtctgagtttcattatccagataatatccaattaggtgacgttaataattggcgtgagtgggatattgattggtcagatgtgggattagttactgcggggtttccatgtcagtcgtggagtttagctggcaagcaattaggcgataaagacgagcgaggtaaattattctggacgacattggaaataatgagccatgtattagaaaataatccagatgctaaattcatgctagaaaatgtaaaaatgaaaaaggagtttgaggaatatataacactgcatacggagcgagcgttaggttatgtaaataaaacgcttattaatagctcgttattatcagcacaaaatagacaacgttattattggactaattttgaagttagtcagccagaagataaaggtattttgctgaaaaatattattgatgacattaattcgtatggattcaaaaataacaaagttataaacaaattatttaatgtaaatccatcagggaaaggaatgaatggaaatgtttatagtgtggatgggattagcccaacactaacaacaaataaaggggaaggaataaaaatagtatttaggccatgcgaaacaagagagaatattaaacaatccaaagacggactaattcatgttgctaatgcctcagatattaaaggcaatgaacagataaaacgtatttattccgatgctggaaaagccccaacactgtcaacgtgccagggcgggcacagagagccgaaagtcgcaatctatcagcgtcctcgaggtaaaaataacggaggtgttcacactgaaaagtcgccaacactcacatctaattcatgggaacataataacactctgcaatatcgcaaattaacacctactgaatgcgccagattgcaaacattcccagacgggtggtgtgaaaatatcgtctcaaattcacagtcatataaatgctatggcaatgcgtggactgttgatgttatcgctcacatatttaaatgtgcatacagagaaaataaacatgaagctattcgtccttctgttaattatgaacaatcatgcagtaccaatatctga

SEQ ID NO: 317020 - DNA, 144 bp, Proteus mirabilis
atgccaaaaccacaaattagccaagcaataataacaggaccaatttcagatgttgctgccatattttgtggtaatccatcaacaccactacctatcattgagctaattacaattgcaaccaatgcaagcagtcctaatttctga

SEQ ID NO: 317021 - DNA, 171 bp, Proteus mirabilis
atgtgggataaagtgataaaagctttctcacttatttatggttctgaagtttttttagtcatgaaagatatctggaaaatggatgatcagcaggtcattgatatgacccaatggatggctaaagctattttaaatcaggcaaagtcagattttccgatagataacgattaa

SEQ ID NO: 317022 - DNA, 216 bp, Proteus mirabilis
atgacgttgtgttatttcttacccattaatctacccgttattctatccattaatctacccgttattctatccattattctgtccgttattttatccgatttaggtataacggatagaataactggtaaaataacggatggaatcatcattttaccaatctacatctatgatactttcagtatcaatgccactcattttctggacgaaaatgaatga

SEQ ID NO: 317023 - DNA, 567 bp, Proteus mirabilis
atgggattaaataatgattgctcggtaagaaaaaaatacacagatatctatattgatgcttttaatgaagttattgatttatatgaatctgaagggggcattccaaaaggaacgttgaagttaacatctataaatgaccatgttttagatgaatggtttaagtcgtggtatgagaggtctaatagatttaaacatggtaattggcattgggataggatgattgccaaaagaagaaagaaatgtaaacggtttgatttggctatatggagtggtggggttttatgtggattgactctaggaggggtgtctagaggaaataaaactgttcggattgactatattgaagctaatcctaacaagcaccctctggataaaaagattgcaggtatagccattgccgtggccatttctgttgggcagaagataaatgcatcccatgttgcaatctttaatccagtgaatgacaaggttgaatctttatatagacaatttggttttcaaagaatgtctatatatggtcgttttctgaaaaatgtgatgtatttagaggttccgtcgcctaattga

SEQ ID NO: 317024 - DNA, 519 bp, Proteus mirabilis
atgagtgaaaaagctaaaaaagcagggagaagatctctggcccaaagaagagatattctgattaatgaattatggggggatgatttagacgatttaaatgtgtggaacagaaagattcatgatggatttaccactataccaagaacacttacttacattaataggatattagattttttatcaggtgtaggtgctccagtgtcccaaacatacttaagtttatggtgtagggtttttgatgaaggttttattgaaattagagataaggaggctattgcttatgagtcagggtttagtggtcaaagggctgtaaccacttggatggggaggatgaaaaaattgaaagaattaggatttattttaacaaaaccaggaactgcgggagagttccattatgtacttatgttgaatccgttatccgttattagagataaatatgaacaagatggagtggtaaaagatgagcgatattacgctctttataatcgaatgttagaggtgggtgcaaaatgggattaa

SEQ ID NO: 317025 - DNA, 300 bp, Proteus mirabilis; identical to SEQ ID NO: 299682

SEQ ID NO: 317026 - DNA, 1020 bp, Proteus mirabilis
atgaacaaatatctcactaaaaataaatcgatagttttaactggggatcggatcaccggacctttacatcttggtcattatattggctctcttcagcaacgtgtcgaatttcagaataaagcgacacaatatatcttaatggctgatatgcaagggttaaccgataatggctcaacaccagaaaaggtcagtaaatttctttttgatgttgtggctgactatttagccgttggtatcgatccgaaactttccacattatgcttacaatcagcactgccagctctatcagaactgactatgctgtatttaaatattgtcacagtatctcgattagagcgtaacccaacagtaaaacatgagattttgcaaaaaaatctttctcgttcattgcctgcgggatttttaacctatcctgtcagtcaagcggctgatattaccgcatttagtgcagatattgtgccagcaggagaagaccaattacctatgattgagcaaaccaatgaaatcgtcaccaaaataaatagcttaataggacaaccaatattgacaacctgtaaggtcgtggtagggcaagtcggtcgtttacccggtacagatggtagtgggaaaatgtctaaatccttaggtaatacgattaatttatcatccacagcagatgaaattaaaaaagcggtttattcgatgtataccgatccgcaacatattgatgtcgcatcaccaggtcatattgaaggtaatgtggtgttcacttatttagatgctttttgccaagataaagcgatggtgacagcaatgaaggctcattaccaaagaggaggacttggtgatatgaaatgcaaagctgttcttaatgatatcttacaagagctcctgcaaccgatacgtgcaaaaagagcacaacttattaatgataaagcttatttattacaagtgatcaaagaagggagctataaagcgaaagaagtgactcaacaaaagcttgatgaagtaaaacgtggtctgggattattgatcttgtga

SEQ ID NO: 317027 - DNA, 156 bp, Proteus mirabilis
atggattcaccatttaaccatttccagacagcgggcgcactgacttttattccttgtttagccaaggcctctgtaattcttttacctaaccctctacctgcaattccagagtctaggcaggcttcttgtagtctttttgtgaatgctaacttatag

SEQ ID NO: 317028 - DNA, 921 bp, Proteus mirabilis
atgaaaataaccgtattaggatgtggctcaattggtaaactttggattgcaggattaacgcaacaagcccatgaagtacaaggatggttaagaatacctcaagctgattttgacgttaacgttgactccattaatggtatcccatttcaacaacgcattatagccaaccaaaaaacatggctacaacacagtgagttacttcttgtttgcttaaagtcttggcaagtttcagacgcggttaatgcacttatccctcacctttctgctgattgcccgattttactgatccataatggtatgggaacactagatgaactcaccctacctgaaacaccgactaaaagagcaatattacaaggtataatcactcatggtgcttatcaacaagatcaaaaagtgcgccatacagcagaagggatcacccacattggcccactaaatacaacagcacgtcaatacggttatttagctgaaattttacatcaagctttaccggatgtagcttggcacaatgatattcatactattagctggctaaaattagcagtaaattgtgttatcaaccctttaacggtgttttatcaatgtcgcaatggtgatttattaaaacaccctgagcatatccaaaaagtctgtgatgaagtttatcaggtaatggagcgagaaggtgttatacctacctctagatcacatttacatggctatattatcgataccatagagcaaaccgctaataattactcatctatgtatcaagatgtgaaatatcaacgccataccgaaatcgattatattacaggctatctattacgtagggcatcagagcaaggactcgtgttgcccgaaaataagcgactttttcagtttataaaacagaaggaaggcaactatgaccatatccgcactcatctgtctagctaa

SEQ ID NO: 317029 - DNA, 657 bp, Proteus mirabilis
  misc_feature (591)..(600): n is a, c, g, or t
atgcaatctactcactcaaaatcaagccgaaccttttttggccatccataccctttaagctctctgttcttcacagaaatgtgggaaagattttctttctacggtattcgcccattattaatcctatttatggctgcaaccgtttatgaaggtggtatggatattcctcgagagcaggcatctgctattgtgggaatttttgctggtggtgtttatttaacatcactgccaggaggttggctggctgataactggttgggacaacgtcttgcggtttggtatggctctatctttattgcattagggcacctttctatcgcactttcagcgttttggtctcagaacctattttttatcggcttattgcttatcgtattaggtacaggcctatttaaaacctgtgtcactgttatggtgggaaccctgtataaaaaagatgatacacgccgcgatggtggtttctccttgttttatatggggatcaatatgggctcatttatcgcaccactgatcacgggtttcttagtccgtgattatggttggcattggggctttggtattggtggtattggtatgctagttgcacctgtnnnnnnnnnngctagttgcactactgatcttccgcttttatgccgtaccgacaatgcgtcgctttga

SEQ ID NO: 317030 - DNA, 492 bp, Proteus mirabilis
atgccatcttttgatatcgtatctgaagttgacttgcatgaagtgcgcaatgcggtagagaacgcacaacgtgaactgactactcgttgggattttcgtaatgttgaagcaagttttgaattaaacgaaaaaactgagtcagtaaaaacaactagcgtatctgaatttcaggtgcagcagttattagatattctgcgtgagaaaatggcaaaaagagggattgatggtgctgttttaaatatccctgaagagatgactcacagcggaaaaacatacagtgtagaagcgaccttaaagcaaggtattgatactcctttagcgaaaaaaatcgttaaaatgatcaaagacagcaaattaaaagtacaagcacaaatccaaggtgagcaagtacgagtaacaggtaaatcacgtgatgatttacaagctgtcatgaaattagttagagagggcgaattaggtcagcctttccaatttaccaattttcgtgattaa

SEQ ID NO: 317031 - DNA, 384 bp, Proteus mirabilis
atgcgtgaagcgcttgatatcattgttgctactggagccaaacctgtttttataaaaaccgtttattcaatgcctagtggttttatgacctgtttttatgaaaatgccaagttaagaaaagattttgctgataacaactgtaatcccaaaaactataaaggtgagggtaatacatggatgaaccaattatttgctaaattaaaacaggactattcaagcttaattattatcgatcctaaagatgtacaatgcgataaagatacctgcttaacagatattgaaggagtaccggtttatcgtgatgtaggacatattactgattatgcatcaacgattttgggcatgatgtatattaataagatgggtaatccatttaaggaataa

SEQ ID NO: 317032 - DNA, 555 bp, Proteus mirabilis
atgttaggagcttgtgttgcttatttacccgtaaaagtaatcattaatcaaagagttaatagtgttattagtctcattgccttagggattatcttttggatagcagttcaaaaagatgtgattgctggttatccgaatttcaatacgttatatgtttgtcttagtgttgcactaattatttatacaggacaacatggcagtattattcaaaaagtgttgtcattaaagccaatagtgatcattggattattatcctattcactttatttatggcactggcccttatttgctattgcgcgttatataggcgtatttaacaccgagatacaaaaagggttatttttagcattaatatttttactctctattttttcttaccttcttattgaaaaaccgtttagaagaaagcgtttgaactttaaatattcgataacattattgtttattatacctattttattggctttaggattaaatgcattaaatgaaaaatatcatggatttggagctgtctcttatacacatctgacgctgccgacgatctactctgtgtag

SEQ ID NO: 317033 - DNA, 357 bp, Proteus mirabilis
atgaataaatacaccgaactatctgacttcgagattaataaaaaggttgctgaaaaattaggactggcgtacgaagtcacaaggtacggcgtggttacaaggatgagcaataaagagcagtggcgtgaattcaatccctgcaacaacccagccgatgcaatgccgattattattgagaacaatatctcattgcacgcccctcacttaagggaaggctggatggctgagtatgccggtagtggtgacgatgttaatgacgggcttcaggctgattattttgatgtacatcataaaaacccactacgcgccgctatggaagtgttcttaatgatgaaggatgcggagaatgaggactga

SEQ ID NO: 317034 - DNA, 165 bp, Proteus mirabilis
atgcatttgtacgcccatttatattgttctaatacgcgaggggatactgagttaggcataacagagtcagaatgggatgctatgagcgaggatgagcaacaggaaattataggacaatacatggcaaatattgttgatatgtgggtagccccaaagaaagattaa

SEQ ID NO: 317035 - DNA, 426 bp, Proteus mirabilis
atgtttatattgaggttgctggtcttaatttttttagttttttatagttactcaatggggcaaatatcttctgctgggttaaatgattttggtaagttaatatcattatcattttttatttttgctcccttattatacatcttacctttcatcgaatctaaaattcgcaagaaaaaaaacagcaatcaaatactggcattaaatgtcttagctggctggacggttattggttggattgttagttatgtttgggctttggggaataacaacgaaaaaaattcagatataaatgatgataaagctgattcatctaaagtagagagaaaaactaaacaatgcccttattgtgcggaggatgtattagaggccgcaataaaatgcaagcattgcggtagtgatctaccaattaaagataataaaaattaa

SEQ ID NO: 317036 - DNA, 375 bp, Proteus mirabilis; identical to SEQ ID NO: 302344

SEQ ID NO: 317037 - DNA, 213 bp, Proteus mirabilis
gtgctacaagataagctagcccctctatttgctgaacgtaaataccaagaagcattagttgaactcgcctctttacgtgatgttgtgaataacttctttgataaagtgatggtaatggataaagacgaagaaattcgtgtcaaccgtttaaccatgctacatgaattacgcgagttgttcttaaaagtcgctgatatttctgttttacaataa

SEQ ID NO: 317038 - DNA, 324 bp, Proteus mirabilis
  misc_feature (5)..(14): n is a, c, g, or t
atggnnnnnnnnnnatgggatttagcttggttacagcaacaaggcgcgacactcaatatggacttagttaaaaataaggtatcagattataaacttgagcacttcaacaaaatgttggaaaactttctcgaacgacttcctagtattgtatctagtgaagcattcattgcagaaatgaaacgtttcttaccaacagatgtatttgatagaaccctcgctcaggataagtttcaagtttacctgcaaaatactttggcgaaactatttaaaactgtgagtaacgaattactaggcaaggtcactaatagtgaatttagaatgtaa

SEQ ID NO: 317039 - DNA, 870 bp, Proteus mirabilis
atgtcaatcaaacaccctattattgctgttactggttcaagtggtgcaggtactactacaaccagccaagcttttcgtaaaatatttcagcaactcaacgcccatgcagcctctattgaaggggatagttttcaccgttatacacgccctgaaatggatatggccattagaaaagcgaaagagcaaggacggcatatcagctattttggccctgaagccaatgactttaatttattaagttcaaccctaagtcactatagccaaacagggcaagggcaatttcgcaaatatcttcattcttatgatgaagcaaccccttataaccaattacctgggacatttacaccttgggaagcattgccagaaaaaacagatattttattttatgagggattgcatggtggagtcgttaccgatcaacataatgtcgctcaacacgttgacctattagtcggtgttgtgcctattgttaaccttgaatggatacaaaaattaattagagacaccacagagcgcgggcactctcaagaagcggtgagagattctgtagtacgttcgatggatgattatatcagttacatcattccacagttttctcgcactcatatcaatttccaacgcgttcctacggtggatacctctaatcccttctcagctaaagctattccaacactggatgaaagttttattgttattcgctttcgtggcttaacggatatcgatttcccctatctattggcaatgttgcatggttcatttatgtcgactatcaatactattgttgttccaggagggaaattaggcttagcgatggaattaatcatggcaccactggtgaagaaattattgaatggtgaaaaaattagctaa

SEQ ID NO: 317040 - DNA, 633 bp, Proteus mirabilis; identical to SEQ ID NO: 294795

SEQ ID NO: 317041 - DNA, 576 bp, Proteus mirabilis; identical to SEQ ID NO: 294793

SEQ ID NO: 317042 - DNA, 573 bp, Proteus mirabilis; identical to SEQ ID NO: 294792

SEQ ID NO: 317043 - DNA, 240 bp, Proteus mirabilis
gtgtttatcccacctaaagttgaaaaccgtgacgatgtgacaggtgaagagttaacaactcgtaaagatgaccaagaagaaacagtgcgtaaacgtttagtcgaatatcattctcaaacagcgcctttagtttcttattaccaaaatgaagctaaagcgggtaacgcgcagtaccacaaaatagatggtacacagaaagtaagcgaaattaatgctgaactgaaaaacatcctcggttaa

SEQ ID NO: 317044 - DNA, 462 bp, Proteus mirabilis
atgaagcattggaaattttacattgtcattatgatagtgggaattgttgctggtggttgcgttctgattaatgcacaagcgaaaagaattaatacactgacagaaaacaacaaagaacttacggcaacacttgaagagcaaaaggctatcaatactgactatcaagtacgtatagagcgactcaatcaactagatacaagacacactcaggagcttgttaatgcaaagaatgaaattgataggttgcgtgttagttctgagcgtcatcctgagcgggtgtacatcaaagccgagtgtccaaaatccgaaggtgttaccacctcccgcttggatgatgcaatcaccgcccgacctactgacaccgctatccgaaattattggttactcagagagcgaatttcacaatcagagcaaatgatattaggactacaagattacattagagcggagtgtgttcaatga

SEQ ID NO: 317045 - DNA, 159 bp, Proteus mirabilis
atgtcatggaaacctttaatcatcattgtcggttttatccttgcactactcatcacagtcgttggcggtatttatatctcaattgataattcatgtgttaacgataaagccagtttagaaaagcgctgtcagatagctctctcacatcatcggtactaa

SEQ ID NO: 317046 - DNA, 672 bp, Proteus mirabilis
atggcttctctcaaacctgttgcgcgtatagccttaaacaaaaaagaatttagaaatgttatttcttcatatttagcaggtgatattgaatggagtgatgcttctctaaaaccgctaaaagatctgatgagaattcttcttagacgtgagcaaaaaggcatatgcccttattgtcaaagacgaattattcctgaaagacgaaatttaggcgagcatattgagcactttttggataaatcaaaggataaatataaaaaattcgcattaacagcatcaaatttagtattagcttgtcaaggttgtaatgttgagaagggaaccaaagacctaaataaaggaagaataactcctttatatcttaattcggcagcaggcccatttctttggcctcatccatattttgatgatatgagcgcttgtatacgaaaattacctggtcccgtatatagtgtaattaacggctctggtcgtgaaaatcaggcaagtaaactcataactgatctaaaattaaatgaaatcagaagtttagaaattcgttatagccgtctcagttcaagaagggatagattgataaacattttagccagactagcagccaaaggtaatactaaacgaatgatcccgattagttgtgagctgaagaaagtaaacgatgaattaaacaatccttaa

SEQ ID NO: 317047 - DNA, 1209 bp, Proteus mirabilis
atgagtgagtgggtagagtatagtttggaagatgtagctgaaataacatcttctaagagaattttttatgcggattatgttgactacggaataccattttatcgttcaaaagagattattgagctttataatcgtagtgaaataagtaactcactctatatttcagagcaaaaatatttagagatcaaagaaaaatatggagtaccagttattggcgatattctattaacaagcgtcggaacgttaggtatcccatacttagttaataattctaatgaattttacttcaaagatggaaatctaacttggataagaaagataaataaaaacattgtattacctgattttatctattgtcttttaaattcaccattaggaaaaaataagttagatgaaataacaatcgggtctacacaggcggcattgactattgctggattaaaaaaaataaaaatttcagtgcctaacttgagtgaacaattagagattgttcatgttattcaatcaattagtaaaaaaattgagttactccatcgtcaaaataaaaccttagaatcaatggctgaaacgctttttcgccagtggtttgcagatgattcaaatggtagtggtaaagaagttgaattgcacgaaattatagaatttaatcctaagagggttttacctaaaggctctaaagctatgtatttagagatggctgggctgaatacaaacacatttgctgcttctggttattatgaaagagattttacatcggggcaaaaatttataaaacaagatacattattagcccgtataacgccttgccttgagaatggtaaagcaggttatgttcattttttatccccagaacaagtaggctggggctcaactgaatttattgttttaagaccaaagcctaaatttcatccattattttcatatatcctatgtcgtaataatgagtttaaagagtacgcagaaagttgtatggaaggctcaagtggaagacaacgagtcaatgtatctcatttatcaatgtatacacttaccttgccacatgatgatgttattacgcaattcaatgaaatcttagcttcaatagaaccaaaattaattagtaatgcattgcaaatccaaactctagaaaaccttcgtgataccttactccctaaattaatgagtggagaagtacgcgttaattatacaccagaagaaataaaacaataa

SEQ ID NO: 317048 - DNA, 597 bp, Proteus mirabilis
atgtctggaaaaataggtcagagaaagaagatagaacaagaaaataaaaaggaagataattgcaaaagggcaaaaacaagcagagagaatagactgaaaaaattaggcgcaccattcaccattaacatgcatgataaaaataaaacaagattgagagaaatctgtgttcattttggtcatgatgacatgatggaaagagaaaaagccacaggacgaattttcagccaaacaattatgaatgttatcgattattattatattaccgcagttattgagtctaaaaatgacaatgcaaaattattaataaatacgtttaaaaccatttggaaagaatgtgttttaaacaaaaacattttcattcttaaaaacgaatttgaaacacttcctgatagtaaagaaaagaaaataatcgaaggagaactaaagtcaattgccaaatccatgactaaaacaaagtgtttcattcctccctatatattcaataataattttgatgaaagaaatattacaacatggacaccgttagatattttatatttgctagatactcaatcggtcattagtaaaataaaaaagttaaacaaattgaaaaaataa

SEQ ID NO: 317049 - DNA, 198 bp, Proteus mirabilis
atgcaacacgaacactttttaacgattaagcaagttttagaaatcacacaagtctcacgcgcgaccttataccgttggattaaggcgggggattttcctgcgcaatattcattgactgcatctggccgtagcgctagatggaaaaatagcgaaatagttcagtggtatgaaaattgcgtaaaaaaaggggggcaataa

SEQ ID NO: 317050 - DNA, 300 bp, Proteus mirabilis
atgactaccacacgtcgtatgccagccctcagcccagaagagattcgtagaatttctgataacgctgtggcgacagtcgctgcgcagaagattgttactaacagagccgtatcagccaatgcctctgttcaaggcaaagttatgagtaatgtatcgcgttctaatgtttcaaacaaaacaggcggaaaccttactcagagagcgcggagttacctagtccgtactggattgtcacaacgtgacgggcgtaagtaccttcaggcatcttttgatcaggtacgtaaaacattcaaatcataa

SEQ ID NO: 317051 - DNA, 720 bp, Proteus mirabilis
atgggacggcagaaacaacccaaaaagaaatgggtttttaccgaattggtaaaagacccaaataacattgaacagcttatttcctacgctgtttacaaaggattcaaggatgaaaaagcacagagccttcgtaatgagggaaaaagtgacgctgagattgatgaagaattagcaaaatatcatgaccactgccttggctcaaaaaaacagcttgatgtgtttcgggacaaagcgaaagagacacttcagggctatgttaaagcggcaaacaatgggctacaggttagggtcgatgaagctttacgccagtatgaatctgacagaaaaaaggaaattgctgcacttgaaaaaaaagcaagagaggcggagaaatccgccttgaaactattaatggaaggtgcagagaaatatagcaagcaaatcaaaaagccagcaggtttctttgagcatataaccttttatggtcttgcatttggcaagttcatgttttctggtgttccaaaacttattgctacggccatctctataggatttatctttgcaatatggggactctttaacgaagatgtcattacaggcctgagaagtggtctttataaaatggtagatatagctgtcccaggcaaaaaagttgataacgcgcagaatggcgttaattcaataagccctgcccagcaagataaaggaacgaatgaaaatccccgcaacgatggagcttga

SEQ ID NO: 317052 - DNA, 231 bp, Proteus mirabilis
atgtttaatgtaatgcaagccgccagtcgtcataaactcagcttccgctattcgctcaaatctgaccctcgagcgctgtttgatggcactttagtgccaaaagcggactttaagatagtgcaagtggaaattatgaacagcaaagatatacagagaagttattgcaacacagaaaatgtcaaggtactcaagttacaatcaggatatgaagtctggaaaaagccgttttag

SEQ ID NO: 317053 - DNA, 297 bp, Proteus mirabilis
atggtagatttctacatctcagcaataaaaatggacagcaccaatcagcatattgagttcgtaaaagttcatgaggatctgggggataagatcggacctggtactgttaattcgcgagctttcgttggcgaactaatcagaaaagggaaagctgagttcaaaactattatctacaacaaagaaaaaaaattatggtttgatggggcaaaagttgaagtgatggctgatgattacattactactgatccgaacaagactaaacgtgacaatcttggcaaccttccaacatttatctga

SEQ ID NO: 317054 - DNA, 645 bp, Proteus mirabilis
atgtcagtaaactttgaattagatgaattggaaagtagagcaaaaataattgttgaagatttcagcggtattttttctccatacgacgccttttatatacattcgataatttattcagctagccgatgtttggaagcttttgaacactacgaatttgcaaaggaaaaacaggctgattcagattactcaattagtttggtgcaagaggcaatagggcatgcggcggctttatctcgatacttctggccggtttggtatccgggcaagctaaacaaaacccatccctatcaagcagctctgagaaaaaaacgaggcgaaaagttaatatctgcttttggtatggaagaagactcacctattcataacagggatctgcggaacgcctgggaacattttgatgaaaacttagacgactaccttctgaaaaatgatgctggacatttttttcctgactcagcaattggcaatcatactcttgctgacgaaccggcctatcacttgtttaaacttctggacccagaagcagaatgccttgtcctaatggggaaaaagtacttttttggtccaataaaatctgaggtcgcaagaatttatgatagggccaattacctacagcaaaatggatataacttgagaccgttatag

SEQ ID NO: 317055 - DNA, 438 bp, Proteus mirabilis
atgttaattccttattcaccccacacaatatggaagaccatttgtgcgactttgctattaagcttggcgtttttctcacaagcagagcaggacgattctgtggaatttaacattcatatgctagacgcggaagatcgcgataatgtcgacctttcacgtttttctacctcaaattatatcattccgggtatgtactatttagatattcgtctaaatggtcgcgactttcctcgccaaaatattaattatattgaagtagcagataatcattccgtggcttgtatcgaccctactcttttaaaaaagttaacaatcaaccaagaaaaccaaaatatatcaaacaaatatcaccagattgttttgatattagccaattacccggtatctcgattaaaaatgatggtggtgtacttgatatcacgttaccgcgctcattaa

SEQ ID NO: 317056 - DNA, 369 bp, Proteus mirabilis
atgtttgctacttatcgggttactaatatcaagccacaagaagcgttacatttaggggcatatatttcgatagcgagagtattaatgccagcccttgcaggagctattatcaatacttatttgaggatctcatatgatactcattatgatttgttaagaggatacatacaaactggtgagcaaaaattagcagggaatattgctgaacattatcaaacaacgatggcattagtaataagagaagcacatgttgcctcttttattgatggttttgatttgattatgctcttggttattttaggtgctctttgtatgtcatttttaaaatcgtcaccagaaaatccggtagtcccaaggctagtaaaataa

SEQ ID NO: 317057 - DNA, 327 bp, Proteus mirabilis
atgttacctaattcgttatttataccttcatttttgagtgttgttggtgggttgaaaccactacaaataggtcaagttaccaatcttgccttctttatctatctattatgtagtccaatagctatttttcttgcacggcgtttagagccacgattaatgatgttaataggtattatgattattggaggagcatgtttaatcggtcatcaaattgattatcagtggcgagctaatgatttctttattgtcatatctatgcaagcaatgggggaatgtttgctacttatcgggttactaatatcaagccacaagaagcgttacatttag

SEQ ID NO: 317058 - DNA, 834 bp, Proteus mirabilis
  misc_feature (794)..(803): n is a, c, g, or t
gtgattaaattattatcagcagcacaaaatcatcgtcctatttttgttgttatggctgtttttaccggggctattttatcaacactttttgtacgtatgttttctatctcgttagcggattttagaggcgtgtttggtttagatgttgcccaaggatcttggttgaatgtggctcttaatatagctcaattgatcagtatgactcttgtaccttggtttatggtggtttatggcgctgaaaaaatattaatcagtgcgagttttatccttttttgttgtggattagcggttcccataataggacaacagattggttttggcggactttttattgctcattttatgattggattttgtatcggagtctatttgccgatgacgatttcattagccttaaaaagtttaaatcccagtgtttggctaatcgttatggcggcttatagcttacgtgtttctgtaggaatggatgcgggagtggggatctcaggagaatttgttgacatattgaattggcgttggatttattggttatccgctattttcaccttagtcatcctattttttacctggtggggaatgccactctcacctattaataaagcattgctcgctcaaagtgattggggaggaatggcgcttaaatgcttaggattaacgctattatatattggtgtcgttcaaggtgaattgttaggttggtgggattctgggctggtcgtgtcttgcttaatcggtagcgctatactgatggggacatttattattagagcttatatttataaacaaagctttgnnnnnnnnnngctttggccacttaaattggatcaaagatag

SEQ ID NO: 317059 - DNA, 126 bp, Proteus mirabilis
atgtcggataaaatgatagcagcagccaaagattttgcaaagggaaaaagaaccacttttccaatcatgacagtcaaagaattactttttttcttcaacaaatacgtaaagaaagtgaattgttaa

SEQ ID NO: 317060 - DNA, 687 bp, Proteus mirabilis; identical to SEQ ID NO: 313177

SEQ ID NO: 317061 - DNA, 936 bp, Proteus mirabilis
atgctaaccaatatgcaaggtatcgatttagataattggcaacaagcgctacaagcagctaaagagccttttagctttagtcagcttattcgcttagaaaaagagtaccacttcctcaatcctgtgattgttgattgcacttcaaacgaaatgattgcacagcaatacgccaatttcttacaaaatggctttaatgttgttacgcctaataagaaagccaatacgatgtcgatggattactatcatcaaattcgccaatcagcggaagcatcacgtcgtaaattcttatatgacactaatgttggtgcgggtttacctgttattgaaaacttacagaacttgcttaatgctggcgatgagttggtgcaatttaatggtattctttctggctcactctcttatatttttggtcagctagatgaaggaaaaagcttgtctgaagcgacactttctgcgaaagaaaaaggctttacagagccagatccaagagatgatctctcgggaatggatgttgcacgtaaactgcttattctcgctcgtgaagcgggctatcaattagagttgagtgatattgatgtagagcctgttttacctagctcatttgatagtacaggtgatgtcgagagtttcttaaaccgcttacctcaagtagatgttgagtttgatgctaaagtcgaagaagcccaaaagtcagcgaaggtattacgttatgtggggatcatcaatgaagggaaatgtcaagttaaaataatggccgttgatgctaacgatcctctctttaaagtaaaaaatggtgaaaatgcgctagctttctacactcgctactatcaaccaattcctttagttttacgtggatatggtgcaggaaatgatgtcactgctgctggggtatttgcagatgtattacgtacactatcatggaaattaggagtttaa

SEQ ID NO: 317062 - DNA, 207 bp, Proteus mirabilis
atgatttttcaatatattgtcgcgcttttttaccatcaaaaggagctactttatcttgcagtaacgccaactgatcagcgatatgaggaggaaaaagatcacgtcgagtcgataacatttgacccagttttatccaaacaggccctaatgtttgtaatgcaagtcgtaagcgctcacctaatggtttatcggcatgctgatttttga

SEQ ID NO: 317063 - DNA, 639 bp, Proteus mirabilis
  misc_feature (623)..(632): n is a, c, g, or t
atgactcgatatgaacagcttgcggcacagatacgccaacaaattgaagataatatttggcaatcaggcgatcgtttaccctcattacgggatacggttaaacaatcaggtttaagtttaatgaccgttttacaatcttatcaactgttagaaagtcaagggtggatcaccgctcgtccgcaatcaggttattatgttgcacatcgcaatacaggttttgctcaagtaactgccagcaaagggctacatatgagtgaaaatgttgagataagcgcctctatattcaatgttcttcaagcctgtaaagatcccaatatcattccgttcggttccgcctttccagatcccagtttattcattcaacctaaattaagccgagcattagcctctgccgctagacatttagcccctcaaagttcagtgattaatttacctcctggtaatgaaaaactacgtcgtaatatagcccaacgctatgcactgcaaggtattcatgtatcgcctgacgatattgtgatcaccgcaggtgcgatggaatcattaagttttagtttacaagctgttactgagccaggagattgggttgtcatagaatctcctgctttttatggcgcattacaggnnnnnnnnnnacattaa

SEQ ID NO: 317064 - DNA, 1704 bp, Proteus mirabilis
gtgttgaaatttaaggtagattacaatgatgttcgtccacagtttaaattgatagaaaccgaaacggacgagaaaaagctcagtgcagccgaaaacaaacatgctctacttcatcctatgcggatcagtgaaattactcattacatcctgaaaaactttcgtaaaaaaacacatcgtgctttttctggagcaaagggatttaatgctatgtttgccgttagcagtgtagatgcagcaaaagcctattatgagacttttaaacatctccaacaggctgctattgagcaagataatcattataaaccactcaaagtggccaccatcttttctttcgctgccaatgaggagcaagatgctatcggtgatattaatgatgagagttttgatgttactgcgatgaacagcagttcacgggaatttttagaatcagcgattgcggattataacgctcaatttaaaaccaacttcagcaccgatggaaatagctttcaaaactactatcgagatcttgcaaagcgggttaaagcacaagaagttgacttactcatcgttgtaggtatgtttttgaccggctttgatgcgccaacactcaataccttatttgtagacaaaaacctacgctatcacggattaatgcaagcattttctcgtaccaatcgaatttacaatgccacaaagacctttggtaatattgtcacctttcgtgatttagagcaggctaccgtcgatgcaattactctgtttggaaaaagtaataccaaaagcgttgtaatggaaaaaagctacaccgagtatatggaaggttttacggatagcctaacaggtgaaacacgacgtggttttatggatattgtaggtgaactagaaaatcgtttccccaaccctgctgatattgaatccgagaaagagaaaaaggccttcgtcaaactatttggagaatatttacgtgctgaaagtgttctgcaaaactatgatgaatttacctcattaaaggccttacaaactattaatcttaatgatcctgatgcagtaaaagcctttaaaaccgaacattatttggatgatgagaaattcgcagaacttcaaataatacgtttacccgcagatcgcaagatccaagattatcgctcaagttataatgatatccgtgaatggcaacgccgtgaacgtgatgctaatgctaaagacaaaaataccgttgactgggatgatgtcgtttttgaggtagatttgctgaaatcacaggaaattaacctcgattatattttagggttaatttatgactacaacaaaaacaatacagacaaagaaacgctcaaagaggaagttaaacgtttgatccgtgccagtttaggcaaccgagcaaaagaaggattagtcgttgattttatcgaacaaacaaactttgatgatatagcagataaaacaagtatcattgaaacgttctatacctttgcacaacaagcccaacaacgtgaagcggatgcgttaatcaaagaggaaaatttgaacgaagccgctgcacgacgttatatcagtacctcattgagacgcgagtatgccactgaaaatggcacagaattaaatgagactctccccaaactcagtccgcttaatcctcagtataaaactaaaaaacaaactgtatttcaaaaagttgtagattttattgagaaatttaaaggggtgggtggggacgtataa

SEQ ID NO: 317065 - DNA, 216 bp, Proteus mirabilis; identical to SEQ ID NO: 315458

SEQ ID NO: 317066 - DNA, 2337 bp, Proteus mirabilis
  misc_feature (2294)..(2331): n is a, c, g, or t
atgaaaataatagcattaggtagtaaacagtataatcagcaagattgggaaaatttaagaataccttcattaaaaattcccagacatatgagagttatcagtaaaattggttacgctaatattagcttcggtatatggcaatcaatcaattcaacctttatgcttgctgagcaacttaataatccgctattaacccctcaagagcatagagagatcatcaataatcttgccataacatggtcagaaatggcctataatggcttatctgaactcattgaaatcgctttagctaaaggattattaaagtaccgtaataatcctttggagtatattagtaaaaccagcactcgaataggtatcgggcttaatatcctgtctattggatttgatatctataatatctacgataactttagtcgtatctcagtagaaaaaaatgaaaaacgacgtattgactatattgtaaatggctctttagctatagtctccggattggtcactttgggggtttctatcgcaatgcttgctggctctacggtcgcggggcctattggtattgtcgcgggagctgttatcgccttagccatttcaatttataatgccgcaagactgatagaagaagcgaaagaaaaaataggatttacaccactagaagaacttaataatggtttttctgcatttttaatgggggatatcttaccaagcaaaaagaatgaaatcgtctatttagagacaaaatcacagttagaaaccatgattgaccaaaatgcgcaagaacatcttaaagaaataaaaaaacaggagcttcacagttattatttttatacgaatgagaaacaactttatgaagaacatcattattataaagtgatccctcgtatattggggaaaacgttagataatatacttaatccgtttggagaaattgttgtacaacgagtggcgaaaaatttaagtaaagaagaagcagaaaagatagctgcgctttctcattatcttagtgtcgaaagaacggaatataaatactatgttcctaaaggagccatcgcaacagatgaaattctcatttttgatatggatttttatgttaatcaattaaatcgttatacgattaattttgcatttgaagatgataatcctgtttttgaggatgaggtggatatctctttttttgataaaataagaacaacaaaagaaaaaacatggcaaaatttatcatcaggagaattaacagatgatttaattaaatcaacagctgaaaaacaatattttgagccaagttggcgtgagaatgagctattttattttaatacttataatggggatgatattattgctgcaccattaataacacaaaatatatttgatgttcataatgggactaaacgattaagtggaggagaaaaagatgacacctttaatgtgttcacttctgaatctcctcgttatgccagccgtttttatggtagagaaggtaatgatacattacgtattattcagacagaaaaaaaatatatagggtatgaagttaatctatctaaaaattatattaaatttatcgggggagaaaataaatccaatagccagagttttcatgccagactttttatctttcaagagcaaggacaaatctatacccataaattagcggatacaatgcctaatataacactacaaagacaacccgttattgcctatttagagagtattgaaaatgtagtaggcagtgaaataggtaatgatattatttatggtgaccaaaaaaataactatttaaatggcatgggaggggtagattcattatatggattagctggagatgatacgctggtattacgggaaggttatgcacaaggaggggcagggaatgatagttatacgattctaagagcatcaaatacagataataatgttaaacaacttgaaactattattgatgaagagacgcatacagaagctagtcttatccagttaaattatacttttgatgaaattgctgctatttctcgtcgtgaaacagatattgtttttacgcttaaagttggtaatgataaagatcctgatcaatttatcgagcatttaattgcattaagtcatgtataccaagataaaaatagtcaattattagcccatcgatataccattgtgactatggatggttttatacttactattaatgaaaataataatcaaccaagagaggtatcatatgactttagttatttagaaaagtataatcagcaagagaagctgcaacagctttctgttaatgacgataaacacacattgtctannnnnnnnnnnnnnnnnnnnnnnnnnnnnnnnnnnnnnaactaa

SEQ ID NO: 317067 - DNA, 129 bp, Proteus mirabilis
atgatgataattaaaactaatatcagagtaaaaacggggaaaggaaacgcaagaaaagggggtatagaaagcatttttttctcaacaaaagctgagggtaaactcctttttgttggtataataatataa

SEQ ID NO: 317068 - DNA, 579 bp, Proteus mirabilis
atgtcagctcaatttattactcttatggtagcaatagttgcaggagcagtgtccattgttggccttgtaatcaataaagaaaataaagtttctgagtttagacaagtttggattaacgagttaagaaaaaatcttgtatcaataatcacgattatctatcaaataaaaacaattagaccatctaaaataagagataaagaaacggttatttcgcatgaagaaaaattggaaaaattaaaagagcaactaacaagaacaaaatatgagataacacttagaatacacaaagaaaacatgactaatgatgaggaaatgttaataaaatatctcaattcaatatgtaccaaggcattagaaggaataaaaaatgatgacgatattgataatttcataaatcattcatcaacagtactcaaaacagagtgggaaaaagtaaaaaaaggcgagaaaaaatatattttctggtcacgaattttctccaccttatttgctatagttctcttttcaatagttttttacgcagcatataaaataccagaaatgaaagaaatgtattttaaaatattagaaaatttttaa

SEQ ID NO: 317069 - DNA, 225 bp, Proteus mirabilis
  misc_feature (192)..(201): n is a, c, g, or t
atggttaagaatgtgttgaaaatctcaacattagcaatgttggtcgcattcaatgttaatgctgcgacagtcgatctccgtattatggagacttcggatgttcacagtaacttaatcgactttgactacttcaaagacaaaccaacagaacagtttggttatgttcgtacggcgaatttaattaaagccgcnnnnnnnnnnatcatgaatttaactatggtttag

SEQ ID NO: 317070 - DNA, 498 bp, Proteus mirabilis
atgatactttggctgatctcttttggcttaatttcaggtattactacatggttatttggttttggcggtggttttgttactgtgcccctactctatactctgattcttacactttgggcaggtgatagcttagcgggtgaacatgctatgcaaattgctgtggctacctctgcgctcattatgctgttttccgctattattacgaccctaaaacaccataaggcgaaaaaaatagattggaaattaattatgatcttattttgggggattgcattcggtgggatcttcggtgccttacttgcctcatccgtccaaggtgaatggatccgatggatctatcttagattgctattttcgccccggatttatggcgccacgcaaagaaatacaaaaagtaaccaacaaaaaagaagcgttaactggcactattattggcattattgcagcttttttaggtgtaggtggaagtgttatgaccgtacctttattacgccgtag

SEQ ID NO: 317071 - DNA, 162 bp, Proteus mirabilis; identical to SEQ ID NO: 305733

SEQ ID NO: 317072 - DNA, 408 bp, Proteus mirabilis
atgcaagcgggaaaagctgaccgtaatgatattgcctatggtgaaatcactaaaggactaaaaatattagcaaaagagcttaatacggtggttgtgttgcttgtacaactgaatcgaggattagaaaacagggctgacaaacgtcccgtaccaagtgattcaagagacacaggacaaatcgagcaagattgtgattattggttaggcatttatcgtgatgcggtgtaccacgataatgcggatgaaacgctgaccgagatgattttaaggctcaatcgacacggtaaaacaggcaccgtgtatgttgatcaacaagcattgagtattacaccggttgatcaatatatggctgcttatcgcgctcaaccgaaacgagagcctaaaaggtattgtgaaaaatcgttttaa

SEQ ID NO: 317073 - DNA, 1089 bp, Proteus mirabilis
atgagttatacaaaacggttgtcacttatttgtgctatctgtttaggcacatttatggccactcttgatattagtatcgtcaatgttgctctacctactattcagaatgatattaatgccaatatggctacattacagtggattgtggatgcttatgcactatgtctatcagcttgtattttgtcttccgggccattaagtgatcgtttcggacgaaaaaaagtgtggctctggggggtgattattttcactctaggctcccttatctgtgctattgcacaacaacatgaaatattaatccttgggcgtattatccaaggtattgcagctgcagcccttattcctggcgcattatcacttattacacatgcctttcctgttgatattgaacgtatccgtattattggtatttggtcttcggttagtgcattatcgctgattattggccctatccttggtggtgcattagttcatgccagtggttgggcaagtatatttcttattaatattcctattggtgctattacagtattactaggctggtatggattaagtgaaagtgccgatcctgaggatgttgcgttagatcccctaggacaattaaccagtatcttgggattaggtttactaacctatggttttattgaagcaggctctgtaggttggtctgattatcgtactgtattcgcattaattgtcggtctgatttttattaccctgtttgttatagtcgaaaaacgtattgaacgcccattattaccgctatcgttatttaaagatcgctcgtttttccaatataacctttcctcttttactttgggatttgccacttatagtaatgtcttttttattgcttttttcctacaaaaagcacaaggctggagtgcattagaaacaggtttaagaatggctcctgagtttatcgccatggcccttttttctatgttatttggacggttctctcgttatatatctgtcagaaaattaatgatctttggctttttgttgattgcaatatcttcttgtttattggcaacattagcaacaaatagctcttacacaataacaggaagctatttatttatctaa

SEQ ID NO: 317074 - DNA, 522 bp, Proteus mirabilis
atgaaaatggctgaacgcttccatttaccagtgattatttttattgactccgcgggtgcttatccgggggttggtgctgaagagcgggggcaatcagaagccatagcacgaaatattcttgaaatgtcccgattaaaaacaccgataatttgtacaataacaggggaaggtttttctggtggtgcattagcaataggtgtgggggatcgagtaaatatgttgcaatatagtacttatgctgccatatcgcccgaaggctgtgcctctatcttatggaaaaatgctgataaagcgcctattgccgcccaaaccatgggaatgacggcacctaaattacaggcattgggtattatagactcaattattcctgaaccattgggaggcgcacatcgccactaccagcaagcggctgaatttgtaaaaaaacagcttctcgcagatttaacagaattgaatcgttattctaaagaagaactgcttgagaaacgttatcaaaaattaatgtcctatggttattgttaa

SEQ ID NO: 317075 - DNA, 504 bp, Proteus mirabilis
  misc_feature (451)..(460): n is a, c, g, or t
atggctgtttttaccggggctattttatcaacactctttgtacgtatgttttctatctcgttagcggatttaagaggcgtgtttggtttagatgttgcccaaggatcttggttgaatgtggctcttaatatagctcaattgatcagtatgactcttgtaccttggtttatggtggtttatggcgcagaaaaaatattaatcagtgcgagttttatccttttttgttgtggattagcggttcccataataggacaacagattggttttggcggactttttattgctcattttatgattggattttgtatcggagtttatttgccgatgacgatttcattagccttaaaaagtttaaatcccagtgtttggctaatcgttatggcggcttatagcttacgtgtttctgtaggaatggatgcgggagtggggatctcaggagaatttgttgacnnnnnnnnnngaattggcgttggatttattggttatccgctattttcaccttag

SEQ ID NO: 317076 - DNA, 306 bp, Proteus mirabilis
ttgccagaacaatggcgctcaattgatgtattagtcaataatgcaggactcgctttagggttaagtaccgctgataaagccaatcttgatgattgggatactatgatcgaaactaataataaaggtttagtgcatgtcactcgtgcattactaccctcaatggttgaacgcaatgtcgggcatattattaatatcagctcaacagcggcttcttggccttatatggggggaaatgtgtatggtgcaaccaaagcctttgttaagcaatttagcctaggcttacgtgcggaacagagttctcattag

SEQ ID NO: 317077 - DNA, 441 bp, Proteus mirabilis
atgatgttaataggtattatgattattggaggtgcatgtttaatcggtcatcaaattgattatcagtggcgagctaatgatttctttattgtcatatctatgcaagcaataggggaatgtttgctacttatcggattaattgcatcatttgttactaatatcaagccacaagaagcgttacatttaggggcatatatttcgatagcgagagtcttaatgccagcccttgcaggagctattatcaatacttatttgaggatctcatatgatactcattatgatttgttaagaggatacatacaaactggtgagcaaaaacatgtagcctcttttattgatggttttgatttgattatgctcttggttattttaggtgctctttgtatgtcatttttaaaatcgtcaccagaaaatccggtagtcccaaggctagtaaaataa

SEQ ID NO: 317078 - DNA, 174 bp, Proteus mirabilis
atggaaggcattgtcacacgagatgctcaagcattttcattagatgaattttcacatcgggtgtttaaatatgtgagaaaagatcatgttaaaacagatgtgcattggaaacgtaattggaaaagagcgccactgatttgggaaaaaacacaggagtctcatgatgcttcataa

SEQ ID NO: 317079 - DNA, 1014 bp, Proteus mirabilis
atgacgagtaagtcgggaaatcaacctcacacagatgaggcgcctgcaacgcttttggcagatacccatgatcaattaagccagcaatctattgatgaacaagctgcgctttggttcacccgtcaacatagtcagcaaatgagttcacagcaacgacaagcctttaaacagtgggtagcagataaagataatcaacaagcttatcaagctatcgcggaaatttggcatagttgtgaagccttaccacgccctactattgtgcctatagaaaaaaggaaatcttcactctggcgcccctttattcacactacagccgcactctgtttagttgctgtgttatatcttccttatagtcatttacctgccctgttaatggataatatgaccttagccaccagcaattttcctaaagagatgaccctcgcagatggctctaaagtttttttaaatagaaatacacaggtacgcgtctcgtatgtccaaacccaaagacgcctttggttagataaaggtgaggcttattttaaagtaaaacccaatccttatcggccattttatgtccatgctgatgagcgattaattaaagttgtcggtactgaatttgaagtgagtcgttatcaaaataatcaaattagtgtcgccgtacatgagggcattgttgaagttaaagccacagaaaaatcccctgcgacttacctatatgctggctctcaagcaattagccaatcaactgataatcaatttgtcatttcctcagtcaatgctgattctgtaggaagctggcgttttgggcaactccatttctttgaacaaccacttggtgacgtgatcactaaattaaaaccttatctggatatcaacgttcatatctcatcagccgatgtagccaaaataaaggtatcaggtgtggcaaatattaatgacgcgaaaagctttattactgcacttccgctacttttaccggttaatgttatttttactgataaaaataatgtgttaattatcaataagtaa

SEQ ID NO: 317080 - DNA, 678 bp, Proteus mirabilis; identical to SEQ ID NO: 315430

SEQ ID NO: 317081 - DNA, 399 bp, Proteus mirabilis
ttgcctgattacttacctacttatcttgagtatttaacgctattgcctaccgatgaaagtattgaagggcttaataatattgcccctattttggcattgctgagtgagcgtttaaaacagcgaggcagtgattatcacgctctttttgatgtattgctttgtctctcacaaagtgagttagacgcttcacaactggcggctcaagtagaaaaagagcctgtagatgatacgccggctgcattagatgctgtatgggaagaagagcaagtgacgtttctaggtgaaagtgcgcaatgtggtagtaacaatattagccagcatcagcgacgttttgcgcaagaaacgcctgttcaatatctcaacgtcggtaattcgctggatatgggagcacaaaaatga

SEQ ID NO: 317082 - DNA, 609 bp, Proteus mirabilis
atgtctaactcaataaactttcgcttacttttatgggccacctcaattattcaaccagcagccccatctgagatattatattacttgagattaatattaacagatgatggagcattacctaacattgattcattaaaacagcaccttaaagaattacataaaattggctatgtggaattagtttccattaaaaacgagctgtattctataactccctctggcgatgaaaaactttcagcaaatttaaaaaaactaagagacaagttgcgcattttccttcttgacaaatgccataaatccactaaattgggtgtgctagcctctactgatacaaagaatatggacggcgcaccgccgtctttgcagttaaggccttacataaaagaggttccgcacccaagcctgtcttgggcgtccgggaccttgcccagccgcccaagacaggcttgggtgcggatctttgagcaattacgaattggttcaatgtccagtagtcaggctagcatcctttcaaaagatagtgacagcctaattcccgaaaaaaaaaattatcgcagctccaattttctattcttacaagtcactaaacagtccccttttcgaaaataa

SEQ ID NO: 317083 - DNA, 423 bp, Proteus mirabilis
atgttgtttatagagaatattaaaaatataacagaaatatataatatagataagaaaaaatcagttgattgcgaggtgaaatttcaatgttttgatgagtatttaccctacacagcatcaattaatgatagtgaagagttggggcgaaatatttatagactttgcctatcaggcaaatatggaaaaatatatcctccaaaattaccaactagagatgatgaagtagttaatttaagagaaaaaagaaaaatattattattagaatcaaatgaaataatagagccttttaaagatgcaaaggaaggtggatatataaataaagaagatattgataaactagaaaggtggaaaaagtatcgttatcaactaactaaagtcaatgttgaagatgaaaatttagaatggccatcaaagcctgagtaa

SEQ ID NO: 317084 - DNA, 1005 bp, Proteus mirabilis
atgttaaatactctgattgtaggagcaagtggttacaccggtgctgaattagcagcctatcttcagcagcatccccatgtgaatttgagcagactgatggtatccgctcaaagtgtagatgcagggaagtgcttttctgagctttacccacaatatcgtggcttagttgatttgccacttgagcctatggtcgatgtagctcatgccgctgaaaatatcgatatcgtttttttagccaccgcacatgaagtcagtcacgacattgcccctatttttctcgcacaagggtgtatggtgttcgatttatccggtgcctaccgagtacaaaataagcatttctaccaacaatactatggattcgagcataagaatactgattggttatcacaggcggtttatggtcttgctgaatggaacgctgatcagattagtcaggctcaagtcattgctgtgccgggttgttatcccaccgtttctcagctgtcgttaaagccattagttgaagctggattattagacagcgctcactggcctgttatcaatgctaccagtggtgtaagtggcgcaggcagaaaagcgtctttaacaaatagcttttgtgaagtgagtttacaaccttacggcgtttttacgcatcgtcatcaaccggaaattgctgctcaccttggcattgatgtcatttttacgcctcatcttggtaattttgctagggggatcttagccactatcacctgtaagttaaaacaaggtgtcacagaaaatgaggtaaggcaggcatttgaaaccgcgtatcaagacaaaccgttggtgcgtgtatatgacaaaggtctacctgcattaaaagccgttgtcggtaccgccttttgtgatatcggtttagcacaacaaggtgaacatttaattattgttggtgcggaagataacttattaaaaggggccgcagcacaagcggtgcaatgtatgaacattcggttcggttttgcaccaaccgaaacacttatttaa

SEQ ID NO: 317085 - DNA, 288 bp, Proteus mirabilis
atgaaaataatactccgcacttttatatttctatattttatttttttattaatattgattaatattctttctatatctgactatgaatggatgattggtgaaggtgatattgataatctttgtcaactgccactcaatggtagatatgttattgagcctatattgatattaataccttgtattttattactttttttagaaaaaaataaaaagctaagatggggttatgttacaatcactgttatgtatatcatatggtcattttatttacgttttaatttttgctaa

SEQ ID NO: 317086 - DNA, 711 bp, Proteus mirabilis
atgacaccagagagatttatggaagaggttgagcttgaacggctttggagggaagaggaagttcgttcaatgaataatattctaataaatcttaatgaagaaaatgataaaaatagattaaggagagctatagtttgtcttttatatgcacatgttgaagggtttgttaaatttattttcaatttatatattgatgcaataaataaattagatttaaagtgtcagcaagttaagcctattttagttgcagcggtttatcatgaagatttcaaaaaactaacaagcccagatgcgaagagtaaattatttactaagcaagcacaaaatgactctcatattagaagattatctttacaggctgagttttttgaaaaaattaatgagtattttcaatcaaaaattaaaatttctgaaggttatataaatactgaaagtaatgtaggtcgagaggttcttgaaaaactattatatcaagttggtttatcgcataaagaactcgaaagtacaataaagccattatcaaaattaaaaaataaaagaaatggaatttctcatggtatagacaaaatgcccgttgatgaagaaagttataacgaattcttcaagtgtactttaagtataatagatgatttatcgaaaacgttatatagagcatactctgaaaaagagtttttgataaaagaaaatctgaaagtatcccccgatagttga

SEQ ID NO: 317087 - DNA, 1080 bp, Proteus mirabilis
atggtctggtctgttcattatttgcgtggtatcgcagctttatttgttgttttttatcacacaagatcctatttaaatcatatctatgcagagtctaaattaggggatatgttttttggatgggggtattttggggttgatattttcttcatgattagtgggtttgttatcatgctttcaactgagaatgaaaaatccaaagtatcattccctataaagcgtttcttcagaatataccccctttattttgttgttttaatgttttttgtgattgatttttctttaaaaggcagcataccaactactaatattgtaaaatcaattttttttatacacttaaattatgatattaatgcgccattttttggatattctgttaatcttcctggttggactttaacgtatgaattaatgttttacggagtattttttattgcattgtgcatatcccataaatatagatcttttatttgttcaggactaataattgtcatttatttcaccattaatttaaacttcagtcacttggagtttaatgcttattcttcagttaactataatggtcgttataccccaataattaaaatattatcatctcctatgatgtgggagtttattattggaatgatgttgttttacatttactcttttcttaaaaaatacaattatttgctacgcagtagtaacgtattaattattaatactataatttttatattttcaatttcattaataatatctcctataaaatatggtcatggtttacttaacgttggagtcgggtgttttttactattattaacatgtattatttatgaattatctggacgattgaagaaaagcgctctgttatcatttttcggtgatatatcatattctctatatatatctcatgcatttaccataatgatattaacaacaaataaagaattattttcatatgttaatcaattaagaggatttaacaagcaattgatagttctaacaatagtaatcgcatttgcttttattttacataaagcaattgaaatcccattagtttcttttggaaagtcatttttaaaaaaagtacaacgatga

SEQ ID NO: 317088 - DNA, 1089 bp, Proteus mirabilis
atgaaaagcgatacaattaccaataacaataaaaaaacaatactatcagtgcaatatttaagagggatagcctcaatattggttgtattctatcacaccaattggtttttagatggagtttatgctcaagaaaatctagggaagttgttatttaaaactggtgcttttggtgttgatttattttttataattagtgggtttattatatgtttatctacggaaaaaaaagaaaagcatggagtttataacttttttattcggagattgtttagaatatatccattattgataatatcagttattttattttattttataataaagccagacagctctcttgagttactattgaaatcaatagttcccatgcattctgattacacggcaggtagcccattttttggattcaacttactagattcagcttggacgattacatacgagatatcattctatattatatttgctatttgtatttttatatcacataaatatagaggcttattatctatatttatcctgctgattgcttttatatcctcatcttatttctttaacggatctatatcattagatgcatactttaaatctgataactcactgaactacaatgttttttctttattttattcatcaatgtttttagatttcacttatggtgtgattatatatatctgctataaacatatttcattaaaatttaatatatttttaaaatcatttccttacattatgttgctattgatatgcttgatattatcacaattagatttattttatggtcatggccctttaaagtggggtttaattagtgcttttattgttttctcttgtgttatgtatgaaaaatcatgcggtataaaatatagagatgcgcttaaatatttgggtgatatatcttattctatatatatagttcatattctggttcttgagtgtatatatagatttgatactcacctatatccaaatacatcaggattaacaaggatgctcatcgttttctcaattgttatcatagtatctatagcgttacatgaattggtagagaaaaaattcataagcattggtaaaaaactattaaaataa

SEQ ID NO: 317089 - DNA, 285 bp, Proteus mirabilis
atgaatgatgagatactggagttggttgagggtctagaggtaattgctaatgtattaatcaaggatggtcagacacataaacagattgatttaaaaacactggttaaactatgtaagtatattaagaaaataaacaacctacagcctgtcgcttggatgtaccctgtgtttcatgatgataaaatgcaattcactaccgatgcgattacatctgaaaatatcgatattcattttcaatctcatggttcatcatttaaagttaccccgctatataaattagattaa

SEQ ID NO: 317090 - DNA, 174 bp, Proteus mirabilis
atgagtaagcagatggttttagttgcaagaacaaataaggttgtctctgactctgaatgtgggttgggtattactgaggacgaatgggataaattaaccgaagaagaacaatcaggatatatcaatactgcaattgataatcttgttgattggtatgtgaagccagaaggctga

SEQ ID NO: 317091 - DNA, 669 bp, Proteus mirabilis; identical to SEQ ID NO: 314657

SEQ ID NO: 317092 - DNA, 1206 bp, Proteus mirabilis
gtgatttttaagaatataaatagccctaagaggggtagtgaaaatgaaagaagagccagttggtataattattatgctggtttttctcatacatttgtcagaaatttaataaatgagctgcatttatcaaaagactcagtcattttagatccatggaatggttctggtgcaaccacatatgcagctagtattgagggttatcaatcagttggaagtgatttaaaccctccaatgtatgttattgctaagtctaaaatggcagataaaaacgatgtgataaatgcactggttaaaataaaaaaaatgagagtcaatgtattctcatgtacttttgattcagatgattatttaaataattggtttgtttatcaaactgctagttatattagatatatagattttttcatctgtaaaaagacgaacgttgatataaatacaaagttacatctgcttagtaaagttgattgtttattatatgtagcattatttaatactgttagattattgataaaatcatttgtttcttcaaatccaacatggataaaaaaagcaaaggaatctaataataagataaaggttgataatagatttattaaacaaaatatcattaatttacttaatgaaaaattagatattgatgatttccctttaactcttaaagataaatctatagatattgttataacatctccaccttattgtactcgaattgattatggtatagctacttcaccggagtcagctgtattatatggtaataatcctattcagatagaagaaatgcgacgtagattaatgggaagaactacgattgataaaacattctatgatggagtatcttttagtagtacaacagatgagtttttatcatccatatataagcataaatcaagggcttcgaacacctattactataagaatttttatcaatactttattgatcttaagttatcattaattgaaattaatcgagttcttaagagtaatggttattttgtatgtgttgtgcaagattcatattataaagaaattcattgtgatttatctcagatcctgaccgaattacttgatagtaatggatttaaattactacaaaaaaaagagtttgaatctacagttaatatggctaacctaaataataaatcaaaggcttatcgagataaaatagaagctaccgaatatgtgttaatcttttcgcgaggatag

SEQ ID NO: 317093 - DNA, 840 bp, Proteus mirabilis
atgaattatagtataaaatatcaatataaaaatgaaaaatattataatgacaatcatttttctttaaattttaatattccactaacaaatagctcgcaatcctatcattgggtaagcaatcaatttgattatcatccaaacaatcaaggttatataaatagtacgactataggtggaagtttattagaacactatcgcttaggctattctattaattaccgacgggattttagccacccaaatgctggctatcatacttcagtaaatactcagtataaggggagatatcaatcttattctattaatgcaaataaatcatctaataataaaaccaatttaagattggggattgatggtgcgatagtgttacatcaaagtggaataactttggcacctgatttaggtaatacttttgctattgtaaatactaatggcattgccggaattaaaactaatcgttcttcacaaaccactacagacaataacggtaatttaatattaccgcacatcatgccatatcgtaaaaatactattggactaaacataaattcgttacctgaatttagtaatactaaaactcaaagtaaaatcatcgtacccactttaggtgcggtagcaaaaatcaatttccctataaatatcggctataatgttttatttacctcaaatacaccaattccttttgctgccaatgtaatggcatttgatgataataataatctcatttctagtgattctgtctatgaccacaatagaatattcctctccggaataaaagaaagcggaacggtacaagtactgtctcttatacacatctccgagcccacgagaccgtactag

SEQ ID NO: 317094 - DNA, 216 bp, Proteus mirabilis; identical to SEQ ID NO: 304163

SEQ ID NO: 317095 - DNA, 459 bp, Proteus mirabilis
ttggcgggcgggttaaatctgtatgcctatgcgccgaatgcgttgacatgggtggatccgtggggttgggctgaatttgatgttgatagttatgaaaatttgagagcagcagtaaaaggtggaaatactggtttagatgcccatcacgctggtcaaaaagcaataatggtggatcttatttcaggatatgaccctaaaacagctccagctattctagtttctaaatcagggcatacagtatcaaaagagggagtaggtattgtttcacgcagtaaaataaattcctcgacaggtttgccgtttaaaaatgcccgagaattattggcaagggatattagggagttacgacgtgtatactcagatattcctaatagcgctcttaaagaactgatcgcaaaaaataaagaaatgtaccctgagatgagaaaaacaaataatacgacgataaagggatgttag

SEQ ID NO: 317096 - DNA, 444 bp, Proteus mirabilis
gtggatccgtggggttggagttgtggtcctaaattaaaaactgaagcagattataaaaaggctattcaaaatttagaatcgcagcatggtgctttaaatgctcatggattaagaagacatggagcggggacaaccttagagcaacaacaatatagagccagaacaggtaactcacctgataatcattatacaatagttcttgatagaaaaacgttaggaagaagcgcaccttcatccacaagatttctgagttataaagatcaatatgacgctatttcgcaagtacttaaatatgctggctcgaataaagcaattgatatagatatgggacgtatagttgcagaaggatatcaaagtggtggaagaatatatggttcaacatcaaaaataagagcttattttgatgtaaatggaagattaattacaatatttggaatcttataa

SEQ ID NO: 317097 - DNA, 303 bp, Proteus mirabilis
atgagaattatcgcactatcaaccttaaaaacattttgggaagacagcccagaatacattgacgcgaaagagccaactttagcgtggtataggcatgcattaaacgctgattggggatcaccggcggatgtgaaacaggactttagaaatgccagcatcctcaaagatgggcgtgtcgtgtttaacattgccggtaataaataccggttagttgtttggatcaattatggctacaaggtggtttacatacggtttatcggcagccatgcgcaatacgataaaattgatgtgcaaacgatttga

SEQ ID NO: 317098 - DNA, 372 bp, Proteus mirabilis
atggacatcagacctattaaaacagatgccgactaccgcgcggcattaaacgatatcgaaaacctaatgatggcggagcctgataccgtcgaaggcgaaaagctggacattttggttacgttagttgaagcctacgaagcaaagcatttcccaatggatttgccagaccctgttgaggcaataaagtttgagatggagcgcaaaggcttaacggttaaagatcttgaacccatgataggtaaaagcaatcgtgtttatgaaatcctaaaccataagcggtcactcacgctaaaaatgatttggaaacttcatgaagggctaggtattccagcagagtcgctgatcaaaccgccgcaagttcgcgcgtcatag

SEQ ID NO: 317099 - DNA, 2409 bp, Proteus mirabilis
atgaatgacgctcgctacccaaacatttctgctattgataacaggctagctgagcttgaaaacgaaaagcagcagcttctcgcattaagagaggctttgcgtagcgctcaaaacgagcgttcagtacagacattcacgccagaacaaaaggtcgccctattcagacaacgatttcgtggacgagaggatatctttgccaatcgttggcaaaatcaacagggccgcagtggctattccgtagcctgtgataatgaatgggtaaacggggtttgcaacaaaccccgcattaaatgccaagactgttcacaccgcaagtttagcgaactaaacgagcgcattatttacaggcaccttgccggtcatcaagtggtggggctgtatcccttactgaaagataatacgtgctatttgttggcagccgattttgacaaaggctgttggcaagaagaagtcaaagcaatgtctaaagcgtgccaagagtttgatattccgcacgcgatagaaatctcgcgctctggcaacggggcacacttatggatcttttttgacaccaatatccccgctaaccaagctcgggcactgggtttcgctttgcttgataaagccatggaaatatttccaaatctttcgtttgactcctatgacaggctatttcctaaccaagatgtccttcctgaaggcggttttggtaatctcattgcgctaccacttcaaaaggaggctcgcctttcaggccgtagttgctttgttgacagtgacctgaatgcgattgacgatcaatggcagtaccttgctgagcttaaaacgctcacgcaatcgagtattgatcaactcataacaacaatttcacccaacatcctattactgtccgaacaagggctaacagataaccgcccaccttgggaaatcacagccaaagccacaccaataaaattagagtctttgccgaaaaacgtgactattaccttggccaaccatatctactttttgatgagcgagttacctggatcactactggcaggactaaagcgattagctagtttttctaatcctgtgttttttaaaacacaagcgttgcgcttttcaacccatggcattccaaggtttatttcctgtgctcgtattgaaaacggttatctagcactaccgcgaggctgtctcgatgacgcgattgctttgctacaagagcacaatatttcgccactgtttgacgataagcgtgaaaccggcaaaccattattaaaacttacccctgagttcactttgcgaaagaaccagcgagacgcagtggccgcaatatctaaacatgacttcggtattttgcatgcgccgaccgcatttggaaaaacggttactgccattggcatgatcgtaaaacgcaaagtaaataccctaatactggttcatagccgacaactgcttgagcagtggcaagagcgattacgcacgttcctaccagaagtaaccattggcagtataggcgggggtaaaagaaagccgagtggcattatcgacattgccacctaccaaagcttggttaataaaaaagacaactccatcacgcctctcatccaagactacggccacattattgttgatgaatgccaccatctgtctgcgccaaggtttgaaatggtactcaacgaggtaagagcaaaatatgtattgggcctaacagcaacgccagagcgacaagatggccatcagaagatcatttttatggcggcagggcccattcgctataaagtgaaacaaagccctgatgagcaatttactcaaaccgtaatgattcatcagttctacgatataccgccagctgagctaataaaaacagatgagcgcccaaaaataagcgatgcctatcgctggctcgccgataatggacagcgcacgtcaaaaatagtctcagacgcctctcagtgtgttcgaaatggcgggcacccgttagtccttacagagcgtagagagcacgcagagtacatacactcaaaacttaccaagatgggtataagcactgtcgtactcaaaggcgccatgaaagctgccgaacgcaagaacgctgacaatcatcttcaatcggctcaagttgtcgtcgcaacaggaaaatatgtaggcgaaggatttgacctgccaagactggatactttgtttttggctatgccaatcgcatggaaaggtacattggctcaatatgccggtcgtattcatcgtgaatcggaaggcaaaacacaagtcaccattcacgactatgtagactgcgccctccctatgctgcaacgcatgtttaaaaaacgcgagaaaagctacaaggctatggggtacgcccttgagtacattgatgacaacagtaacaagcaaccttcactgaagttagaaaacgtccctttatcaaataccaagccaaaataa

SEQ ID NO: 317100 - DNA, 3243 bp, Proteus mirabilis
atgacgctttcacaagagcacttactacaggtagatcagcattgggctgttcagtctattggcgctgatcggcgtgataaagctatggaaatggctgaacggcgcttggttgatgtggcgctgggtaatctacttgaacatgcggcaacggagtttgacagtgacttgttagagcaagtagcaacagcgtatgagttggccgcgatcgaaggcattggcgctttgttgcaccctgttgccaatcaggacaataaaaatattcgtgagcttgcacaagctggcgcgtttcgagcgttcgggctttatcgtgtattacccgtaccgagtgacaatgaggcgcgcttgtttcatgtgttgcatgtgtcgggtttggcgtattgcgccgatcgctggaccgatttacgtcgatggtttgaagagcagaacagtacagtagcagtacccagtgtggcaggtgttacttgggataagcgtctgctttaccgaatttttgattgttggttacgactactacgtaaaaaccgctgggacgacttagatcagatttcagagattgtacttggtttacgaaacgatcaagcgaactacgaaaaagcgttactagaacaaactcaaggtgcagaggcgcaaagcatagcaatgcgtttagtggcgctttatcactgggccaaagcaacagagcgtttggctgtgtacatgctgcaaggcgaaccggtagcgatcgatgcacaattagatcagcattttgaagcggcgcaaaaagcggcacaagcctctaaagacccgcagctcgaaatgattttacgctggttacatgtcgcaagccgaaaaatggtcgctggctctttatggtgggtggcgcatacggttaactcccgtgtgacccgctttgtttcccatgtgactaagcacaagagcttatttgaactgttaccgccgcaacgagcggcactgcaagagcaaggtttactcgatcaagccagtagagcggtaattgttgatttgcctacatccggcggtaaaaccgcgttggcacagttccgcatgttgcaagcgctgaatcagtttgatcaggatgatggttgggtggcctatgttgcgccaactcgcgctttggtttctcaaattacccgacgattacgtgaagattttggcccattaggtattcaagttgagccgttaactggcgcgattgaagtcgatgcttttgaagaagcgcttttgggtgaagcacgtgcttttcaggttttggttgcaacacctgagaaacttcagttggtgatgagaaacaaaaaagtcgctcgcccattggctctggttgtgatggatgaagctcacaatattgaagatgagtctcgtggcttacgtattgaacttctgcttgcaacgattaagcaagaatcaccgcgggcaaacttcttactattgatgccatttgtgccaaatgctaacgatttagctcaatggttagccgctgatcgtggccgaagcatcagtttgggcacctctgcttggcaaccgaatgagagaattgttggcttatttgatattcataaaggtgaaaaacgtggtgattggaagttaagttttgaaacgttgacgaccactcaacgaacgattcaccttaaaggaatccacaatgtagatggtaaccgccctctgcaaaacctgacgtactctagcgctaaggggctcgcaacacaggctgttgctatggctaaagtgttttctaagcgcggtaccagtattgctgtagcgcagacgattccagatgcttggagtattgctcgtaaagttgccgcagagcttgaaccttttgtgcaggtgcacgaagacattaaactggttcaacgttttcttgcggctgagattagtgaggactttgagctaattgatatgctgtcaaaaggtgttgttgtgcatcatgcaggcttacccgctgaggcgctttcattaatcgagtggcttacagaagctggccatattcgagtgatgtgtgcaacgacaaccattgcacaagggcttaactttcctgtttcatcagtttttcttgcgacgagaaaattgccttacggcaatgaaatgtcgcatcgggcattttggaacctcgcaggtcgggctgggcgtattggccatgatagcgtaggtgtaatcggtattgcagcaggtgcacagccgaatgagatccggaaatatgttagtgatgcaactgcatcgttagtttcccgcctggaaggaatgctggatgatcttcaagctgcgggggaattagcaaacttatcttgggttatgcagcaagaacaatgggcagacttcagaagctatatcgctcatttatggaatgaaaaacgtaacttggacgctgtaattggtgaagctgaacaattactgcgaaatacctacgggtttggttctcttcgcgctaaagctgataaagcctcgcaagagaaagctgatgcgcttcttgaggctaccaaagggtatgttagaaagttagctgagcatccagaaaatgcttctcttgctgatgttacaggcttctctcctgagggggttcgttcaactttattggatttgaataaccttgaaaacaagttaacgcttgcagattgggagccttcaagtctatttggcgataaatcgaagtctgtgctgccaagcttgatggggattatgctgcgggttccgcagttacaagaaagtttaaaagagattagtaaaggacaggggaatagtcatcgtaaacttgctgatattacccaggcttgggtaaccggtagctccattgaatctatagcgaagagttactttgaaggtgatagccttacagatcaaatatctaaagcttgcagagcggtttatagagatttggccaataatggcgcttgggggttgtcggcattaagcaaaatgccaacttcagggcttgattttgaagccatgacagacgaagaaaagcgcagattaaataacctcccagcgatgctttaccatggtgtgaaaaccgaagaaggcgtgttgatgcggatgaacagcgttccgcgtagtattgctgaacgtgccggtgaagactttaaggctcgaactgaagtcggtgcagaaaatactctgtcacctcgaaaagccagcgaatatctgaagtctttgaaaccggatgattgggcgcgtttgaaacctgataattcctcgctgtccggcgaagactatttgaaagtatggaaacggctttcaggtgaagcttaa

SEQ ID NO: 317101 - DNA, 798 bp, Proteus mirabilis
atgtctatgcctgcaccgacgcttgcttatgatgctggcactcagcctgtggttgctcatggcttgtcttatcaggacgagcaagtgagcgagatgttagctggccccgtaaagcatattttgcaagataccgcaggcaatgatgagctccaggagttacttggcagtgttgtgagcacggaatttgagcaagagggtttacgccaagcgctgatcgatgaaaccgtgccagataattggcgagtaggcgaagccattgccgaagcctttgtggcagataaaggcaattgcgtgtttccgtggcccacagggcgtgatcttaaaaacccgaacgccagcccagcagggtgcgatttgactggatttcaacctgtaaacgatgctgagcttccctaccgttttgcgtttggtgaagtaaaaacgtctgaagagaacaaagcgccgccaagcgtgatgaccagcttgggtacccaattgtttgggctacgagataatcgccaagtaaaagatgctctcttacgttatttaggactccatgcggtgcgagcaccttgggaaccgatgtttaaaagcgctgccaaacgctatttgagctcgaacacaacggacgttgctgtttatggtgttttggtgcgcgatattgccccaagcgcttctgatattgctggccgagcaaaagcactggcggccgattgcccagtgcaaactgatattgaaatgtacgctttataccttccccttaacatgattggtacgctgtctgctcgtgctcaagcggctatgcaggaggcgtcatga

SEQ ID NO: 317102 - DNA, 1152 bp, Proteus mirabilis
atgagcgtttggccccttgagaaattaggctcagtgctcgataaatcagaaaactggatcgaagtgcagcctgacaaagagtatagcgaagtcacagttaggctttggggtaaaggcgtgaacttgcgaggtatcaaaataggtagtgaaattgggtcgtctcgtcgactttctgtttcagaagggcaattcattatttctcgtattgatgcgaggcatggcgcgtgtggacttgttccaagaaaccttgatggtgctgtggttacaaatgattttcctgtctatacacctaaagagaataagattttacctaggtatcttgagctaattagcaaaacccacttttttgttgatgcgtgtaaaagggcgagcgaagggacgacaaatcgagtgcgtcttaaagaaccacggttctttaatatcgaaattcccctccctgatatagctgtccaaaaggtagtcgttgacaaagttgacttcgcactgggcaaacttgaagagattaagcttcttagatcatcattgttagatgatgcgcaagcaatgctgagtagtgccttccataaaattattgagggcgctgtctacaagcctatgtcggcagtggctccgattgttagaagacaaattgaaattacagttgatggtgaatacccagaactgggtgctcggtcttttggcaaaggcatttttcacaagccgacgttaatcggtgcggaactcgattggcaaaagctttataccgtccattctggtgatctggtcttaagtaatattaaggcttgggaaggtgctattgctgctgctggagacaatgatcacggtcgagttggatcgcacaggtatatcacatgtgttcctgtagaaggggtaacaactgctaattttctggcgttttatcttctgactcaagagggtattgagcaagtacaggccgcttcgcctggtagtgcagaccgaaaccgaaccttagcgatgaaaagattagagaaaattaaggttcctgtacccgattacgataagcagctttggtttaatcaactgcaaagctatgttggaaaaattaaacaagctcaatcagaaaatgaaatagagctagaggctctgatgccttcaattttagataaagcctttaagggagaactggtttaa

SEQ ID NO: 317103 - DNA, 1575 bp, Proteus mirabilis
atggcacgaacaaagaaagcagatcagccgatgaccaccgcgcagcaattaggtgcgattgttaaatcgtctcggcaaatcatgcgtaaagataaaggcttaaatggcgatctcgaccgcctgccaatgctcacttggatcatgtttttgaagtttctcgacgacttagaacaaatgcgagaaaccgaagccgtgctagaaggaaaaagctttcagccagccatcgaagcgccataccgctggcgagactgggcagcaattgaaggtggtatcaccggcgacgagctgattgcctttattaacaatgatgaagcaatgcgacctgatggtacccgtggcatcggtttgtttgcctacttgcgtagcctgcaaggtgacaacggtggtgatcgccgagatgtgattgcgaccgtgtttaaaggcatgcaaaaccgcatgatcaacgggtatttgttacgtgatgtggtcgacaaaataaacggcattcatttcaactcatctgaagagatgcacactttaagccgcttatacgaaaccatgctccgtgaaatgcgtgatgccgctggtgactccggcgagttttatactccgcgtccagtggttcgctttatggttgaggtgatggacccgcagttgggtgagtctgtattggacccagcctgcggcacgggtggttttttggttgaagcgttcgaacacctagagcgccagtgtaaaacagtcgaagaccgcgaagtattgcaagaaagcagtatctttggcggtgaggctaaatcgttgccttaccttttggtacaaatgaacctgttactgcatggtttggaatacccaagaattgacccagaaaacagcctgcgttttccactacgagagatgggtgacaaagatcgtgtggatgtgatcttaactaacccaccttttggtggtgaggaagaaaaaggcattcttggtaacttcccagaagacatgcaaaccgccgaaaccgcaatgctgttccttcaattgatcatgcgtaaactcaagcgccccggtcatggttcagacaatggcggtcgtgccgcggttgttgtcccaaatggcacgttattcagtgatggtatcagcgcacgcattaaagaagagctgttaaagaactttaatctgcataccattgttcgtttgccagaaggggtattcgcgccttataccgatattgcaggcaacttactcttcttcgatcgttctggcccaacagacgatatttggtattaccaaatatcgacaccagaaggcagaaaaaaatataccaagactaaaccaatggagtacttcgaattcgaagactgcttacagtggtgggctagccgtatggaaaacgcccaagcttggtcagtgaaagcacaagacgttattcaatatgacgatagcggtaagttggtttcagttaacttagatattaagaacccaaatagtcttgaggcgatggaatataaagaccctcaagagttgttagcaagcatggcgaaaaaagagcgaaaagttactgatctaattggtgatatttctgatttactagcacaaggttcaaaacaatga

SEQ ID NO: 317104 - DNA, 2391 bp, Proteus mirabilis
atggccttaaacgaagcagatacttgtcgagtctatgtgacgccaaaacttaaagagtctggttgggaaaacaatcctagcgcattaactgaacagtacacatttaccgacgggcgcgtccagtttaagggcagtaaaattcagcgtggggagcaaaagcgagcggattatttacttaagtacactcgcgattttcctattgctgttgttgaggctaaacctgaaaacagccctgtcggccaagggatgcaacaggcaaaagattacgcagaaatcttagggctaaagtttgcttactcaaccaatggtcatgagatcttagaatttgactacaccactggtgaagagcaattgttgtcgcgctttccaacccctgatgagttattcaagcgtctttgtggcgatgaaggtttaaaggatgaagatcttgataccttgctgtccccttaccaccatgtttcgggatattccccgcgctactatcaacaaatagccataaaccgcgcagtacagtcggttcttcaaggtaagaagcgctcattaattacgatggcaacgggtacgggtaagactgtcgtcgcttttcaaattagttggaagctgtggagtgctcgctggaatcgtacgggagactacagaaagcctcgcattctatttttggcagatagaaatgtgttggtagatgacccaaaggataaaacatttaccccgtttggtgatgccaggcacaaaattgaaggtggcaaagttgttaaaagtcgtgaaatttattttgccatttatcagtccattgccagtgatgagcgtcgtccaggcttgtataaagaatttccacaagacttctttgatctaattatcattgatgaatgtcaccgaggcagtgcccgcgacaacagtaactggcgcgaaattctagagtattttgagccagcctttcaaatcggtatgacggcgacaccgttgcgtgaagataaccgcgatacttatcgttactttggcaacccaatctacacctacagtttgcgccaaggtattgatgacggatttcttgcgccataccgcgtacaccgagttatttcggaagtcgatgcggcaggttggcgacccagcaaaggcgatgtagaccgctttggacgagaaattccagatggtgaataccaaaccaaggactttgaacgggttatcgcgttaaaggctcgaacagatgcgtttgctaagcatctcaccgagtttatgaagcgaaccgatcgttttgcaaaaacgatcgtgttttgtgttgaccaagaacacgccgatgaaatgcgtcgggcgcttaataacttgaattctgacctttcacgcaagcatccagattacgttgcacgcgtgacatcagaagaagggaaaattggcaaagggcacctcagtcgttttcaagagttggaaaccagtactccagtgatactgaccacatcacaattattaacaacaggggtcgatgcgccaacttgtaaaaatgttgtgcttgcgcgtgttgtgaactcaatgagtgagttcaagcaaattgttggccgtggcactcgcctacgcgaagattacggcaagctgtggttcaacatcattgattataccggctccgccacacaaaattttgctgatcctgactttgacggttacccagaaattgaagatgaagtggtgattgatgaagacggtgaagaagtggttgatgacactttaacaccagagagtgaagagttagaggttgctgaagagacgggcgaatgcgaagtgaatactgaaggtgaaggcgctgatgatgaagaggagcacgaaccgagaaagtactacgtagacggtggcagcgttaaaattacgtctcatttggtctatgagctagacgaagacggtaaacagcttcgcgtcatccaatataccgactacaccgcagaaaaggtaaagaccctattttcctcactggacgaactaaaagatagctgggctaatccgttaaagagagaagagatcattctcgaattacaagaacgcgggatccagtttgatgatttggtcgcagagtcaggcaaaaccgatgcagatccattggatttactttgtcacatagcatttaacgtaccgctgcgaaccagaaaagagcgcgctgaatacttgaagaaaaacaaaccggacttttttgatcagtacggcccagaggcccgcgcgatcttaacgtctttactggacaaatataccgaccacggccccaagcaattcagtattccggattcgctacaggtaccgcccatttctgaatatggcaatgtgatggaaatagccaatctctttggcggtgcattgcaaatgaaaaccgccgtggaccaattacaaacgctgctctatagccagcaataa

SEQ ID NO: 317105 - DNA, 198 bp, Proteus mirabilis
gtgaattcagaccgctggttatctgttgaagaaatagccgaatatcttggcgtaagcaaagatactgtgtactcatggatcagtaaaaagggtatgccagctcatagaattggtcggccttggaagtttaaagcagatgaggtggatcagtgggttagatctggtggcgcatcagatgatagcaaggaagaaaaatag

SEQ ID NO: 317106 - DNA, 243 bp, Proteus mirabilis
atgaacccaactacacaatcacccacaaactcagtacacccagcgcgtcagcagcggattttgcgcttgcccgaggtaaaggccaaaacaggctttggccgcagcaccatttatgccctgatggccaatggtgaatttccccgatccatccgcattggcgcgcgtgccgtgggctggttagaaagcgatatcgaccagtggattgaaacccgccgtatcggtgctgcttatggccgtggataa

SEQ ID NO: 317107 - DNA, 315 bp, Proteus mirabilis
atggatactgtcgagccaaaatcaaaacgcactgcggtcatattccctagacaaaggaagatgttaaacatcttgggagaaaacttaacattggcgatgaagagacgcggcattactcaagaaatgatgcatagtaggacagggatttctaagccaacactacgtaaaatatcaaaaggtgatccttccgtttcacttggtcactacgttaaggttttggcagtcctaggcttgttagacgacctaaccaaggttgcccgtgatgacgagctgggaagaaagctgcaagacatccaattgctaaataaaaaataa

SEQ ID NO: 317108 - DNA, 396 bp, Proteus mirabilis
atgactactaaaagaaaaccacaatttaatgtcaggatatctcctgagttaaaaaaagaaattgttgcccttgcagagaagaacaaaagacctatcaatgctgaaattaacgcagcattagaagcgtgggttgaaatttgtaataaatatgaaaatgaattcaaagaacgttatatatttacaaatgttgatgataattattcaaaaagcaagaaatatgatgataataataagtcatacattttaactatatttaataactccattgaggaagcaaaggaagatataaaaaaagatattctaaaggaattcaaagagaaatggatagagtttcttatcgaacaaacctcgaaagaacaactcaaaaaaataattgagatgggtgagaagaaataa

SEQ ID NO: 317109 - DNA, 846 bp, Proteus mirabilis
atgcttcagcagaaaatgatcgaacgcttcaaggaagcttgccatgaggatgcacgaataatcgcggcgctgatgttcggctcatttgctatcggagagggtgacgagttctctgatatcgaatttgcagtgttcatccaggatgatcattttgaaaatttcgatcagcgctcgtggcttaatgctgtaagtccggttgcagcttactttccggatgacttcggccaccacaccgcgctttttgaaaacggcattcgcggtgaattccatttcatgcgaaaatcggacataccggtcatttccacttggcaaggctacgggtggtttccctcgcttgaggaggctgttttgttggaccgatcaggagagttgtcaaggtacgcgagtgctctcgtgggcagtcccccgaaacgtgaaggcgcgccgctggtggaaggacttgtattgaacctcatcagcctgatgctctttggggcaaatcttttaaatcggggagagtatgctcgcgcctgggctttgctcagcaaagcacatgaaaacttactcaagttggttcgcctccatgaaggggcaacagaccactggccgacaccttcacgcgcgctcgaaaaggatgtctcggaggactcgtataatcgctacctggcatgcacaggcagcgcggaaccaaaagcactatgtgtagcctatcatgaaacgtggaagtggagtctcgaattgttcaggagtgtggctggacctctgaatatcgagcttccgagaattgtaattgcgcagacaaaaaggttgctaaatgaatctgcgacgccgcacaataaaatgttaacctctgaggaagaattgtga

SEQ ID NO: 317110 - DNA, 558 bp, Proteus mirabilis
atgtttttgaattggttagaagatataaacttatcattattcgtggcttttttgtcactactatttacggtttttattggattcattgcaattttttatgcaaaaaaaacatatgataacgctgaaaaggtttatcaatttcaattaaagttacttaaaagagaagtcatagctagagatataaaattatctctagtaaatagttatttactctctcaaatatcgtggtatgaacaatattttgatgaaaatattaaatgtttaatagcagtgcgtgataaaatattaagtggatatgattcattttatattaatgacttagggctttttcacactatcagtttcggggatggtcagtatgtcctttataaaaatattgaatttaaggctagtaatatatttgaattaataaacatctatgcacataaaaatatatcagaatcatctgtgaatatcgataatattattactagtataaatggcgtggttggtgaactgaattcaataaataaaaagtatatagacaatattaaaattgaattaaataaaaacacttaa

SEQ ID NO: 317111 - DNA, 606 bp, Proteus mirabilis
atgccagcattcgccagtcacgcatctggcggcaggcttcgcccagcacccaagcgccgatttcaggcatcaggccggacgattcgaccacgggcaggaactggcccggtggcaatagtccaagcgtcggatgacgccagcgcaacagggcttccgcgccgacaatcccaccactgcgcagatcgacgacgggctggtagtgcagttcaagctgcccgcgctcgaccgcttgggccagttccggcgtcgtccatccatccggccggaaagcgctcattctctttccctgaatgcccgcaacgcccgcgacagggacagaaggaacaggccggtcaaaccgagcgccgcgatgacccaatgctcgccgaggaaagcaccggcggttgtgccggccagcacgacagcgaggatgggcaggtggcaggggcaagtcagcacagccagtccgccccacaggtagccggtgatcggtttgtgcgtctcggacggcaagcgctcggggttgttcatggcagactctccgcgtgctgtgccggctcggtcggcagggtggccaactgcacttccagatcggccaacgcttcgcgccgacgctcgacgaactga

SEQ ID NO: 317112 - DNA, 1206 bp, Proteus mirabilis
  misc_feature (1136)..(1145): n is a, c, g, or t
atgtataaatatgtcgagcctcaactacccgatgtcgcgacattaaaagatgttcgtttacaaactcctatgcaggtctttagcgcagacggagagttaatggcgcaatatggcgaaaaacgtcgtttgcctcttaccttgcaggagatgcctccgcaattaattaatgcctttattgccactgaagatacgcgttttcgtgaacatcatggtattgaccctattggcatctctcgtgctgttgttgttgcgttaacatcggggcaagcatcgcaaggtgccagtaccatcacgcaacaattagcgcgtaatttcttcttaacacctgagaagaaattaatgcgtaaaatcaaagaagcctttttggctatccgtattgagaaagagcttactaaagatgagatcttggcactttatctcaataaaatttatctaggaaatcgcgcttatggtgtgggtgctgctgcatatgtttactttggtaaaagtgtgcatgatcttagcttaagtgagatggctgttattgcaggtttacctaaagcaccttcgacactaaacccactttattcgtatgatcgtgccttaaaacgccgtaatttagtgttacaacgcatgttggaagagaactatattacccgcgaagagtatgacagtgctaaagctgagcctattgtggctaaatatcacgccccacaaattgatttttcagcgccttatttgactgaaatggtcagaatggagatgtatcagcgctatggcgaaaatgcctatacggatggttataaaatttacactacagttatccgtaaagatcaattagccgctgaacaagcgctacgtaataatgttattgattatgatatgcgccatggctatcgcggtgctcaagaggtgctgtggcatgcagggcaaactccttgggatgataaagccattaacgataagctaaagggtatacagacttatggcccattaatccccgctgttgtgttatccgctgatgctaaagaagctcaggtggtattaaaaaatggcgataaaataacactcgatttaaaagcggttcgttgggcgcgtaaatttatttctgatacggctcaaggggccacgccgagcaaagttgatgctgttgtacnnnnnnnnnngttgtacatgctggtgagcaaatttgggtacgacaaaatagtgaaaacgattggttattag

SEQ ID NO: 317113 - DNA, 297 bp, Proteus mirabilis
atggggaagtatataccggttacattaaataatattacggcacttgaatttcaatcatccttaccacaaggcaaagttgcattagtttgcgaaggcggtggacagcgaggcatctttactgccggtgttcttgatgaatttatgcgctctcaatttgatccttttgatctactcttgcttgtggacaaaggggttacgcccgcagagtcattaaccgttataccaccaataaccaattctttaatccgattcgttttgttcgtgggggaaatttactcgatcttgactggtatatag

SEQ ID NO: 317114 - DNA, 360 bp, Proteus mirabilis
atgaataatgatggcaaaaaaatcacggtttattcaactatttcccctgaaacagtagtgcaagtccgaggtacttatacgtctaataagtgtgaacgttctcattttaatgcttcttatactgaagtcacttattcttctttaacacaacaagtggaagcagagcgtaaaattctgcaaattgagttggcagtgaaaccagatagtgatcaactaggtatgacagcatcaggtatgattgttattaacccaccttggaaattggcatcacaaatggcgtctatcttgccttggctacataaaaccttggttcctgaaggtactggacacacattagttgaatgggttgtaccagaataa

SEQ ID NO: 317115 - DNA, 1182 bp, Proteus mirabilis
  misc_feature (1136)..(1171): n is a, c, g, or t
atgtggcattctagtcatatcaatgaacctcagaacaatgatgaacagattatggtccagatagcagaaaacccctttatccttgtagatggctcttcatacctttatcgtgcctatcatgcttttcctccgctaactaatagcaaaggagaacccacaggggcgatgtatggtgtgttaaacatgctacgcagcctaataattcagtataagcctagtcatgtggcggttgtgtttgatgctaaaggcaaaacattccgtgatgagttgtatgaggaatataaatctaatcgcccaccaatgccagatgatctgcgtgagcagattgagcctttgcatgaaatggttcaagcgatgggcttaccgttactttctattactggcgtcgaagctgatgatgtgattggcacattggcattaaaagcagccagtgatggtcgtaatgtgttaatcagtaccggtgataaagatatggcacagctagttacgcccaatatcacacttatcaacacgatgacgaatgttattttaggccccgatgaagttaaagaaaaatatggggtgccaccggagttgattatcgactttctcgccctgatgggtgactcatcagataatattcccggtgttccgggcgtaggtgaaaaaacagcattagggctattgcaaggacttggtagcttagaggatatttatcaacagcttgataaaatagccacattgagtttccgaggtgcgaaaacacttggcgctaaaatggttgaacatgagaaagttgccaaactttcttatcaattagcgacaattaaaacagatgtagcgcttgataaaacctttgatgacttagtggttaatgaacctaatttagataagttacttgaaatgtttacgcgttatgaatttaaacgctggataagtgacttacaaaatggtggttggttagctcaacgcagtagccgtaaagcgccagtcccctatagtgcagaagtcgcaacacccaaagagcagccagctgcagacaatttcccagttatctctcaagagaactatgagtctatattgactcatgaaagcttaatgcgctgggttgaggtactgaaaaaagcgcccgcctttgcttttgatactgaaacagnnnnnnnnnnnnnnnnnnnnnnnnnnnnnnnnnnnngaaacagatag

SEQ ID NO: 317116 - DNA, 147 bp, Proteus mirabilis
atggcggtacaaaatgcactgtcagaaaaatcaggtgatatacgtgttgaatgtttttcttctttgaaaaaaataggcattgataaattacgtaatacgttaaatgagtggtttactgatactaacgaaccagagacagaagcttaa

SEQ ID NO: 317117 - DNA, 897 bp, Proteus mirabilis
  misc_feature (19)..(28): n is a, c, g, or t
  misc_feature (873)..(882): n is a, c, g, or t
atgaagcagtctcaacacnnnnnnnnnntctcaacacaagaaacccaagattatttaactaaagaagttgaagacgcatttaatcagttaggcgtgccagtaagagaagggcagtcagtggctgtagatgccatttttgactcagtatcggtttctaccacttatcgtgaagagctagctaaacatggtgttattttctgctccttcggtgaagcgattcaagaatatcccgaattagtacgccaatatttaggtacagttgtttctagccacgataactattttgcggctcttaatgcggcggtcgcttctgatggtacctttgtttatattcctaaaggtgttcgctgccctatggaattatccacctattttcgtattaatgcggcacaaacaggccaatttgaacgtacgattttaattgcggatgaaggaagttacgtcagttacatcgaagggtgttcagcacctgtacgtgatagctatcagctgcatgctgccgttgttgaagttatcattcataaagatgccgaagtgaaatattccacggtacaaaactggttctctggcggtgatagcgaaggcggaattcttaacttcgtcactaagcgtgccctttgtgaaggtgagaacgctaaaatgtcgtggactcaatctgaaacaggttcagcgatcacttggaaatacccaagtgttatcttaaaaggagataattcaacggctgaatttttctcagtggcactgaccaatggtaaccaacaagctgacacgggaaccaagatgatccacatcggtaaaaataccaaatcaactattatttctaagggtatttctgcgggtaaaagtcaaaatagttatcgcggtttggtgaannnnnnnnnngcagaatgcacgtaa

SEQ ID NO: 317118 - DNA, 390 bp, Proteus mirabilis
  misc_feature (347)..(356): n is a, c, g, or t
atgtctcagagcaatgttgaaattggtgatgaagttcaaggctggctcagtgatcatcactataaagaagggttctataccgatatctcaaccgatacgttagataaagggttgaatgaagcggttgtgcgagctatttcagctaaaagaaatgagccagagtggatgctagagtttcgtcttgatgcttatcgtcattggctagagatggaagagcctcattggctaaaagcagattatccatcgctgaattatcaagattatagttattattcagcgccatcttgcggtgcttgttgtgccaatggcagttgtgctagtggtaacaatgaagcagtctcaacacnnnnnnnnnntctcaacacaagaaacccaagattatttaactaa

SEQ ID NO: 317119 - DNA, 450 bp, Proteus mirabilis
atgaccgcgattaaccttgctgagcgtggcttatctgtcacaatcgttgaaaaaggaaatattgccggcgaacaatcatctcgattctatggtcaagctattagctataaaatgccagatgaaaccttcttattacatcacctcgggaagcaccgctggcgtgaaatgaacgctaaagttggtattgataccacttatcgtacacaaggtcgtgtagaagttcctttagatgaagaagatttagaaaacgtaagaaaatggattgatgctaaaagcaaagatgttggctcagacattccatttagaacaaaaatgattgaaggcgctgagttaaaacagcgtttacgtggcgctaccactgattggaaaattgctggtttcgaagaagactcaggaagcttcgatcctgaagttgcgacttttgtgatggcagaatatgtgatgttgtaa

SEQ ID NO: 317120 - DNA, 177 bp, Proteus mirabilis
atgagttttagtcgtaatgaaatagatacaatgtcaggtactcgaaaaagaacctaccaattattggtgacaacggcattgcaactttttgaacaagggatgttacctaccgtatcagagctggtggtgtttcaagggcaacggcgtatcgctattttcccactcaaagtgatttaa

SEQ ID NO: 317121 - DNA, 1236 bp, Proteus mirabilis
atggcatcaaatcaacctgctttatttcatatgatggcaaagccgacaagctaccactgtaatattaaatgtgaatattgcttttatctggaaaaagaaaatatttttcaagatgagacaaaagaaacaggccatacagtgatgcctgatggtgtacttcgtcgttatattaaagactatattcagtcacacagtggcgatcaggttgattttgcttggcaaggtggtgaaccaacgcttgcaggattagctttctttgaaaaagtggtcaaataccaaaagcaatttgctaacggcaagacaattaccaatagtgtacaaaccaatgcgattgccattaatcgccaatgggcacaattctttgctgataaccactttctattaggcgtttcaattgatggcattgaagccgttcacgataaatatcgtatttcagtcaatggtagcccaacatttgaacgcgtaaaacgcgccatcaatttactaaatgagtatggtgttgaatttaatacattaaccgttgtaaatgatcaaaactggaataaaggaaaagagacttatcaagctttaaaaaatttaggttcaactttttttcaatttattcccatagtcgaagtggatagacgtttcccacacactcatggcggacattatgctcccggtcctaacgcacaattagcggctttctctgttcccgctgaaggttacggaaaatttatgaccgatatattcaatgaatggatacaccaaggtgatgtaggaaaaatatacattcgcttatttgatagcttattagggacatggatgggatatcctgcatcaacatgtattcaatctaaaacttgtggtcaagcattaattattgaagccaatggtgatgtttactcttgtgatcactatgtttatcccgctaataatttaggcaacatacaactaacaagtcttgcacagctcgcaacatcaaaaacacagcaacgctttggtcaaaataaatacgataaacaaaccaacctttgcaaacagtgtgaagtgcaaagcttatgttatggcggttgtcctaaacatcgcattattgcgatagaaggcgaaaaatatcgccacaattatctatgtcactcttataaaaaaatatttcatcacacggcaatcggcatgcaattaatgcgtcaagcgatagctcgtggaggccttgccagtgatgcacttggggcgatgcaaaaaaactatctcaagtga

SEQ ID NO: 317122 - DNA, 1611 bp, Proteus mirabilis; identical to SEQ ID NO: 312677

SEQ ID NO: 317123 - DNA, 885 bp, Proteus mirabilis
ttgactaaccaagcattagcgttatttaacgaacgtctcccccataaaccgtattattcggatgatttgcaatttggtgtgcgtattgctgccaaagatcgcgccattctcgctaaatatattcagtttaaccaacctcacgcccaattctggctgggatttgatgttgaccgtcagggggcagctttagactggagtgaccgaaacgcgccagctcctacttttactatcatgaacccgaaaaacgggcacgctcatctgctttacggactggaaacggcgattcgcacagcacccgatggaagaattaaacccctcaaatacgcagcagctgttgaaaatgcgttacgtaaaaaattggatgcagatattggttattcagggctgatttgtcagaaccccaatcatgaacactggcaggttaacacgtggcagactgagttgtatacgctggattggcttgcagattatctcgatttaacttcggctaatgacaaagaaatcattactgattatggattagggcgtaactgtcagttgtttgaacaaacccgtaaatgggcttacagagctattcgacaaggctggcctgcatatgaacagtggttacaagcctgttttgaacgtgctaaagcgtataaccttcaatttttaacccctcttgatgaaaaagaagtttttagtatagctaaaagcattgctaagtggactcatgctaagtttagcgaggagtcttttaatgattatgtttttaggacacacacttcggtaattcaatctatgcgaggtaaaaaaagtaaaggcggtggtcgcaaagcactaggggaaccgtgggttgaattaggcataagtagagctacttatttcaggagacgcaaacaatga

SEQ ID NO: 317124 - DNA, 648 bp, Proteus mirabilis
atgaagttaaagaattggcttattccacttcttgtctggatatttatttttattgggataaagctagtttttggtagtgggtgtaatgatgggtggagttcatcatcaattggtcggatgggggcttgctcgcatcatggtggtgtcaaccacacatctggccttatagcatttattttagccactattgtatcagggtggctattttttaaaatggatgaggtagagacaaggaaaataaggaaatcctatgtcgttgaatcaagtttttttgaaatggaatctactagcgctccatttaacccgtcttactctttaaaaattaattcaagtgaaatcaatttcacttataggacggggtatggggatggtatacctgatgaatcaattaagcttgaatcatcgtatgattttttaaaagatgtacttttcctgtcagagaaaataaaaagtgacatagatacgttcagcagagaaaactctgattttgggtgtgatggcgaaatagtttctattaggttttttgatggtactaaagaagtaagatttcagactccaatgatatttattaattttgaagatatatcatcctcaaccctcaagttgatgacaaccctgaggcaaaagttgaaattcgacctctactaa

SEQ ID NO: 317125 - DNA, 306 bp, Proteus mirabilis
atgggatttaagcatagtccagcgccgtggcgatgtcatgacaaaagaccaaactgtagtggttactctatattcggtaacgatggtcagtatatcgcttttgtaggtgactctgatcaactatcaccaatagatgctaacgcccatctaatcgcagcagcaccagagttattagaatcccttagagagctagtttcagcaatggtgagatacgaaatagatgttggtgaaagcgctccagttaaacacgaaaagatgatgaataaagccagagcggcaatcacaaaagccctcggtcagcagtaa

SEQ ID NO: 317126 - DNA, 246 bp, Proteus mirabilis
atgacagataaaactggtggagcggcttttcctgcaagtggacatccagatatgcagtttgtagcgcaggaaggcatgacgctacgagactatttcgccgctaaagcaatgcagggtgactttgcggctcaaagcgctgatgtagaaggctttgtatactctaatgacctagaagaccatgaccttgatgattgcgccgcattctactaccgcatggcagatgcaatgttaaaggctagggggtga

SEQ ID NO: 317127 - DNA, 549 bp, Proteus mirabilis
  misc_feature (529)..(538): n is a, c, g, or t
atgcaaaaattaaagtttttacgattttcaaaagaaaaagtttctctttttttagctgtctatattggtttatttcttaatctttccgtttacattggccgttatggcacacagaattctcacaactccctcattgaaagtttatatatactgggtgaagttgcagtaaacattgcctttactttcttcttattacgacttatttctttttgtggcacactattttttaaaatagtcgcttcttttattctgctcattagtgtttgtgctagttactatatctctttctttgatgtagttattggctatggcattattatttctacgctcaccacagatatcgatttatcaaaagagctgattagccctaatgtgattatttggattattgggttatctattttacccctagcgctaacttggttatgtaagaaaccagaaaaaaatataactcagcagcaaaagaaaaaaatctggatcaaaaatacggtcaaaatgctcgtaattgctcttgcggtatttgcctatnnnnnnnnnntgcctatctaa

SEQ ID NO: 317128 - DNA, 177 bp, Proteus mirabilis
atggtattcaaacgcaaagtggctactgtccgtctttcaccgcagtctgatgaagtttttactaccttaaaacaatttcgccaaaatgaacaaggcgcacaccctattaacaccatccatcatcatgattgtaatggttattggcgtaaactggctggtttagaattagttgaataa

SEQ ID NO: 317129 - DNA, 615 bp, Proteus mirabilis
  misc_feature (590)..(599): n is a, c, g, or t
atgtcagaagtagccactattgatcagagtaacaacttagcagtattcaacccagacaagttaagtagcctaattgagttttcaaaaataatggctaaagggaaaattacggtacccgaacatttgcgcgataatgattcagattgtctagcgattgttatgcaggcgatgcaatgggatatgaacccatttgttgtggctcagaaaacctataccgttaatggcgttcttgggtatgaagcacaattggtaaatgccttagtatcaagctcaacagctattcaaggacgttttcattatgaatatagcgaaactggttgggagaaactaaccaaaagcaaagaaatcacaaaacaacgaaacggcaaagagtattcatttcgtgttcgtgattggactgatgcagatgagcatggtttatggatacgagtaggagcaattcttcgcggtgaaagtgaaattacgtggggagagaaaatttacctatctagtgtcgttactcgcaattctcctctctggtcaacaaacccaaaacagcagttagcttatcttgctgtaaaatattgggcccgtctttattgccctgaagnnnnnnnnnnaagatcgtccgattaa

SEQ ID NO: 317130 - DNA, 522 bp, Proteus mirabilis
atgaataaccaagaattaagcgttcaagcatttaaggatttccttgaatcgcttatgtcgctgaacataatgaaggaggctactgctcgtaacttgaaaaactcatctgctcgcctcctaacggtagttaaagaagaagagatgggggatgtaactaagcttgatttaaatgttctagcagagcgctacatcgaaataacagagccgaaacctaacgataccagcattaaagcttataaaagccgtatggagagcgcaattaataaattcaaagcttttcaggctaatgaggatattccctacaatcctatttcaaatcgccaagaagaggaaaaagaattggctaaagaagcgcctgaagtagagcctaagaatgaccaaccttcatcttattctctacccgtagttattcgccctgaatctggaacaacagttactataagcggtattccgacagaccttacaagcgaagaagccgaacgcatctcctcaattctgaaggtttacgttcggcctcaataa

SEQ ID NO: 317131 - DNA, 282 bp, Proteus mirabilis
  misc_feature (235)..(244): n is a, c, g, or t
atggcccgtatcaggactattaagccaacattttggactgatgaggatatggctgaaatatctgagtcagcgtgtttattggcgatagggctattaaattacgctgacgatgaaggctatttcaatgctaatccgaagctaataaaagcggctgtttttccaatacgtgaaacctcccgtagtattccggtactactacaggagctttccaactgtggctatatcagcttatttnnnnnnnnnntctgcccaaaatgggaagcactttggattaataaataa

SEQ ID NO: 317132 - DNA, 330 bp, Proteus mirabilis
  misc_feature (233)..(242): n is a, c, g, or t
atgaaattaagcagtaacaatgctgaaactatggagagccttcgcagtgagcggaatcaatatcgtatacttgtcgatattacaaattctgtattagcgcatctagacatggatggcctcatttctgaagtatctaaagaaatacatcgttttttcggacttaatcatattagtctgatgttatgtcgtacttcatcacaaaatagtcatgaaggtattctttattctagtcnnnnnnnnnnggaaaatctgtcattcgtcaacaacgtaagttcagtagcgccaataacaaagccgaagaaattattcatcaaaacaaacccgttttaa

SEQ ID NO: 317133 - DNA, 1377 bp, Proteus mirabilis
  misc_feature (1148)..(1193): n is a, c, g, or t
atgggttggaatgatattgtagatgacttttatacatataaagataagtttaatcagcttatcaggaaagcatgggggtacggatgcgctatttcagttgtttctgtgaatagaaatgaatttaataaatcaacactggagtcatctgtaaaagaaaagctatctttgtcatataagaatattgaatattatgatcttggtgaatatctagaaatggcttcaaacgccaacgttgatgatgctaaccttttttataccaaaaaagacggctcgtttgatcacacccatcctcaaccaattggtcacatagctattgctagctatatgttattcaaagtttttcatgataagatatacacagttaaagaaggaatgttattccagccatcatcaaattctaagatgatagaggcggttggactttctggtgagctttacagcattcatcacaaaaatgcaggcgggagtccattcttagataaacttagaaaaatttcaaaaattcaaccatcaaatgaaaacgtaacattttcatttattgtttattgcgaaaacaataatacgtcactatctatcatagaaccgtggagtgataagtctgattatgaaacatacccaacatcagcaaatgttagtttgtttagaggagttggcttgttcccaaaagagcaagacagtctaaactcttacagaacaatttaccgccaaaagatagccagtgcgtacatgagagataaaatgacgctcgtaacatatgtcggcaaacttcatttcgggataaatttaatttcaatcacctacgggggcaatccttcgtctgtttatgtccccatactaaaatttgataagtacgcaaaaaaaggtgtttcattctctagattatctttaaatgttaagtcaaaaacagtattaaagtttattggtagagataacatgttaggtggtgttttaaatggggcatcagattcatttaatgctcattttatctcttctggtaattataaaatatacacaacaataatacataaagccccggctgatggagtatacattttagttaactatgatgagcttaacgatgtagggcttgctttttttaatgacggcggcaaggtgtcttatggtgaatatagtaataagtcagtgtnnnnnnnnnnnnnnnnnnnnnnnnnnnnnnnnnnnnnnnnnnnnnngttaattattgataattatcaaaacattaatgaaagcacagtcaatactttttctataaagtcaggcagtagtgagcgtgcattttcatcatcatattcaaccggtggcagtgttggtgtatataacagtagtgataatgatgctttgattacattatcttgcgactcaaccatcattaattaa

SEQ ID NO: 317134 - DNA, 165 bp, Proteus mirabilis
ttgaagttaattaaagattataaccaacagcgacaagctggtgtattacccactttcaatattcgccaataccctgaattacaaaatgatattgagcaaggtatttgggataaagagcctttacctaatgagccgttagtccgctgtgaaaaggtgaggcaataa

SEQ ID NO: 317135 - DNA, 951 bp, Proteus mirabilis
  misc_feature (907)..(916): n is a, c, g, or t
atgcagatatttttcagtgagctaaaaacactgtatatggagccaaatcaccaatttatccctctagatattacttttcgagattatattgattgtgatgcctatccgattaacacacaaaatgattgggaatattggttaacgcgtttaccacaattaccaccagccccacaattgccactaataaaagatccagcacagattgtgcaacctcgcttctcgcgtttacaaacatcattatctacttctgtttggcaagcactacaacaagttgctcagcaaaataatgttacgccagcagcacttttgattgctgcttattgcgccacattatccgcatggagtaaaagccctgagttaacaattaatttgacattatttaatcggcatcctgtacatcctcaaataaatgaagtacttggtgattttacctcattacaattactcgattggtatacctgtgatctttggtcaaacagtatctcaatgatgcaaaaacgtttacataaagatatgcaacatcgtagtgtttcagccattaaagtaatgcgtgaaatggcaattcaacgacagatgtctcatatagagatacctgtcgtttttacctgtgcattgggctataaacatgatgaaggttttctttctcatcattcatggctaaaacctgtttggggaatatcacaaacaccacaaacatggctagatcatcaagtatatgagtcagacggtgaattatatttaaactgggattttgtcgaacaattatttgactacacaaccattttttccatgttccagcaatatgaacatatactcactaaactggctactgaaccacaatcttggcaattgccactaaataaacttataccaagatgcaataatctcgtcatccccccagttttcnnnnnnnnnnggtcagacaatacaaaaactacaacaacttgttaa

SEQ ID NO: 317136 - DNA, 255 bp, Proteus mirabilis; identical to SEQ ID NO: 295851

SEQ ID NO: 317137 - DNA, 360 bp, Proteus mirabilis
atgattgcaattactggtgcaacaggcctattaggtcaacatgtgattgaaaaccttcttcaaaccgttcctgctaatcaaatagtggcatttgctcgtgatgtaaaaaaaggatcgtctttaagtcagaaaggcgttttagtacgtcaagcggattacaatgataaagcttcattaataacagctttacagggtgtcgataaattacttttaatttcctcaagtgaagttggcaaacgtaccattcaacatcgtaatgtcattgaggcagcaaaatcagcagatgtacaatttattgcttacactagcatattacatgctgatcgctctacatgtagaaacagaaaaaatgctagctga

SEQ ID NO: 317138 - DNA, 855 bp, Proteus mirabilis
atggagacaggagatggcaatgttgctttagatttagttgtggtaatagatacaagtggctcaatggctgatgaatcttctgatttaagtcaacaaatagatgatgctgttcaaaaggcattaggacgttgcccatcaagtttaagagtcacttttttaggaatagaaggtacctgggataatactaagttcgatcgctcagtgactgactatttaatgacacaaggtgtatctgctcacaaattacaagcaagagcgccatttaaagaggctgatggacgagatcatgctggaaataaagaagatttatgccgagccgtcattgatgtgtgtaaatatttcgattggcgagatggcgctcgtcgtgcaatttttgtcttaggtgatgaaggtatggaaggtggcggaggtgtattaacacaagccgctgtgcttaaaaacaatgaggcaatagtggttgctagaagcgaaaaagtaaaagtatatacttatcagggaacgcctaatgatgatccctctaatgtggatcgctttcctactattgctgatagagataacatcacgaaagagtatgtgcgcttagcgcagatgacgggaggacgctcttatatatacacaacaggtatcgctaatttttctttagttctgcaagaaattctatgtgacagtttaacattacctaaacttcctgatctgaataaagataattcaacgtgtcgtcatgtttgtgaagagctctctactattatatcaacagttaatacccttgcagaaataatgcataaagcgattgattcatgttgtaaagaagattggggcacacgcgaagtgtttaagcctcattgtgattgttaa

SEQ ID NO: 317139 - DNA, 264 bp, Proteus mirabilis
ttgccgattgtcgaaaaacgcaaatctataccctggggagagcgtgaacgccaattccaactttatcgccgtggccgttatgtcgagtttaatttggtttgggatagaggcacgctatttggtttacaaagtggcggacgtactgaatccattttaatgtcaatgccaccattagtgcgctttgcatatgattatcgccctgaacctaatactcccgaagctaagctgtatactgattttttaattcacaaagagtgggtatag

SEQ ID NO: 317140 - DNA, 732 bp, Proteus mirabilis
atgagctttaaaattctgtttgatgatctatttaacgcctattcaggacaagaattaataccacaaacatttaccttccgcgactactgcttaaaaaatcaaacaaatcgtaacagtgatgagtggaaaatggcatggtgttactggcaggatctattatctgatttaccttctgccccatatttaccgataaagaattcatccattactgaacaacctcgttttacgactttccaacatcatgtttctatagcgcaatgggacaaattaaaacagaggtggaaaaagcatggtattacaccatcagcagggcttttaacactttttgctttagttttaggtcgctggacaaaatacccagcctttacactaaacttaactttctttaatcgtcaaccatggcacccagatgttacacaacttattggtgattttacctctgtactccctatagatatttatctagataacgactgtacattaaatgagtcaatggcaaaaatacagcgcagactttggcaacatttaagtaagtcccaagtaaatggtgtagagattttacgtgaatggggacgctataaaggggatagtagccaatctctgttacctattgtatttactagcatgttaggtatgacactagatggtgacaatattgatgaagcattaaatcagcttttcggccaacccgtatatagcttcgcgcaaacacctcaggttctgcatggatga

SEQ ID NO: 317141 - DNA, 204 bp, Proteus mirabilis
atgttttctattgatgacgcccgttatcaatggtctgattatcaaataaaaacacgattatcagagccggaaattgaatttcacactgtacaacctcaattacctgtaacaccagaaaatttagctgcgatagatcttattcgccaacgtcttatcaatgaatttgttggtggtgaaaaagagcaagctaaaaacggattttga

SEQ ID NO: 317142 - DNA, 474 bp, Proteus mirabilis
gtgaaactatcactaatggcagcaatttcgaagaatggagttatcggaaatggcccagatattccatggagtgccaaaggggaacaattactcttcaaagcgattacctataatcagtggcttttggtaggccgaaagactttcgagtcaatgggggctttacccaaccgaaaatatgccgttgtaactcgttcaagcttcacttccagtgatgagaatgtattggtatttccatctatcgatgaagcgctaaatcatctgaagacgataacggatcatgtgattgtgtctggtggtggtgaaatatacaaaagcctgatcgataaagttgatactttacatatttcaacaatcgacattgagccagaaggtgatgtctattttccagaaatccccagtagttttaggccagtttttagccaagacttcgtgtctaacataaattatagttaccaaatctggcaaaagggttaa

SEQ ID NO: 317143 - DNA, 195 bp, Proteus mirabilis
atgccagctcgacaaattttctttgaaggaaagttgtctaatcagaaagtgagctatgaaggggtattaattgcggatactaacacaaatcgtgtatggcaattacaatttattgctgaaaataaaagtaataataatcaagaagttattgattgtactaataggtatgtgaactcaattagtatcaatcaataa

SEQ ID NO: 317144 - DNA, 186 bp, Proteus mirabilis
atgaaagaaaatattgctgtaaaatcgatagaaaacatatggcaagacccacaatgtttttgtataagtgaatttattagagatgagtttttttattatttcaaatgtttagatattgtatcaatgaagaaaggaagtatagtcgatgcagatgactccaattggttgaataatatattgaattaa

SEQ ID NO: 317145 - DNA, 297 bp, Proteus mirabilis
atgtatgacgaaggtgatggtgtagcaaaagatcaacgtaaagcgaacgaatggtataaaaaagctgcgctacaaggtaatggcttggcacaaaataaccttgcaataaactattattatggcaaaggggttaaacgtaacttgaaagaagcctatgcatggtttgctgttgctgtagaaaatggtgaaggtgatgaggctatgctaaaacgaaccgcccgagccctcaatgctgcccaattagcagaagctaaacttttagctgcttcttatattgctaaatatcttgatgactaa

SEQ ID NO: 317146 - DNA, 330 bp, Proteus mirabilis
atgggattagatattgtcatgtttaaagatcaatttacaccacaacaaaaaatggatatttgcacttttgaagaaggtgatccgacggaaaacccttgggttaaaaggaaaactgcccaaatacacattgaaattgtcccccataatcctaattggcttatacaatttaatgaacaaaaatcgttaattcagaatgcattgtcagatatagcattatcaattgagcacataggatctactgcggttgcaggattggctgctaagccaataatcgatatcgatttaattatagaaaatcctaaagatgaatcatcttatatcctcaattag

SEQ ID NO: 317147 - DNA, 162 bp, Proteus mirabilis
atggctcaagggcagtttacattgcagtttgacctcggtaaaaatgtcaaaatagaaaaagccgatttatcaagtggacttctgaccattgctattgagtatgagttacctgaagaagaaaaacggcaaacaatagcgatagaaaataaagataaaagctaa

SEQ ID NO: 317148 - DNA, 354 bp, Proteus mirabilis
ttgaataaggttattaaatttatttttattgttctattacttgtagggtctattctgaatatacccattttatttgtagataatcatttttcatacacaaaacatgatttcattaggtataatttatttacctttgatgaaatcaaaaacgctcctattatttcaagcaattacattatattttacgactcacctgatggtgtagcaccaatgactaattcaattctattttcaaatgtaaatccaaaccgtaaaatagatggaaatgaatcctggcgtaaagacaatttatttatacaaataaaacaaattaatagtgaacatacgattttattcttagtggagaaaaattaa

SEQ ID NO: 317149 - DNA, 984 bp, Proteus mirabilis
atgttaaaaatggggggttggatggttattccatcaacactgtggcttgccttagattattttacgtattttttctcatatggtattttcttgcctttttggtctatctggttaaagggcgagggggttgatcctgcgatgataggcttactacttggggtgggcttaaccgctcgttttgtaggaagcttgattttaacgccggctgtaaaagatccatcaaagctcattactgcactgcgactttttgcttttttatctctcctatttaccgttgcatttatgttgggcactcattgggcttggctctttttggtaatgaccggatttaacgttttttttgcacccatggtgcctttgggagattcacttgcgggaacatggcaaaaacaatttcctttagattatggaaaaattcgggtttggggatctattgcatttattattagttcctcattattggggatattgattgatgcttttggacacccgattattctttatggattgattgccagtactcttgcattattccttacctcaatgttacgtccgaaaatcatgcctcaaggtaaggtcaaaaaaacggaacaccatcatgtttcatttatgaaactgatttcagatggcccagtctggcgttttctattatgtgtttctttactacaaggtgctcatgctgcttattacggttttagcgcactctattgggaaaaagcaggctatgatacagcaacgattggttatctttggtccttaggcgtagttgctgaagtggttgtctttatgtttagccgtcgtttattccgccgttggagtgctcgaaacttattattactttcagcatttgcagggctattgcgctgggggatgatgggcagttttacagcattaccggcacttattattgtacaaattttgcatagtggcacatttaccgtatgccatttagcggcaatgcgttttattactgcacgtcaatag

SEQ ID NO: 317150 - DNA, 648 bp, Proteus mirabilis
  misc_feature (620)..(629): n is a, c, g, or t
atggcgacgatcaaggacattgcaaaactagcgggtgtttcgcatggtacggtatctaacgtattgaataaacgtggaaatgtaagtgttgaaaaaattgaagcagtctatcaagctgctaaacaaatgggctatcaattaaatacacaagcccaactactaagaaccaatagaagccataaaattgcgatcttattaccccaactggtttctgaaaaatatgcgatcttctttaatgcttttagacagtcgatcgttaattttccagagatcagctacgatctttttttaacagatcttcttgagaccactgagcgtgatctactacaaaaaattgctgcaggtggctataagcaagtagtcaccgtaagttgtcttaaagatgctaaatactattttgacacgttaaaacttccaccttcacaaattatctttatttatcataagcccctcaatgcacaacgtttttttacgttagattttgcacaagcggcggagtcaatttgccagcaagtggcacaaacagctggcaaggtagtggggatttttggcgataatcaagatgaattaaatagtcaggtttttgctaatcaattgcaaatacggctttctcaaactgnnnnnnnnnnctcaaactgcacccgataa

SEQ ID NO: 317151 - DNA, 183 bp, Proteus mirabilis; identical to SEQ ID NO: 298826

SEQ ID NO: 317152 - DNA, 312 bp, Proteus mirabilis
atgagtgttataaaagattttttagaacaatatagcaagcagtatgattactattctgagttggcaaaaattggttcaaacttgcttgaactggaattagaaaagagagggattaaagccatagtttcattcagagctaagagaccagaccgattagaacaaaaacttaatcaaagaaatgaaaaatcagcatatgcagatgttgctagtatatatgaagatatagtcgatctggccggtgttcgggtggctttatatttcccaaaagatagagaagtagttgatgaaaccctgtctcttatacacatctga

SEQ ID NO: 317153 - DNA, 432 bp, Proteus mirabilis
atggcgtatgacggaacaattacatttacaggtaaagttgttgatcaaacatgttctgttgatacccaatcaaaaaatttagctgttattttgccgactgtttcagtcgcaacattaaataatgtagcaacaacagcaggcttaactccatttacaattaagttaactggttgttccacagataaagatggtgctaaaaacgttaaagtatattttgaaccatccgctgatactgatttaactacacataatttaaaaaatacagcaacaggaactaaagcaggtactgatgttaactcacaaaatgttcaggaagtacaaatcgacaatgctgatgtaaaccttccatattttgctcaatattatgcaaccggatcatctaccgctggggatgtaaaagcaaccgttcattacaccattgcctatgagtaa

SEQ ID NO: 317154 - DNA, 495 bp, Proteus mirabilis
atgttaggggcttgtgttgcttatttacccgtaaaagtaatcattaatcaaagagttaatagtgttattagtctcatcgccttaggggttatcttttggatagccgttcaaaaagatgtgattgctggttatccgaatttcaatacgttatatgtttgtcttagtgttgcactaattatttatacaggacaacatggcagtattattcaaatagtgttgtcattaaagccaatagtgatcattggattattatcttattcactttatttatggcactggcccttatttgctattgcgcgttatataggcgtatttaacaccgagatacaaaaagggttatttttagcattaacatttttactctctattttttcttaccttcttattgaaaaaccgtttagaagaaagcgtttgaactttaaatattcgataacattattgtttgttatacctattttattggctttaggattaaatgtcatggatttggagtaa

SEQ ID NO: 317155 - DNA, 423 bp, Proteus mirabilis
  misc_feature (411)..(420): n is a, c, g, or t
atgaatatagcgatgacagaaagatataaatggttattgtttttcctatttatcttattaacttattttattcctttagaaacgcgactgttatggcaaccagatgaaattcgttatgctgaaattagccgtgaaatgttagtttctggcaattggtcagtgccttatcttcttgatattcgttattttgaaaaacctgttttaggatattggatcaattgtattgctcagtggctatttggtgaaagccattttgcggtgcgtattgttgtagtaacatcaaccttattaacaggatggcttatttataaagcggcaatggtagtttggcgcaatagcgctcttgcttttaatgctatgaccgtttttttatcttcttttctggtattagcaataggtacttataatatnnnnnnnnnntaa

SEQ ID NO: 317156 - DNA, 480 bp, Proteus mirabilis
atgcagttatcccgtagtctgggattgagaaatgaagaagccgtgcagtcagtaaaatcattacggacctggcaacaggcgcttaaaaacggtaaagatcgcgttcatgtggtttttgggacaaaaggaggcagaccccgtgaagcattagtgccggataaagcccgtgtattaacattaattaataaagccattgaatatgcggataaacataacggttatttaattaatcgtccgtcattacattctgccaaagatcgttatattaatgtgatgcgacggataggcggatttattcacgaagaatcaaatcatggtttacggtatgcctatgctcaggatgttgaaaaatattatctcagtcagggattcagtcaaaaggaagcctatgcattaacctccatggatttagggcatggtgacggtcgtggcgattatattaaacgggtttatagtcagaaaggagatattgaggaataa

SEQ ID NO: 317157 - DNA, 537 bp, Proteus mirabilis
atgagaataagaaaaacaaagcttgccatcggtattgttgctgttattgctgttgtatcactagcaatgatcggcaaaaaagagaatgccaataagcaatttctctctgtagcaacggcctcaacaggaggaacttattacccgatgggagtcggtttagccaatgtttggagcacccacctcaaggatagaggaatacaagtcacagggcagtcctctgctggctcaattgaaaatatctatttaatgcaacaaaacgaagctcagctttctattctacaaagtctattagctgtggaagcttacgaaggtgtacgtaattttgaaggcaaaccagaaaaaaatctacgttctatatcaatgctttggccaaatgtagagcactttgtcttaatgaatgacaaagtaaaaacaggaacattggatgatattttcgggtattacactctttccatgggttttgtgctcgaccaattaccacagtattatcattacgccataaaaaaaggactcgttgatcagctggcatctgtttaa

SEQ ID NO: 317158 - DNA, 903 bp, Proteus mirabilis
  misc_feature (810)..(819): n is a, c, g, or t
atgaacgataaaaaaaccattaacacgcacacccctttacttacgaatattcgaaacctcttgatacaaggtagaaaaaacacagtacaagcagtaaacagcataatggtacaaacatattgggaaatcggtcgtttaattgttgaagatgaacaacatggagataatcgagcaaaatttggaaaaagagttttacaaactttatcagctgaattaacaaaagaatttggtaaaggatttgatacctcaaatcttcgatatatgaggaaattttatctcacatttccaattcgtgacgcagtgcgtcacgaattaagttggactcattatagaacgctactaaaactaaagaatgaactcgcccgtcaatggtatatagatgaagcaattacacaatcttggtccgcccgtgcattagaaagacaaattagcacattatattatgaacgattactttcaacacaggggaaacagcaaagtatttatcctgtattagctgaaggaaaacaaaaaactactgaactcgcaacttcagtcaaagattatttacgtgatccctatatttttgattttctaggactacctagtagtatcctgcaagaaaataaactagaacaaactttaatagaaaacctaaaagaattcttactcgaattaggaaaagggtttgcttttgtcgaacgacaacaacgtattagtactaatgatggtgatttctatattgatttagttttttataactttcacttaaaatgctttttgttaatagacttaaaaatgcataaactcacccatcaagatgttgggcannnnnnnnnncccatcaagaagttgggcaaatggatatgtatgtccgcatgtatgaagagaaaaaacgccgtcatgatgataatccaaccatag

SEQ ID NO: 317159 - DNA, 216 bp, Proteus mirabilis
atgtatgtccgcatgtatgaagagaaaaaacgccgtcatgatgataatccaaccataggactaattctttgcactgaaaaaaatcacacagtagccaaatactccattctaaatgaaagtaaacagctattcgcttcaaaatatatgcttgaattaccaagcgaaaaagaattaattttacaattagaaaaagaacgccaaaaattatttgaataa

SEQ ID NO: 317160 - DNA, 1590 bp, Proteus mirabilis
  misc_feature (1568)..(1577): n is a, c, g, or t
atgaaaaataaaaatttgttatttttaagtgctgctgtcctttcagctatatatggctcagccgtagcggctgattgcgatagtactttaaacatttgtgaaaccgtaaacattaataatggcgatacagcgcaaataaataaagatgttaatgtatcacaaggtgacggtgtagtatttaatggctcatcaacagaatataaagctcaagcaattacaaaaaatattactgttactggtaatggagcaaatgcaattaaaataaatcagggcgctacttttagtagtaatattaatttaaatggcgctaacgttactagtgaaaatggtacagcaatattagttgaaggtaactttcctaaacgaggaacaggtgtttatatccgagatggcgctattatcagaggaaaaaccgcagcgattgattttagcactttaaaaacaggctttagaagtgatgttaatggcgagatccacggtgatattttagggaataatcatgtggataccaaaatcaattttgcttatcagggaggagcacaaaatgcattatttgacggctataaaattaccggtgttcctttaattgaaaaccatggcaatttaactatccaaggtaaagataaaaccattcaatgggaaggtaacttcatgaataaggaaaatagccagcttattttccgccttgatgataataccaatactgatgaaactatcttacatgttaccggcgatgtcacctttaaaaaaggtagccaagcaaaacttgattttaaaggcaccagtgttgataacatcattaataaagatattgtattaattgcttcagactcggcaattaaagatgaagcgggcattacagtgactgatgcaaatgccatagcgccagatatttcacctttattagaaaaaaccgattcatggttagaaacgacaccaccaaatattagcggtggtgtcagtggtaatcaattaattgcgcgttatggtattagctacgaagggggggataattttattagcgctgctgaacgtggcaatgtcacagagaatggattagcagcagctaaatttattattccaacagtattaaatgaatttaataatacacgtagccagatttcagatgaagcattaagtttattagtcgccgctggtaataatgataataatattgctgcactatcaaatgatctggcgcccattgctgacggtagtgatattcaagcaggattaatcatggttgaagatatgcgcaacaatattgctcatcgctacttacgctatgataatcagctccccattgaagaaagagaaataggttggaatagctgggcaaatattctgtacggttatggtacgcaaagtcaacaaggtggaattaacggctacaatacttatcgcactggtattcaaatcggtactgattatgaaataaatcaagatgcgctaattggcgtttctttagcatataactacgctaaagccgatgctaaacaacgtaatgcaagcaaagaaattagccattttgaatttatgccttatgccggttggtatagtgatatatnnnnnnnnnnatattattcttaa

SEQ ID NO: 317161 - DNA, 207 bp, Proteus mirabilis
atgaaaacatggttaatgggtgtttatgagttttttttacgctataaagtcgtttggagtgaaacttggaagatccgccaacaattagatgcgcctatacgtgaaaaagatgaacatgaatttttacctgctcatttggaattaattgaaacccctgtatctaaacgtccacgtttaatcgcttatttttttatcaattttgggtaa

SEQ ID NO: 317162 - DNA, 417 bp, Proteus mirabilis
atgcctgtggaaaaagttattcatgctgcgtcggcagcgtcagatgtgtataagagacaggaattacgtgaaggttataacacaattgttggtgaacaaggggctggtttatctggagggcaacgccagcgaatcgctattgctcgagctttagtcaataatcccaagattttaatttttgatgaagcaaccagtgctttagattatgaatctgaacatgtcattatgcgtaatatgcacaaaatttgccaaggcagaacagtcattattattgctcatcgtttatccacagtaaaaaatgcagatcgtattattgtcatggaaaaaggacaaattatcgagcaaggcaaacacaaggaacttctctctgatcccgaaagcctatatcactatttacatcaattacaatcagattaa

SEQ ID NO: 317163 - DNA, 405 bp, Proteus mirabilis
  misc_feature (384)..(393): n is a, c, g, or t
atggctgtttcacctcaaatgacaaatatatgggataaacaattagcaggctatgttgcagctggatttaaagtaacggtgttagcaactataggtcaacaaggaatacaattaatacaaaaagccgttatgattattaatctttggctgggtgcacacttggttatttctggtgatttaagcattggtcaattaattgcctttaatatgctagcaggacaaattgttgctcctgtgattcgtcttgctcaactttggcaagattttcagcaagttggtatttctgtgactcgcttaggtgatgtacttaattatcctactgaaagttatcaagggaaattaacattgccagaaattaacggcgatatctcatttcgtaatatnnnnnnnnnnatattaacttaa

SEQ ID NO: 317164 - DNA, 264 bp, Proteus mirabilis; identical to SEQ ID NO: 301818

SEQ ID NO: 317165 - DNA, 318 bp, Proteus mirabilis
atgtctactgcaacaaatctgaatgaactacaggaacaagttcgctcccgctataatggattaagtaaaaggctacagcaggttgcacattatcttttggataataaaaacagtgtagcatttgatacaatcgcgatccttgcagataaagcaaatgttcctccatcaacattaatccgttttgccaatgcatttcatttcaaaggatttaatgaaatgaaacttttatttcaacgtcatttaatgggtgaaatggatgccaaacagcacatctctatgtgtaatattcctaagttgttctttatacattccccctag

SEQ ID NO: 317166 - DNA, 294 bp, Proteus mirabilis
atggtttggctaagagtatgtatgtctgttttagccgtaatttggctaagaaaacggatatccctcaatccatgtttaaataaaatagaagctaatgagataatcaatattttacttaaatattcgcttagcatactgatgcgcacaaaggatgctttggcgatcactacatttaatacgcctattggtgattctattgtaaagttaatagccgaaacaggaacacctgattctgtttcccaggaggtaatcatgtttaaatctatattctttgtatcagtggtttttagatga

SEQ ID NO: 317167 - DNA, 549 bp, Proteus mirabilis
atgtctgaacactttcaaggtaaatttgaagcagaattgaaataccacttaaaacgacctcaagattttattgatgcattacaactcgctggagcaactttatttatatcgaaaaatgatgaaacagattggtatttagaacatcccaatacacctttccctgctccctctataagtttgtgcgtaagaaaaatggtcccctctggtatcaatttattaattgtaaaaggcccagaacaagcccaatgtgaagcagtaaaaatagaagatgcagaaaaaacggtttcgatgtttaaaacattaggttatcactgtattttaaactatacaaaatcccgtcaaatctactttctagagcaatttcatatcactatcgataaattagacaatcttggttactttgctgaatttgctattatgactgatgatgagagtaaacttgctgactataaattacagttacataacttagcatatcaatttggctttaatgatagtgagcaagagcatcataactataaaacaatacttttaagtaagttagcttaa

SEQ ID NO: 317168 - DNA, 459 bp, Proteus mirabilis
  misc_feature (383)..(392): n is a, c, g, or t
atgtcttataccactttttcacaagttagaaatgatcagcttcaggagcccatgttttttgggcaacctgttaacgtagcgcgttatgatcagcaaaagtaccctatttttgaaaaactaattgaaaagcaactctctttcttctggcgtccagaagaagttgatgtttctcgtgatcgtattgactacaatgcgcttcccgatcacgaaaaacacatttttattagtaatttaaaatatcaaactctgcttgattcgatccaaggtagaagccctaacgtggcatttttacctttaatttcgattccagaattagaaacttgggtagaaacatggtcgttctctgaaaccatccattcacgctcttatacccatattattcnnnnnnnnnnattcgtaatatcgtcaacgatccgtcggtcgtttttgatgatattgttgaaaatgaagagattttaa

SEQ ID NO: 317169 - DNA, 198 bp, Proteus mirabilis
atgttgtgggcaatgggcgcattattaaccatgttttatctcatcaacatctttaatgatactaaatcagatatccgacaagaatatagtaataactataccgatttattgggcttctttcgccaaacctcgagtactatccgcgatttgcaatatttagcagagcggcatcaagagcaactattcttttttttatga

SEQ ID NO: 317170 - DNA, 600 bp, Proteus mirabilis
  misc_feature (544)..(553): n is a, c, g, or t
atgtctatttgggcagatgctaatttttatcgccctattactatgcaacgtgcaaacttaccactgtcttatccaatgactgcacgtaaattccttgaacggcatggttttattaatcaatctgagtatgagcagcgcttaatgagcgagggtaatcctgcggcacagagtatcacctacccgcttgcacctcttgattattctaaagatgaaagctcatataacttacttatgattgtggttgatggattaggtaatgaagacgttgccaaactaccgagcttgcaacaatttgctgataataacctctctttctctcaacactattcagcaggcataaataacgaaacggcgctgtttggattattttatggcatttcaccgtcttacttggatagtgtgttaagtagccgcaaaaactcagcgctctttgacgctttaaattatcgtcactatcaattagcactattttcaactaacggatttaaatcgccattatttacacaagcggtgctggctgattactcactacctacttcacgtnnnnnnnnnntgaggataacgacacaacgattaatagttggcgttcatggttgttaa

SEQ ID NO: 317171 - DNA, 603 bp, Proteus mirabilis
  misc_feature (540)..(549): n is a, c, g, or t
atgagtacaaaaaatttatcaacacccttgctgatggtagcaactgtgttagcagggatgctatcaccaatgcagtctgcggtgaatgggcaactgggacatgtattaaaagacggtaatgctagtgcagttatctcttttgccagtggtttagtggtcatgttttttatcattatgtccaaaaaaaaatatcgccagcaatttgcttctattccgacattaattaaaacacgtaaaattccattatggaattggtttgctggcctctgtggcgcaatggtggttttttctgaaggagcatcagccagtgcattaggaatagctacattccaaacagcattaatttcagcactgttattatcaggtttattatgtgaccgctttggtataggtgtggatgagaagaaatacttcaccccatatcgtgtattaggtgccgtattagctgttgttgctactctttttgtcgtttctccgcagtggcattcaacctcttttatttacttagctattctaccttttttagcgggtttattagcnnnnnnnnnncgggatggcaaccagcaggtaattcaaaagtggctgaagcaacaggttcgatga

SEQ ID NO: 317172 - DNA, 483 bp, Proteus mirabilis
atgtactcacaacgttacccgaacgcatttaaaaagtaccaacctgaatgcttaaacgttgacgatgagtgcaccaaagagcagctcgtcaatgcttatgataactctattctttatactgattactttattgatggtgtacttaataccttgcgtgataaaaaagccattgtgttttatacctcagatcacggcgagtcaatttcagaaaaaggtggcttacacggcacaccaaaagaaattgcaccaccagaacaatttaaagtgcctttcttagtgtggatgtcagatagctatttagctgagcctgaaaataaacagttatttgataatctcaaacgaaatcaagataataaccggactttctatcatcataatatttttgactcgatattaggctgtctaggttactcatcacccgatggggggattaataatcaaaataatctctgttttggtgacatagctagcgaagcacattaa

SEQ ID NO: 317173 - DNA, 276 bp, Proteus mirabilis
  misc_feature (244)..(253): n is a, c, g, or t
atgattaacggctggactggcaatatactaagaattaatttaactaccggtgccatctctcgcgaaagctcaagccaatacaaatccttaattggtggtatgggctttggctacaaaattatgtatgaagaagttgcacccggtgtaaaaccttttgatgaagaaaacaaagtggtatttgcggtaggcccgctaacaggatcaggcgcaccctgtagctctcgcgtcaatatcacctctcttnnnnnnnnnnctttcaacctttactcgcggtaa

SEQ ID NO: 317174 - DNA, 3066 bp, Proteus mirabilis
atgccgatatttcgttttactgcgcttgcaatgacattggggttattatcaaccccctatcatgttattgctgccaccagcaatcctgcatttgatcccaatcatcttatgcaatcagaaatctatcattttgcacaaagtgatccattagctgatttttcatcagataaaaattcaacactaactttatctgataaacgtagcattatgggaaaccaatcccttttatggcaatggaaaggtggcagtagttttactttacataaaaagcttatagttcccacagataaagaagcctctaaagcatggggacgcgcttctacacctgttttatcattttggctttacaacgaaaaacctattgatggttatctcactgttgatttaggggaaaagctcaatgccaccagcgaagcccaagctggctttaaagtaaaactaaatttcactggctggcgtgctattggtatctctttaaataacgatcttgaaaatcgtgagatgactttaaatgcaacaaatacatcatccgatggtactcaagatagtattggtcgctctttaggtgcaaatgtcgacagcattcgttttaaagccccttctaatatcaatcagggtgaaatctatatcgaccgtattatgttttctattgatgacgcccgttaccaatggtctgattatcaaataaaaacacgattatcagagccggaaattgaatttcacaccgtacaacctcaattacctgtaacaccagaaaatttagctgcgatagatcttattcgccaacgtcttatcaatgaatttgttggtggtgaaaaagagacgaatcttgctttagaagagaatatcagcaagctaaaaacggattttgaggcactgaatattcgccctctttcggatggaggaatgcaaggtcgacatcttatcaccgataaacaaactatcatctatcagccagaacagcttaattctcaagacaagcaactttttgataattacgtcattcttggtaactacaccacattaatgtttaatattagccgtgcttatgtgctcgaaaaagatccaacacaaaaagaacagctaaaacagatgtacctcttgatgaccaagcatctattagatcaaggatttgtcaaaggtagtgccctagtaaccactcaccactggggatatagttcacgttggtggtatatctctacattattaatggctgatgcactaaaagaagctaatctacagacagatgtctatgattctctactttggtattcacgagaatttaaaagtagttttgatatgaaagttggcgcaaatagctctgatttagactattttaataccttatctcgtcaacatttagcgctattattacttgaacccgatgatcaaaaacgtattaacttagtcaattcttttagtcattatatcactggtgccttaactcaagtaccaccggggagtaaagacggtttgcgtcctgatggtacggcatggcgacatgaaggtaattatcccggctactctttcccagcatttaaaaatgcctcacagctgatttatttattacgagaaacaccttttgctgtaggtgaaagtggctggaataacctaaaaaaggcaatgatttcagcatggatctatagtaatcctgaagttggcttacctttagcgggaagacacccctttaactcaccttccctacaatctatagcacaaggttactattggctcgcgatgtctgcccaaccagcgccagataaacagttagcatctatttatttagcaattagtggtaaatcgcgaaatgaatctcccactatttttggtgaagagataacgccagcgtcccttcctcaagggttctatgcctttaacggtggtgcctttggtattcaccgttggcaagacaaaatggtgacattaaaagcctataataccaatgtatggtcatctgaaatttacaataaagataaccgttatggccgttatcaaagtcatggtgttgctcaaatcgttcgcaatggctctcaactttcacaaggctatcagcaagaaggctgggattggaatagaatgcctggcgccacaaccattcatcttccgcttaaagaacttgatagccctaacccacacaccttaatgcaacgaggtgagcgaggatttagcggcacatcagcccttgaagaaaaatatggcatgatggcgtttgatcttctttatcccgctaatcttgctcgttttgatgctaactttaccgctaaaaaaaccgtcttagcggcggataaccatttaatttttgtcggtagcaatattaatagcagcgataaagatcaccctgtggaaacaacgttattccaacatgctattacgcctgagttaaacactatttggattaatggccaaaaaatagaaggttttccttatcaaactacgctaaaacaaggagattggataattgatagtaatggtaacggttatttaattactcaagcagaaaaagtgaatgtcagccgccaacaccagacttcggctgaaaataaaaatcgtcaacccacgcaaggaaattttagctccgcatggatcgaccacggtattcaacccaaagatcatagttatgagtacatggttttcttagatgcaacaccggaaaaaatggcgcaattagccgagaaattccgtgctaacaatgggttataccaagttattcgtaaagataaagatgtacatattatttacgataaactcagtcaaataacaggttatgcattttatcaaccagcagtcattgacgataaatggatcaaaaaagtcgataagccgtccatcgttatgacacatcaggaaggaaatatactgacggtgagtgctgtaacacctgatttaaatatgactcgccaaaaagcggcaacccccgtcaccattaatgtgacagtgaaagggaaatggcaacccacagctcaagacagtgaggtaaaatataacgtttctggggataataccgaacttattttcaccagttactttggcattccacaagaaattaaactctctcctctctcttga

SEQ ID NO: 317175 - DNA, 516 bp, Proteus mirabilis
  misc_feature (477)..(486): n is a, c, g, or t
atgctaataaaaaattctttagcttatgcgattacactaagtttctgcttatccttacccgcacaagcattaccttctctttctcatgaaccttttggcgatctttatctttttgaagatgaaatgccaaataccttgagcacctcaaatgaccatcagctatcactaagtaaagagcatgctaaagatggcgtacagtcactcaaatggcagtatcaaccccaatcaacattaacacttaataatgaagttaattatcaagatgataaaaatacagcaacaccactcacttttatgatgtggatttacaatgaaaaaccacagtcaacgccccttacattacaatttaaacaaaataatcaagtagcattaagttttaaaacggaactgaatttcacgggttggcgaggtattgcagttccttttcgtgatatgaaaggctcagcaacaggcaaattagataaattagtcattacnnnnnnnnnngccagatcaagcaggtacgcttttttttga

SEQ ID NO: 317176 - DNA, 378 bp, Proteus mirabilis
  misc_feature (32)..(41): n is a, c, g, or t
atggttactgtctcttatacacatctgacgannnnnnnnnnatggttatttttgctaacatcaaaaatgatttcttggcgtaaattctttgttattaccggatttttactgcttttcctcgccgtttccttgctattaaaagcagtagaagagatagctaatctacttattgaaatggatattgaattacctgactttttgatttatccactatgggatcttagccatattctggatgattcaagcatttttggtaatttcttagtttcattctttgcttatcgctcacaacccatcggtttaagtgttgttacttttattgtgttttggttggtggtcgcactgttatttaaacaaggggatcgccatgccaaatag

SEQ ID NO: 317177 - DNA, 756 bp, Proteus mirabilis
atgaaacgccaagttttggtaggtttaggttttgcgctaggattattttgccataacagctttgctgtagagcttcatctttatgctggcgcaggattaaaacagcctgtagagcaagtagttggtctatttgaaaaagaaaccggtaatacagtgactatcgaatatggcggttctggccaaattcttacacgctttaatctcactcaacaaggtgatctgttttttcctggctctcaagagtatgtagagaagttagcgaaacaaaatcaggtggttagccaatatcctattgtgcgtcatattcctgttattgctgtcagaaaagataaaatcggtgagatcaaaactattacagatcttgcaaatagttcattgaaattaggtatgggagatgcaaaagcaattgcattaggtaaaagcggtgaacaattaatcgaagcgtcaggccaaggtgagcagttacgaaataaagtggttgttcgtacagcaaccattaaacagttacttatgtatttattaaatggtgaggttgatgctgccattattggttacgctgatgcaatgaaaaatcaagataaattagttttattacccatacctgaaggaagccccgaagaaattgcgacattagcggtattaaaaacttcaacaaatcccacacaagcacaacaattggctgattatttttctcgtcccgaaggaataaaggcttttactgattatggttttctacctgttatttcaaaaccatag

SEQ ID NO: 317178 - DNA, 381 bp, Proteus mirabilis
gtgactcgtccaagaattggtatctcactaacggtaacactagagccaatagtaacggaagaaactacaccatacgaaagcagtaaagagttagagaatacaagggatcaacaaccaaaaatgatttctagcaatagcataatccccagaaaaaaattattgattattttggggagtatcctaattctactgtctacgatagcgttactgatagtgcatagtcatgaatcacatagataccatagtcacttccagctccttggtcactatgatagttatcatttttataaaatgactacagataaagtggcatttgaagaagtggttgatcctgttgaatcggcggtacctaaatgcatgacaataaaagaacgttattaa

SEQ ID NO: 317179 - DNA, 453 bp, Proteus mirabilis
atggggttaattattataaaaatattagcaccgggcttttattctcgccaagatattaaaaccccggttaaaattgccattgcaacgcttattttgactcaattaatgaaccttgcttttgttgggagtttaaagcatgtgggactggctctttcgattggattagccgcttgttttaatgcaggaatgctattttggcaaatccgtaaacaagatatttatcaaccattagcgggttggcctatctttttattaaaacttgctattgcgttagctgtgatgagtgctgtattagtcggcatgctatgggtgatgcctgattggcaacaagggaatatgctaatgcgtattttacgtttattacttgttgttgtagctggtgccgcaagttattttgtcactttatatgctgttggatttagaccgaagcatttttctctacgcgcattataa

SEQ ID NO: 317180 - DNA, 246 bp, Proteus mirabilis; identical to SEQ ID NO: 300218

SEQ ID NO: 317181 - DNA, 270 bp, Proteus mirabilis; identical to SEQ ID NO: 300219

SEQ ID NO: 317182 - DNA, 174 bp, Proteus mirabilis; identical to SEQ ID NO: 300220

SEQ ID NO: 317183 - DNA, 327 bp, Proteus mirabilis; identical to SEQ ID NO: 300221

SEQ ID NO: 317184 - DNA, 339 bp, Proteus mirabilis; identical to SEQ ID NO: 300222

SEQ ID NO: 317185 - DNA, 498 bp, Proteus mirabilis; identical to SEQ ID NO: 300223

SEQ ID NO: 317186 - DNA, 297 bp, Proteus mirabilis
atgaatccttacgaatcattttccatcattgaaatatcaccaaaagaattagaagtcatatataaagaattaactatgttatcaaacaacacgctcttaattgatttatttagcgagtttataattgacgcatatgacatactatacgactcaacacttcttgttgaaaaaataacaagtgaatataaagtagatagtttgtatagcacagtagtgaatttaaataatgcttgtgattcatttttagaaaggcaagaagaaataaaaaataacttatcaaaccacaccctgcactag

SEQ ID NO: 317187 - DNA, 1305 bp, Proteus mirabilis
gtgactgatgcaaatgccatagcgccagatatttcacctttattagaaaaaacagattcatggttagaaacgacaccaccaaatattagcggtggtgtcagtggtaatcaattaattgcgcgttatggtattagctacgaagggggggataattttattagcgctgctgaacgtggcaatgtcacagagaatggattagcagcagctaaatttattattccaacagtattaaatgaatttaataatacacgtagccagatttcagatgaagcattaagtttattagtcgccgctggtaataatgataataatattgctgcactatcaaatgatctggcgcccattgctgacggtagtgatattcaagcaggattaatcatggttgaagatatgcgcaacaatattgctcatcgctacttacgctatgataatcagctccccattgaagaaagagaaataggttggaatagctgggcaaatattctgtacggttatggtacgcaaagtcaacaaggtggaattaacggctacaatacttatcgcactggtattcaaatcggtactgattatgaaataaatcaagatgcgctaattggcgtttctttagcatataactacgctaaagccgatgctaaacaacgtaatgcaagcaaagaaattagccattttgaatttatgccttatgccggttggtatagtgatacattattcttaaacggtaatttaaatattggttattacactgtcgatagtgagagggatatcggtggtaatacgggatggcaaggaaataccaaagcaaaaggtgactactctggtgtgcaattaggctatcagattaacgctggcacctatttggattttgattttatccatattaaaccgatgctaacttaccaatatcaatggctcaatattgattcttgggaagaaacaggctctacattatctatgcgtacttatggccaacgctacgcagttaatcaattaggtggctctgttgctttatggaatgactaccaaacctcttatggcaaattaaccccttctcttaaccttcgttatatcaaagatattgcaggtaataacgatattaatcaacgccacagccttacctattttaatactggaggaagcaccttcgatattaaaggaaataccgttggtggtgacatcattagtgctgaattaggtgcaaaccttgatattacccaatcgttaaatttaggtacaacaatgggatatcagcgttatgacaaattcaatgaagggcgtatcggctttactgttagccagcgtttctaa

SEQ ID NO: 317188 - DNA, 828 bp, Proteus mirabilis; identical to SEQ ID NO: 306506

SEQ ID NO: 317189 - DNA, 534 bp, Proteus mirabilis; identical to SEQ ID NO: 304386

SEQ ID NO: 317190 - DNA, 306 bp, Proteus mirabilis; identical to SEQ ID NO: 297209

SEQ ID NO: 317191 - DNA, 729 bp, Proteus mirabilis; identical to SEQ ID NO: 293762

SEQ ID NO: 317192 - DNA, 306 bp, Proteus mirabilis; identical to SEQ ID NO: 297209

SEQ ID NO: 317193 - DNA, 306 bp, Proteus mirabilis; identical to SEQ ID NO: 297209

SEQ ID NO: 317194 - DNA, 306 bp, Proteus mirabilis; identical to SEQ ID NO: 297209

SEQ ID NO: 317195 - DNA, 399 bp, Proteus mirabilis
atgaaacaacaaaactggacactccagttaccagaaacgataagggcggcgatgagtcgccctttttcatggggtgaatttgattgttgtatttttgcctctgaatgtatttacgcacaatgcggtttctcgccaataaagccttatctcaatcactataaaaccaaagctgaagccttcaatctgatcaaatctaaatttggctccttagagaaagccgtttcacgctatttcaagcccattgagattgagcgcgttcagcgtggcgaccttgtactgttcaaaggtgaggacggtgacagtttagccgtggtctgggcgggacattattggggcgtcaccccacaaggcgtgaagccggtgcagattaacccaatcaaagcgtggagagtggaataa

SEQ ID NO: 317196 - DNA, 399 bp, Proteus mirabilis
atgaaacaacaaaactggacactccagttaccagaaacgataagggcggcgatgagtcgccctttttcatggggtgaatttgattgttgtatttttgcctctgaatgtatttacgcacaatgtggtttctctccaataaagccttatctcaatcactataaaaccaaagccgaagccttcaacctgctcaaatctaaatttggctccttagagaaagccgtatcacgctatttcaaatccattgagattgagcgcgttcagcgtggcgaccttgtactgttcaaaggtgaggacggtgacagtttagcggtggtctgggcgaggcattattggggcgtaaccccacaaggcgtgaagccggtgcagattaacccaatcaaagcgtggagagtggaataa

SEQ ID NO: 317197 - DNA, 171 bp, Proteus mirabilis
atgacggtcgtcaatcatattacggtgacaggaaatggtgacgctgtacttgcgcaggcaatgaaggaagccgcacaacaagggacagaagccggcgcacagaaagctcacgcgatgatgttacaagactttcaaagtaatggcgcagcacgcagaacattaggagtttaa

SEQ ID NO: 317198 - DNA, 168 bp, Proteus mirabilis; identical to SEQ ID NO: 309628

SEQ ID NO: 317199 - DNA, 954 bp, Proteus mirabilis
atgcataatgtactagaacaaattgagttagtcgctcaaagtgacagtactgtacttatcttaggcgaaacaggtactggtaaagagttaattgcacgagcgatccatcgtttaagtcatcgtaaaaataagacgatgataaaaatgaattgtgcagcagtaccttccggtctgttagaaagtgatctttttggacatgataaaggcgcttttacgggtgcaacacatgcccatgtgggtcgatttgaaatggcagataaaagtacgctttttctcgatgaaattggcgatatgcccattgaattacagccaaaactattacgggttctccaagagcgtgaaattgaaagattaggtggtaataaagttattcctgtagatgtacgcttaattgcagcgaccaataaagatttatgtgaactgacggatgaaggggaatttcgagaagatctctattatcgtctgaatgtttttcctattattatcccgccattacgggagcgacctgaagatatccccttattggcaaaatattttacgcaaaaaattgcccgccgcatggatagaaaaatagactgtattccaacacatgctttggagcaattaacccattatccttggccgggaaatgtacgagagcttgaaaatattattgagcgtgcggttattttaactcgaggctctacgctaaatttgcaactaaaagagttaaatatcaataaaccatctcgtttaaaacaagtgctttcgcaaccatcagccatagaaaaaaagatgcaaactagcgcacctgaaagtgatgatgaagagcgtgagcggataatacaagcccttagagaaactaacggtgtagtggctggtgccagaggtgcggcattaaaattaggattaaaaagaaccaccttattatcacgtatgcaacgcttaggtatttccattcctgaaattctttag

SEQ ID NO: 317200 - DNA, 507 bp, Proteus mirabilis
  misc_feature (447)..(456): n is a, c, g, or t
atgaaattaagcagtaacaatgctgaaactatggagagccttcgcagtgagcggaatcaatatcgtatacttgtcgatattacaaattctgtattagcgcatctagacatggatggcctcatttctgaagtatctaaagaaatacatcgttttttcggacttaatcatattagtctgatgttatgtcgtacttcatcacaaaatagtcatgaaggtattctttattctagtcgttatcagacaggaaaatctgtcattcgtcaacaacgtaagttcagtagcgccaataacaaagccgaagaaattattcatcaaaacaaacccgttttaatcgatatcaataaagaagatcaagacgatgttttgattaaacgtctcgtaaaacaaaatatgcagacggctttgttattgccactggcttttaaccgtaaaccgctaggtttattnnnnnnnnnnaccttaaagatagccttaagaacgaaaatatttggcttaatgaacaaataa

SEQ ID NO: 317201 - DNA, 252 bp, Proteus mirabilis
atgtatttatcaaggatctcaatagactattctgctgattatttacactcactattagcgaataagttgccggacggatatacaattcatcagttattatggcggttgtttactgaagaaaaagaacgctcatttttgtatcgattagaaataggaaaaaatggtaaacctattttttatattctttcttctatagctccaactactaagaataatttttttaagagcaaatccaacggtttgtattactga

SEQ ID NO: 317202 - DNA, 423 bp, Proteus mirabilis
atggtttcagcaccagtagaagcattaggctttgaatttgttggtcttgagtttattcgtggtcgagtatcaacattgcgtatctatattgatagtgaagaaggtatcactgttgatgattgtgctgatgttagccaccaggtcagtgctgtgctggatgttgaagatccaattcaaacattttataaccttgagatctcatctcctggtttagaaagacctttattcactacaacgcattatgagcaatttatcggcgaagaagtcgccgttgtattactaattgcgatgcaaaaccgccgtaaatggcagggcattattaagtctgtcgctggcgaaatgatcacggttactgtggatggtaaagacgaagtgttcgcactgagcaacatccagaaagctaacctggtaccccacttttaa

SEQ ID NO: 317203 - DNA, 1509 bp, Proteus mirabilis; identical to SEQ ID NO: 294561

SEQ ID NO: 317204 - DNA, 2751 bp, Proteus mirabilis
atgacagatgaaacagtaaaatcacttgcagaagagattcagacaccggttgaacgtttggtacagcagtttgctgatgccggtattaagaaaaccgtctctgattctgtctcccaaaaagagaaagaaaccttgctggcttggttgaaccgtgataaagagtcaaccagccaaccagaaaaattaacgttacagcgcaaagtgcgtagtacgttaagtgttcctggtacaggtggcaaaaataaatcagtagccatcgaagtccgcaaaaaacgcacttatgtgaaccgtgatgcagttgaaaaagcacaagcggcagagcaagctcagcgtgaagcggaagaaaaggcgcgtcgcgaagcagaagaaaaagcacagcgcgaagcacaagagaaagcacagcgcgaagctgaagaaaaagcaaaacgtgaagctgaagaagccaagaaaaaggctgaagaaaaggcaaaacgtgaagctgaagaagcaaaacgtgaagcagcggaattagctaagcgcgaagcagcggaaaaagacaaagtgaaacaaaacgagaaaccaaaagctgataaggctgatcaggaaaaagcacgtcgcatagccgaacaggctgaactgaaacgtaaaacagaagaagctcagcgtcgtaaagctgaagaagaagctcgcattgcagcagaaaaagcgcgtcgcttagcggaagaaaatgctgaaaaatggacttcagatacgtcatctgaaacagaaggtactgactatcatgtgacgacatctcgctatgcgcgtgatgcagaagatgaaagtgatgctgaggttgaaggtggccgtggccgtggtcgtgcagcaaaagcccctcgtccaaagaaaaataaccgtcactctgaaaaagcagatcgtgaagaagctcgcgctgctggccgttctaacaagaaaggcaaaggacgtaaaaacagcacattacagcaaggcttcaataagccagcagctgctgtaaaccgcgatgttgtcattggtgagactatttcagttgctgatttagcaaacaaaatggcagtgaaaggttctgaagtcattaaaacaatgatgaaaatgggtgcaatggcaaccatcaatcaagttttagaccaagaaacggcacaactggttgcggaagaaatgggtcacaaagttatcttacgtcgtgaaaacgagttagaagaacaagtgatgaacgaccgtgatactagcgatgaaatggctgtatctcgtgcgcctgttgtgactattatgggtcacgttgaccatggtaaaacctctttactcgactacattcgctcaacgaaagtggcttcaggtgaagcaggtggtattactcagcatatcggtgcttatcacgttaaaaccgacaaaggtgaaattaccttcctagatactccaggtcacgccgcatttacttcaatgcgtgcccgtggtgctcaggtaacggatatcgttgttctggttgttgctgctgatgatggtgtgatgccacaaactatcgaagctatccaacacgccaaagcagcaaatgtgcctgttgttgttgccgtgaacaaaattgataaaccagaagctgatcctgatcgtgttaaaactgagctgtctcaatatggcattctgccagaagattggggtggtgagactcagtttatccatgtgtcagcaaaacaaggcttaggtattgacgagttgctggatgctatcttattacaagcggaagttcttgaactgaaagcagtaaaagagggtatggcaagcggtgttgttatcgaatcttacctcgataaaggccgtggtcctgttgcgactatccttgttcgtgaaggtactttgaataaaggtgatatcgttctgtgtggctttgaatacggtcgtattcgtgcaatgcgtaacgaattaggtaaagaagtacaatctgccggcccatcaatgcctgttgagattttaggtctgtctaatgtaccttctgcgggtgatgaagcaaccgttgttcgtgatgagaaaaaagcgcgtgaagttgccttatatcgtcaaggtaaattccgtgaagtgaaactggctcgtcaacagaaatcgaaactggaaaacatgtttgctaacatggaagaaggtaaagtttctgaactgaacatcgtactgaaaacggatgttcaaggaacttgtgaagccatcactgatgcattagttaaactttctacagatgaagttaaactgaaaattatcggttctggcgtgggtggtatcactgaaacagatgcgactttagcggctgcttctgatgctatcattcttggtttcaacgttcgtgctgatgcttctgcacgtcgtattatcgaacaagaaagtgttgatttacgttactactccgttatctatagcttgattgatgaaattaaatcagcaatgagcggtatgttagagcctgaatacaaacaagaaatcatgggtcttgctgaggttcgtgatgtatttaaatcacctaaattcggcgctatcgcgggttgtatggtggttgaaggtaacattaaacgtaacaatcctattcgcgtattacgtgataacgtggttatttacgaaggtgagcttgaatcactgcgtcgctttaaagatgacgtcaacgaagtccgtaatggtatggaatgtggtatcggtgtgaaaaactacaacgatgtccgtgttggcgatatgattgaagtgttccaagttatcgaaattaaacgttctatcgattaa

SEQ ID NO: 317205 - DNA, 402 bp, Proteus mirabilis; identical to SEQ ID NO: 314280

SEQ ID NO: 317206 - DNA, 261 bp, Proteus mirabilis; identical to SEQ ID NO: 299232

SEQ ID NO: 317207 - DNA, 267 bp, Proteus mirabilis
gtggtaggaaaaaaaatcgcttattaccgtagagtaaatggcctcacattaagtgaattggctaagaaaataggtataagtcaacagcagcaatcaagatatgaacggggaattaatcgagtgagtctagataggctttatcaatatgcttgctttttcggtattagtttaagtgatctttttcaattagatgatgaagagaaagtagaaatagaaaataaaatatcaaatatggtaggtaataaaaatgaaccatttgatgggtaa

SEQ ID NO: 317208 - DNA, 294 bp, Proteus mirabilis; identical to SEQ ID NO: 277241

SEQ ID NO: 317209 - DNA, 975 bp, Proteus mirabilis; identical to SEQ ID NO: 277240

SEQ ID NO: 317210 - DNA, 648 bp, Proteus mirabilis
atggccagagcctgtacgatacgggaactgatagcggatttatcccgctgcaatccggaggcattcgtcttgtgcgagatgtggttccccgatgatgttaccaatgttgatgaaacggcttgtccggctgagacacgggcaacattaacgcatgttgcacattattttgatgcggagctggggatcaactgggacacgctggcgtgtgcgttatcgtgtgtcagagatgctgagcagaagggactcgatatttacttttatgccagtgaaaagcgtggtacagacaaaagccggatacccggctcacgttatgcagaagcggacagcgacggcgatattgaagtcgggtatttccgtaaggtcaatgcgctgtttaagtgggtgcatgaccatatcggggcttttgagaactgtgaaaaggtgctggtgacagaggcccatctgcgggctttacagcaggacttgcaggcactgacaccggaaaactgtcagacacggttcccgaccactgagggctttttctttggttcaacggcttatgatgaggcgtactgggctgatgtggaaggcgtcagacgctggctgtcagagataacggagacgtttgattttgaagcagagtcactgtgttttgtggcctggtggtaa

SEQ ID NO: 317211 - DNA, 171 bp, Proteus mirabilis
atgttctcagaaagacaatcactggtttctcagttaaaaaatacccatcctcgtttccaagctctctatgataaacaccatcgctacaatgatgaagttgcaaaactaaaaaaagaaaaactctatctaaaagatgaaatgcaaaaaatacttcaacaagctgagaaataa

SEQ ID NO: 317212 - DNA, 648 bp, Proteus mirabilis; identical to SEQ ID NO: 103756

SEQ ID NO: 317213 - DNA, 372 bp, Proteus mirabilis
atgacgacctttgagagactgaaaaactatttttctgaatcagggttatctgatggtttcattcagcaggattatatttggaatgaaaaagaaggtaatgattcagattcatatatcgtatttcagcaactaaatggaactggtcgtattgatgatttaagtggcgatgatttcttcaccgtttcactcatatctggcaaggcgtggattgagtttattgttcagagagctaacgaaatactagagtatgtaaggtgtcactctagaagtcataacattggttttattatcaatacatctggttttgttaatccaattcaaacaacagaaggtaggtttattatcccgctttctttccgctgtacatcttaa

SEQ ID NO: 317214 - DNA, 279 bp, Proteus mirabilis; identical to SEQ ID NO: 306370

SEQ ID NO: 317215 - DNA, 993 bp, Proteus mirabilis; identical to SEQ ID NO: 312989

SEQ ID NO: 317216 - DNA, 366 bp, Proteus mirabilis; identical to SEQ ID NO: 25794

SEQ ID NO: 317217 - DNA, 348 bp, Proteus mirabilis
  misc_feature (316)..(325): n is a, c, g, or t
atgaaaaaaatatttatggttgccgttatatcttccttattagttggctgtaaggttgatttagaaacgaaaataaatacagataacttattgtctagtgagcaaaatattgttaaaggaaatattaatttcgaagtctcttcatgtaatgattttgaagactcaaggaaagagtctaaatcattgatagaattaaaaaataaagttcctgagattttcagagatgcggaatatgttgaatgttataagcaaaaacttaattcattcgcccatttctcaatacctgttggtgttggcaaggttgaagacggccaannnnnnnnnnaaacactgttgatacggatctaa

SEQ ID NO: 317218 - DNA, 624 bp, Proteus mirabilis
gtggtacaggaggcaaaggttctgcaactggcgaccacaccgccgaaaccctatacggatggtacattgattgcggccatgaaaaatgcgtcatcttttattgccgatccgacattaaaaaaagtgctgaaagaaaatgcggggctgggaacagaagcgacccgggcggggatcatcaccacgctggaaaacagaaagttgatagtcaggcagaaaaaaacgctccgggcgacagacactggctgtcagctgattgatgccctgccggcagtctgtacggatccgggaatgacagcgttatgggaacaatcactcgaacaggtggcacagggaaacttgtctctggatgtgtttatgcaaaagcaaatcagctggctggtccatctcattaagaaagggtcggaaatgccgctggcactggatctgccgccgatgccatcctgcccagtgtgtcagaataagatggtattacgggaaagcagtaaaggacgtttctggagttgtcagcattatccggattgtaaagggagtgtaccattaccagaaaaaatgcagggcgtcacacgggtggttaaaaaaagaaagaaggcagtgaagaagagcataacaggactctttacctga

SEQ ID NO: 317219 - DNA, 291 bp, Proteus mirabilis
  misc_feature (7)..(16): n is a, c, g, or t
atgttgnnnnnnnnnnacaatgttgtttgggtgaaatccgttgaagaagcactacaagctgctgaaaataatgatgaaatcatggtgattggtggcggtaaggtttatgagcaattcctaccaatggcgaataaattataccttactcatattgatgctgaagtgattggtgatacaaccttccccgattatgagcctgatgagtgggattctacttttatggaataccatgaggcagatgaaaataattcgcataactactgttttgaaatattaaaaagaagaaaataa

SEQ ID NO: 317220 - DNA, 255 bp, Proteus mirabilis
gtgacgtattttgcgaagccgggggtgctggctgtgacgccggtgacgtttccgctggtgtttgtgttcagtgccggacaggccggttgtactggaagtcatttttgcctgacggtggccggtcatcaggtgtttgatgaggagcaacagcagctgattgccggcatgtcaccggcgacgatacagctggcgtggcagagtaccgccggtgacatgccggcaatcagctgctgttgctcctcatcaaacacctga

SEQ ID NO: 317221 - DNA, 486 bp, Proteus mirabilis; identical to SEQ ID NO: 272472

SEQ ID NO: 317222 - DNA, 423 bp, Proteus mirabilis; identical to SEQ ID NO: 27142

SEQ ID NO: 317223 - DNA, 372 bp, Proteus mirabilis
atgacgacctttgagagactgaaaaactatttttctgaatcagggttatctgatggtttcattcagcaggattatatttggaatgaaaaagaaggtaatgattcagattcatatatcgtatttcagcaactaaatggaactggtcgtattgatgatttaagtggcgatgatttcttcaccgttttactcatatctggcaaggcgtggattgagtttattgttcagagagctaacgaaatactagagtatgtaaggtgtcactctagaagtcataacattggctttattatcaatacatctggttttgttaatccaattcaaacgacagaaggtaggtttattatcccgctttctttccgctgtacatcttaa

SEQ ID NO: 317224 - DNA, 1032 bp, Proteus mirabilis
atgcaggtgattaaagcacaactacctgatttgtttgcccaaatcgagaatgcgcagaacgcgctgacggtcgaggatgtgccccgtcatctgcaaagtgatccgaaagctgtggctatctgggcaacggagctggcgttaagtagtgagaaagggaaaaaaatctatgatccgattttggacgggctgcgcagtgcgatccgttatgaccggacctattttgataaaattgtggcctccctgctgccgttactggaaaagttgactaccggaaaaaccgccgctctgttatcgccggattacaccaatatgcaggatccccgtccgatttttgactggcagcaggtgattcggaaaaaagggattgtatatgtcgggctggatgcgttatcggatgcggaagtggcggcagcggtggggaattccatgtttgcggatttggtctcggtagccgggcatatttataaattcgggactcaggatggtctgccggaggatgagcacgccggaaaattaccgatcagcctgcattgcgatgaatttaatgaactgatgggggatgaatttattccgttactgaacaagagcggcggcgcggggattgaagtgacggcctacacacagacctggtctgatattgaagcccggctggggaatgcggcgaaatcggcgcaggtcaccggtaactttaatacgctggtgatgttgcgtgtccgtgaactgatgaccgcgaaattactgacggaacagttaccggaagtggatatttacaccaaaaccctggtatccgggatcaccgatatttccaatccgaggcaggggagtgattttacctccaatacccaggacagggtcagtatggtggctaaaccgctgctgttaccggcagatattattcagttaccgaaaggacaggcgtttgcgctgctggaaggcgggaagttatggaaaatcaggatgcccctgcctcggattggaaatatcggtgatcccggataccagggttttggtgtaaatatccacttccggtaa

SEQ ID NO: 317225 - DNA, 762 bp, Proteus mirabilis
ttgaatacagagaaaactgttagcgaacaggcggatattaacaccctcaaaaatgcaaaccaatataccgacttaaaaatccaggaaaataacgagttactttcagcggatattgagcaagccagaagtgactttgatgacaatcttaaaacaacaaaagcagcgttagaaaacaacatttctgatgttaatcggtcattaacaaacagtgttaatcgggcgaaaaaatatttatccgataatctggataaaacccgtcatgacctgagtgccagtattattgccagtcagaatgacagtcatcttcgcactgacagattgatcagcagagagcagaaagcacgtattgacgcattaaatgcagaaaaaactgcccgtgaacagggggatgttaccacgctcaataatgcaaacaaatacaccgatcatcgtattcgctcattaggtttaaatgtttctgatgcgttaaatgattttcaacaaaaaacagatcagaaatttgctcatctcgataacaaaattggccgtgtggaaaaacgggccaatgccgggattgccggggtgaccgcgatttccaccattccgtatgtgaacagtgagcgtttttcgttcgggatggcgatggggcattaccgcgatgcacaggcgattgccaccgggatgcagtataagccaacggccagtacgaatgtccgcctgaatgcgtcatggaataccggtggcgataccagtattggtgccgggtttgcggtgggctggtag

SEQ ID NO: 317226 - DNA, 762 bp, Proteus mirabilis; identical to SEQ ID NO: 311205

SEQ ID NO: 317227 - DNA, 372 bp, Proteus mirabilis
atgacgacctttgagagactgaaaaactatttttctgaatcagggttatctgatggtttcattcagcaggattatatttggaatgaaaaagaaggtaatgattcagattcatatatcgtatttcagcaactaaatggaactggtcgtattgatgatttaagtggcgatgatttcttcaccgtttcactcatatctggcaaggcgtggattgagtttattgttcagagagctaacgaaatactagagtatgtaaggtgtcactctagaagtcataacattggttttattatcaatacatctggttttgttaatccaattcaaacgacagaaggtaggtttattatcccgctttctttccgctgtacatcttaa

SEQ ID NO: 317228 - DNA, 312 bp, Proteus mirabilis
atggtacagggaacagcacagcgccggcaggcgttgtttgtgcaggcggaaaattgtagtgcgtgtgatgtccgtctggccaccctgctggccggcaaacagccgtttgatatttatgtgctgggcacaaagggggatgataaccggctgcgagcctgggccagacaaaaaaatatcccggcagagcgcgtcagaaagcgggaaattacgttaaatcatgatggcggtctctcgcttcagtacggactgaccaccacaccggtggtgatgcaacagttaccggatgggcggtggcgtccgctcacaccttaa

SEQ ID NO: 317229 - DNA, 372 bp, Proteus mirabilis; identical to SEQ ID NO: 317227

SEQ ID NO: 317230 - DNA, 372 bp, Proteus mirabilis; identical to SEQ ID NO: 317227

SEQ ID NO: 317231 - DNA, 372 bp, Proteus mirabilis; identical to SEQ ID NO: 317227

SEQ ID NO: 317232 - DNA, 267 bp, Proteus mirabilis
gtggtgtatgagatcccgggacgcgggttcagtgaggataaagtccgggtgattgaccgggataactggatcgtgcgcctggatttggtagcggatgaatattttagcgcggagccggtcaagcgagcgacggtacgttatccggtgaaagtggtgcgctgggagggcgatccggaaagtaatccgtttggtctggccctggactgctatgacgggctgcctcagcgtctggaagcggcggagcagaataaggaggtcagtcaatga

SEQ ID NO: 317233 - DNA, 366 bp, Proteus mirabilis; identical to SEQ ID NO: 25794

SEQ ID NO: 317234 - DNA, 438 bp, Proteus mirabilis
atgagaatgatgaaatgtgtgatgaaaagcagagtgctgtgcgcactggtgttgttgctggccggctgtgccacctccaaagaggagctgctgccggcgggaaacagcgacatgatggccatctggtccggcagacaggctgatccgaacggtgcggcggacagccggacggtgacggagaccgcccgcagcgccctgcgacgcgccctgacgaatgatgaagccgcgcgccttcagcaggcggacaccgcgtatacccggacacaaagcagtgagatccatcagcagtttccgcgtctgccgaacccggacatggtgatgtatgtgttcccgcatctctcggccggcaatctgccggtgccgggatacagtacggtgtttccgttttatcaccaggtgcagtatgccctgccgggtgagcgtgtggagggcttgtga

SEQ ID NO: 317235 - DNA, 438 bp, Proteus mirabilis; identical to SEQ ID NO: 317234

SEQ ID NO: 317236 - DNA, 294 bp, Proteus mirabilis
atgaacaaaatgaccattatccgctttcagttactggtacatcagttactgcaagtgcattacggcattacgctgagtgataccggattgtccgatgatgctgaggtgtcccggatgattgaactcgggatatcgccggtatcggtggtcaaccgtctggtggataagtaccacctggataaactgaatgcatcctgttatctgccggcatccccgtatgtcagtgacagcgatgccttacatgcacaggctcaactgagcggtgccattaacccggatgtcatgcccggataa

SEQ ID NO: 317237 - DNA, 123 bp, Proteus mirabilis
atgcaagtcgtcagttcgcagttcgggagcaatcctgttactgaccccggtgggaaacacgttcctgccgggacgatgtttctcatttttttaccttttttatccgatggagaaacatcatga

SEQ ID NO: 317238 - DNA, 465 bp, Proteus mirabilis
atgtggcagaacttccgtgaacatctggacaagctctatcaccactatctggccaatcccatatccgcagagcagatttgcggcggatacccagataaacctattgtgttgtgtgatggcctggaggaaaaacggctgaatgatggctcattattcaccgacgacggtgaggcgctttgttttaacggtaatgcggctgatgacatgaatcatgagacgtttattgttcagcgcgaaatccccgtagaggactactgggatttctgcaagacagcatacaaaccctatgacgtgtttgtggtggcggcattactgctgctgcacaacctgtgccccgggtatttttcggtctcttctgacggggataccctggactggcaaccggtgctggactatgtcagtaaggcattcccttatcttatcctgacgttaccggcaggcattgatgtgccggaggctggataa

SEQ ID NO: 317239 - DNA, 366 bp, Proteus mirabilis; identical to SEQ ID NO: 25794

SEQ ID NO: 317240 - DNA, 543 bp, Proteus mirabilis
atgaaagggcggcgcggtattcagtctcccggactggatccgctgacgacactgggcattgaggcccggtcagatgaggagcgccgccggctggctgaaaagtgggtacagcaggaatttgcccgggcggaaaaagagctggcgtttcagcgggaagtggatgcggcctggaaacggctttatggccagatattaccggtcagtctgggaacagccggcggaaccgccgggatggtacagggaacagcacagcgccggcaggcgttgtttgtgcaggcggaaaattgtagtgcgtgtgatgtccgtctggccaccctgctggccggcaaacagccgtttgatatttatgtgctggggacaaagggggatgataaccgcctgagggcttgggccagacaaaaaaatatcccggcagagcgcgtcagaaagcgggaaattacgttaaatcatgatggcggtctctcgcttcagtacggactgaccaccacaccggtggtgatgcaacagttaccggatgggcggtggcgtccgctcacaccttaa

SEQ ID NO: 317241 - DNA, 366 bp, Proteus mirabilis; identical to SEQ ID NO: 25794

SEQ ID NO: 317242 - DNA, 306 bp, Proteus mirabilis
atgttaccgtggtttcgtaaatcgctttcccggaaagcggaagagaaaacattgcgtgtttccccgggaaacacgcaggaaaggccattatttatccgtgacagtgacggcttttatttaccgcaggcagctgacgtattgctgaccacaccgcagcggcaaaactggttacagcaaatcagccgggtggtagcgttaccggataaccagtaccgggcactttgcctgtctcctttgcagacgctggcagaacgacttcagtgtgtgccggcatcaaaaaccgggaaatatgccggcacacactga

SEQ ID NO: 317243 - DNA, 465 bp, Proteus mirabilis
atgtggcagaacttccgtgaacatctggacaagctctatcaccactatctggccaatcccatatccgcagagcagatttgcggcggatacccagataaacctattgtgttgtgtgatggcctggaggaaaaacggctgaatgatggctcattattcaccgacgacggtgaggcgctttgttttaacggtaatgcggctgatgacatgaatcatgagacgtttattgttcagcgcgaaatccccgtagaggactactgggatttctgcaagacagcatacaaaccctatgacgtgtttgtagtcgcggcattactgttgttgtacaacctgtgcccgggatatttttcggtctcttctgacggggatatccgggactggcagccggtgctggactatgtcagtcaggtatttccttatcttatcctgacgttaccggcaggcattgatgtgccggaggctggataa

SEQ ID NO: 317244 - DNA, 429 bp, Proteus mirabilis
atgtatttttccttttctgtggtggctacggctgttgccgtcagccaccacagaaaaggaaaaatacatgaccaccctgaaaatcaccgggatgacctgcgactcgtgcgcggctcacgtcaaggaagccttggagaaagtgcccgcctcaatggcgagttgcgctgtgcccttcggataggacaccagcgccgattgcacgccgggcactttctccaaggcttccttgacgtgagccgcgcacgagtcgcaggtcatcccggtgattttcagggtggtcatgtatttttccttttctgtggtggctacggctgttgccgtcagccacgttgttctggcaattcacagctgtccggcccgcagcggcgatgtgctggcgagatgaaatcccagaccgacaccccaaccatcaaggccaggccgacatag

SEQ ID NO: 317245 - DNA, 312 bp, Proteus mirabilis
atggtacagggaacagcacagcgccggcaggcgttgtttgtgcaggcggaaaattgtagtgcgtgtgatgtccgtctggctactctgctggccggcaaacagccgtttgatatttatgtgctggggacaaagggggatgataaccgcctgagggcttgggccagacaaaaaaatatcccggcagagcgcgtcagaaagcgggaaattacgttaaatcatgatggcggtctctcgcttcagtacggactgaccaccacaccggtggtgatgcaacagttaccggatgggcggtggcgtccgctcacaccttaa

SEQ ID NO: 317246 - DNA, 132 bp, Proteus mirabilis
atgagtattaacgtagaggtagataataaccataaagaaacaaataaaattaatgacatggtaatattatcttctatctttggtacaaaaaaaaataacagaaaaacagctatattttgtattgagatgtga

SEQ ID NO: 317247 - DNA, 267 bp, Proteus mirabilis; identical to SEQ ID NO: 312366

SEQ ID NO: 317248 - DNA, 369 bp, Proteus mirabilis
atgacccgtgatttcacttatgtcgatgatattgtcagttctgtggtacgtttaattaatattattcctgaacccaacccaaattggaccgtagagcagggggaaacttcatcaagttctgcaccttataaaatatataatgtgggtaatgggcaacctacaaagttaatggattttattacagcaatagaaaaatcactcaatattaaagctaaattgaacttaatgccgatgcaagatggtgatgtactttcaacctgtgctgattgtagcgatttagctcagacaacaggtttttcacccaacactgcagtagagtatggtgtgaagcagtttgtggattggtatgtagattattaccagcaataa

SEQ ID NO: 317249 - DNA, 207 bp, Proteus mirabilis
atggggatcccgcctagccatattgatcatgtaaaacaatttaatcttggcactgtttttcgattaattgatgaacatggtcctatttctcgtatctcattatctaaaaaagcaacacttgcgcctgccagtattactaaaattacgcgagaattagtcgaagcacaccttattcatgaaacagaatttatgtattcgagtaaataa

SEQ ID NO: 317250 - DNA, 195 bp, Proteus mirabilis; identical to SEQ ID NO: 298769

SEQ ID NO: 317251 - DNA, 195 bp, Proteus mirabilis; identical to SEQ ID NO: 298769

SEQ ID NO: 317252 - DNA, 303 bp, Proteus mirabilis
atgaatacttttacacaccataatcaaattatgaaatttacattgccagaaccagaccctaggaatgtttgtaacttttgcggtggaagcggtagtaaagacaatttaatccaaggtaaagcagcaaatatttgttttgagtgttctgacttggcgaaagaaatagcagatgaaaagcgtaaggaaatagcagaaaaggaaattaaagatatggcacgtttaatcgaggctcatgctttaaaaaatgataatgcctatatttctcgttttctttatcaagctggatatagaaaggtggagtga

SEQ ID NO: 317253 - DNA, 177 bp, Proteus mirabilis
atggctgatagagagttaacacagcatttatcagaaaaactgctccaagagaaaatgtttattgagcagttatttaaagatgaattaactgaatctatagaaattatagaaaagcacatcagttttattaatgataaaaaacagctcttaacaaccaccactatattagtgaaatag

SEQ ID NO: 317254 - DNA, 207 bp, Proteus mirabilis; identical to SEQ ID NO: 14480

SEQ ID NO: 317255 - DNA, 207 bp, Proteus mirabilis
atgccactaattgtattaaaaggtctcagaggtggagtaggaaccacctcaataaccgttgcactggctcgccaatttcatcaccataaatacaatgtcattgttatcgataactgtgtgaataatatcttacatttctattttccagaaaaatcacactacagcatttttttaccgcttttactcaacaatacccagacactttaa

SEQ ID NO: 317256 - DNA, 972 bp, Proteus mirabilis
gtgaaaataaatagaactatcgccattattggcgaatgtatgatagagctaagtggccaaccttttttgccacaacaacagcgttttgggggcgatacattaaatacagcactgtatttagcgcgcctcattcctacattacatccgcaatatataacaggtttaggcactgataattacagtgccttaatgcaaaaagcatgggaaaaagaggggatcaactgccagtcagtgatcaccattcccgaaaaacttcccggtttatatgccattgaaattgatacttgtggtgagcgtagcttccattattggcgtagtgatgccgctgcacgttatattgcaacggacaaccgttttgcaacacatctagataccttgcccgacgatagtgttatctatcttagtggtatttcactggccattttaacgccgaaaggaaaagaagcgttaatcacgcaattaatccgccttaaacagcgagggctcaccttaattgtcgattcaaactttcggcctcgtttatgggatctaatacctcatgcgcaagagtggttcgaaaaactatatcgactcagtgatatcgctttagtcaccggagatgatgaacaagctctctggcaacaacccagccttactgagcaaaaaattgtcgaacgccttcatcaatggggcaataaaaacgtcattgttaaactaggagcaaaaggagctttctggtctgatagtgaaaataccggttatatctgccccaaaccgatacagcatgtcatagacactacggcagccggggattcttttaatgctggttttattgctgcatggctacaaaactaccctttgcctacatgttgtttatggggaaatacattagcaggattagttatccaacatcatggcgccattattccccataacatcactgattcattctattcactcatcaaggataaccatgagacagtcaattgttga

SEQ ID NO: 317257 - DNA, 1170 bp, Proteus mirabilis
gtgcgtaataaattgattaacgatgtctatttgccaattattggtgacaatatggcaaaacagatcggtgcattaggtgaagggaaacgcactgacttgatgggattattattaatgatctccccaccaggttacggtaaaacgaccttaatggaatatgtagccgatcgtttgggactgatctttatgaaaataaatggtcctgctttaggtcataatgttttgtcattagatcccgagcaagcgccaaacgcaacagcaaaacaagagctagaaaaactcaatcttgcccttgagatgggcaataatgtgatgttgtatgtcgatgatattcagcatacacaccctgaattcctacaaaaatttatctcgctatgtgatggcacacgccgtattgaaggggtttggaaagggaaaacccgaacctatgatatgcgcggtaaaaaattctgtgtggtgatggcgggtaacccttataccgagtctggtgaactatttaagatccccgatatgttagctaaccgtgctgatatctataatcttggtgaggtattagggggaatggatgacgcctttgcactcagttatattgaaaatagcttaacctctaactcagttcttgctccccttgctttacgtgatctaaacgatctctatctttttgttgataaagccatgggtaaatcagtttcaaccaattccctcagttatccttattcggatgcggaaattaatgaaattgtgatggtattaaaacatctaattactttgcgtgatgtgattttaaaagtaaatcaacaatatatagcaagtgcggcacaatccgataaatatcgtactgagcctgcattccgcttacaaggcagttatcgcaatatgaacaaattaagcgaaaaagtctctgcggttatgaatgagaaagaaattgaacgcttactcgacgatcactatcttggcgaagcccaattactcacaacgggtgctgaagagaacttattaaaactggcggaaatacgtggcacattaaccgaacaagatgctattcgttggcagcaaatcaaaaaagattttatgcgcaacaaagcattaggtggcgataatgttgatattggcgatcgcgtagtgtcacagttggcgaatttagtagaaagtgtgcagagtttgcgctaa

SEQ ID NO: 317258 - DNA, 237 bp, Proteus mirabilis
atgttgcctttcataaataatatgatatcttctgcatcaagtcattggggagtagcctgtcttaaaataaatctcattattttaagaagtctgtatcaacatactcgcttatttttatttagcgtggtacagacgccattatttggttggcaagaccatagacacataattgtacttctttggttgggggtcaattgtgtgtatatggaaacaccccaaccgaggctattgttatga

SEQ ID NO: 317259 - DNA, 2169 bp, Proteus mirabilis
atggcgactcaacaaaggatacaaacctcatctgagaaatcaccggtattccagttttcagtacgtcccgataaggtcggaattatcaccattaatgttgtagatgaaaaggtcaatacactgaaagctgcttttgttgaacagtttcaaaatgtattaaaacaggctcagcaacattcaggtgtaaaaggattaattatcacctcaggtaaacctgataattttattgctggtgctgatatatcaatgattgcagattgcaaaaccaaagaagaggccaccgcattagcaaaagcaggacaagatctttttactcaattagaaaattatcctttgcctgtcgtcgcagccatcaatggcgcctgtttaggtgggggattagaactagcattagcctgccatgggcgaatttgctccgataacagtaaaacacgtttaggccttccggaagttcaattaggattactaccaggttcggggggaacccaaagattaccacgtttaataggggttacgatcgctttagatatgatcttaactggacgacaaattaatgccaaacgggctttcaagcttggcttagttgatgacgttgtaccacaagctattttattagatgttgcagcccaatggattttaacagctaaaaaagctgctaaaaaacagactattatggagcgtttttgggcaaataccacattaggaagaaatatcctctttgatcaagctaaaaagcgcactttagctaaaaccaaaggtcattacccagcggcagagcgtattcttcacgttattgaacgaggcttagagaaagatattcaaacaggttttaaagaagaagctaatgcgtttggtgaattagccatgaccccggtttcatctgcattacggcatctcttttttgcctcaacagcattgaaaaatgaaacaggatcatctgcaaagccagataacttacaccatataggtattttaggtggggggttaatggggggcggtattgcttttgtgacagcaacaaaaggtaatttacccgttagaattaaagatattagtgataaaggtattgcgcaggcacttaactatagttggaaagcgttatcaactaaggtcaagaaaaaacggctctctgctcgtgaacgccaaagacaaatggggttattatcagggacattggattatagcggtttccatcaaactgaccttattgtcgaagctgtttttgaagatttggctttaaagcaaaaaatggtggctgatattgaagccttaggtgaaggcaagatcatctttgcttcaaatacttcttctcttcctatccataaaattgctgaaaaagcacaatatccagaaaaaataattgggctgcactattttagtcccgttgaaaaaatgcccttagttgaagtgatccctcatgaaaaaacggatgctaagacaatcgctacaaccgttgcttttgctaaaaaacaaggcaaagttgccattgtggtaggagataaacccggtttttatgtcaatcgaattctcgccccttatattagtgaagccttaacctgtttggttgaaggggaaacgatagagaatattgacaaagcattagttcaatttggctttccagtcggccccattcaacttttagatgaagtgggaattgatattggtactaaaataacgcctattttagttaatgagtttggtgagcgttttgcatctcctcccgcggtggatgcgattattgcggatgacagaaaagggcgtaaaaacggtcgtggtttttatctctataatcagcatgccttacctttctctttaggaaaaaataaaaagcgtgcagatccgatgatttatcgcttattacaggttaaacctaaaaatcagttatcggcttcagaaataactgaacgttgtttattgcttatgcttaatgaagcagttcgttgtttagatgaaaacattattcaacaacctagggatggtgatattggtgctgttttcggtattggttttcctcccttctttggtggaccattccggtatatagatagtatgggaacaacaaaaatagtcgataagcttaatcaattaactgaaaaatacggtgaaaagttccagccatgtgagcgattagcggcaatggccaagttaaatgaacgattctatagctag

SEQ ID NO: 317260 - DNA, 846 bp, Proteus mirabilis
gtggacagtactcttgcggtgtctcagcaaatccaatggctgtatcaacagggtaaactgcattatgtggtcaccgaccaccaaggaaccccgcgagagatattcagtgaaggcggacaagccagttgggcaggacggttgaatacgtggggccaaatgcagttttggcgttaccgcgacggtaaagcggagaatgaccctaattataccgaatgtccttttcgctttgcggggcaatatgaagatgaagaaagtggcttgtattataatcgctttcgctattatgatagggaaacagggcagtatctttctccagaccccatagggttattgggtgggctgaatccgtatgggtatgtgcattgtccgacggggtatattgatccgtttgggttggagtgttgcccgacaagtcttattagtgaacaaaggcaggcaaagatcaatgagcttgcagaggctaatgcactcagacggttacaagaaatggaaagtatgaatcctagatctcacttccttgagagacatggtgctcaaacgtctttagaatcccagcttggacgagcaacgaatggagcgaatcctactacgggagttcagcagcgtacaccgatggcagcaactcgatttgatagtcatagagatcaattaaatgctatacaacgagcacaaactattcagcgacaatcaggtggcgctgtgactaaagttacaattccgtatggaagaagaatcggtgaagggtatagcaagacaggcccaacatatggcacttcgagtactgcaacagtgatcttaactccaaatgggcaaacaatcactgcatatcctgtatgggggcgataa

SEQ ID NO: 317261 - DNA, 408 bp, Proteus mirabilis
gtgcattgtccgacggggtgggttgatccgtttgggttggagtgttgtccgccaactctgaatcgaactcaagccttaaacaaagctaaggatttggctggaatacctcgctcacaacaaccagttcgacaatggacagttggaaatgaccctaagagaagagggcaaacaaattatcaatattcagaagattttggttcacgtgggcgttattacgaatatagagatgctaatggttataaaaaagttgtgttagaacatacacatgatccaagagcaccatatccacatgcacatgcaggacaagctaagacaggtgctgacccaagaacatatgactttaagcaagatagatatttgaaaatagatgaccctaaaactaaggatcaccacatttattatgaataa

SEQ ID NO: 317262 - DNA, 786 bp, Proteus mirabilis
atgacaattgaacaacaaaaagagatgcagtggttactctctgatccagatacggtccgttttcgtgatgagcaattgcttgcagaaactgaatttcgttatcatcaacatgagtttggtcaattgctttatgtgatctctggagtaatggatctagaagctggcgggcagcgttttttagcgccacctgaatttagtgtatggatccctgaaaaagtagggcacgcaagctacaataaaaaaaccttatcttttaaggtgctagatattgcacccagttggtgtgaaggtttattggataaaccctgtcttattcaactaagtcctattttttcgacgatttttgccgatttcttccgtcgtggtgtttgtaaaccgcaaacaaaagaagatctacgtttatctcaagtgttaatagaccaactaaaagtatctcctattcatcatacctatttaccttcctcaaaagataagctgttagcacctgttttggcagcattagagcaaaatcctgctgataatacctcattagaattatgggcaaaaaaacgttatacctcagaaagaaccttatcacgtcgttgtcagcaagagttaggcatgtcttttagtgaatggcgtaagcgattacgttttttacatgctatctctttgttagaacaaggaaaaagtgttaatgatgtggcctttgatgttggatatagctcatcctcctcatttattgccatgtttcagcaatttgctggaacaacaccagaaagatttcgtcgcttacccaatggttaa

SEQ ID NO: 317263 - DNA, 861 bp, Proteus mirabilis; identical to SEQ ID NO: 5314

SEQ ID NO: 317264 - DNA, 558 bp, Proteus mirabilis; identical to SEQ ID NO: 7707

SEQ ID NO: 317265 - DNA, 567 bp, Proteus mirabilis
atgtcatactatacaacagaacaattagcagaaattggttttaagaagattggaacaaattgtaagataagtactaaggcatctatatatcgaccagaagaaattgaaatagggaatgattgtcgtattgatgactttgttattttatcaggaaaaatacacttaaaaaataatattcacattgcagcattttgtaatttaagtgcaggtgaatgtagcatcctatttgaagatttttcagggctagcctatggatgccatgtctttacaggcagtgatgactatagcggtagaacaatgacaaatccaacaattcccctgaaatataaaaatctaaaagaaaaaaatattattattggaaagcatgcaatcatcggaacgaactcaatcattatgcctggcgttaccatagcagaaggaaccgctgtaggcgctctatccatggttaccaaaagcacaaaaccatggggaatatattttggaaacccagctaaaagaataaaagaaagaaaaaaagatttattaaatttagaaatggaatatataaaagaaaaatcaaaaaaatag

SEQ ID NO: 317266 - DNA, 261 bp, Proteus mirabilis
ttgattgcccaagtcattggttttgttgaactgccaacacaacctttggcattaccacttgatattcaaggaacagtatttcaacaaaaagtttggcgggcattattagatattccttttggttgtaccatgacatatcaagaaattgctcaaaaaattggttcgccaaaatcttatcgagcagtggcgaatgcctgtgcatcaaataaacacgcaggatcatcgccaagtgttatcgcacaaatgcccttttcactttga

SEQ ID NO: 317267 - DNA, 471 bp, Proteus mirabilis
atgccgcgattaataatatttcctgtcacacctaattcgaaactatttttacctgacataatactattgctggcattggtatatttaccatttatatttacacgtaaatgttctacaccagaaatgacgccattgttttcaaaatcacggttaaccgtcacttcagtatcaccactcgacgcaataacaccttttaaggtattactttcaaccgaacctgtactgttatttttcagtgtatcggtttgcagtgttaatttatcctggccaaacaatgtgccttgtgaattggtaaaggtacttgtcactacagaggcatttttatgtgatgcaatagtaccactggtattatcaacagaggtgaatttaagctccatatccccattttctgttacaatacgtcctttattactcactaatttattgccacttaatttcatttctcctttactaattaatccccctttctga

SEQ ID NO: 317268 - DNA, 264 bp, Proteus mirabilis
atgaataatacccatagccgcctacgttcagttactcgtgttgaaattgatactaatggtaaggcgctgaaaaataccggtatgacggcagatactgctagcgatgattcattaggtattcttagtggtctggatggtatgacagttaatattgctggactgaataatgaccaagggattattgccaccgatggcgatatgaacttcactaataaaggcgacattaccaataaatggggacatataaaatcagggggtacttga

SEQ ID NO: 317269 - DNA, 537 bp, Proteus mirabilis
gtggcgacagcctgggaggatattcagtaccttcgcagtaccggagaagccataccgatggatatgcggactctgttaccgaccagccttgcggctgaattacacggttttaacggctgtttatggaaaacaccggaggtcatctggcggcaggcgcgctggcaggcgtttgcccccggtaacagtacatatcacctttatcagtgccgttatggtgtgaaatggccgaacggcagtggttttcactgtattgatggtgggtatgcgacggagttatccgcagagtttgatactccgtgggggccgccgtcagcagcggttttgtgtgctctgtctgcgcgtttccgctgtcaggtccgtcatgtctatgccgaagaaggctgtggtttctgcggatacagcgagtatgaccatggccggttaaccgaccatgaatctgatgagattgagttcagtgatgaagagaatgaggacggtttccaggatgtgacgggaccggactatattcttgattcattgccacattacggagggtga

SEQ ID NO: 317270 - DNA, 609 bp, Proteus mirabilis
ttgatattagataactcaccagggttcagttcgttggagaagtctggtgcttatcctgcatatactaatcaaccacaacaacatgtttctggatatcaaaatgctggcgctggatccatatcaaaagcatacaaggcttcatctattgcagattatgaacttgagtttttaggagagaaaataatacacaaaaacgatatctctgagaaaacagaagggaatattatattaagaactggtagtgattacttcattaaaattaataccgaggtttttattagaaagcatgaaccacataataataacgcataccaaaattgcgaaatgatgttttatgtttctggtggtgaagttctaccatcaacgatacagccatctgttgtctctcaaaaatccgaggatagtggaaatatgctagagcaatcaaaatggaacaagccttattttttacaatacgctgaatcaaaaaatggtttctcaagatttgcactaaagagaagcgttaaagactcaacagattacaataggactgtatcatctaagataaaagtcactgttatcccagtctctgattatagaacgataggaatatcacctatttttaattaa

SEQ ID NO: 317271 - DNA, 225 bp, Proteus mirabilis
atgcgccagcaggtattagattttgcgcaacaattggactgggatattcacattgtgcgagaaaaaccgcaaacgctctatcaagcagatgaaatttggttaaccaatgcactgatgcccattattcccgtaaaacagatctatttttcagatgataagcactatcaatatcgcgatagagacgcttaccatgttgttttacaacactgtttgtcactgacttaa

SEQ ID NO: 317272 - DNA, 663 bp, Proteus mirabilis
atgggtatggtctcatttaatcaaacgtgtccgcactgcttaaaagacaatgcagttctaattggtgtttacgaaagctatcgtggtgaaaacgatgtatatgacgtaacgtttttctgccgtagttgtaataagtctggtattgcagttgtacaagcctcaaacgtaggcggaccactgcaagtagctcaaaatgcaggtagagatatacaaataccatcaaataattattggtttaaaattattgatacatatccccaaataacaattaataacgcaccagaaaatactccaaaacgagcggctaaatttttcattgaatcaaaagatgattttcaacgcggtagatatgaaactagcgtgatgaattgtcgcaaggtaattgatatctcaaccaagtatttaatgggtgagagcgtaaaggatataaatttaaataatcgtattaatacattgtttaaagaaggaaaaataactgagcaaatgaatagttgggctcatattgtaagaatggatggaaatggcgctgcgcattctgacgaggaaatatctaaagaagaagccgaacaaatacttggatttaccgaggtgtttctaatgtattcttttacccttcctgaaatgattaaaaaacgacaagaaacaaaagattcaaataagtaa

SEQ ID NO: 317273 - DNA, 177 bp, Proteus mirabilis
atggcaggtttagatgtgacatttcagcaagaattaataatcgactgcaagcagtctcagcgcaagtacatgtcttgggctaaagaggataaagaatatcctgagttacgtaaggcttggttagaactggcacttatggcacgccgtcatgctcgtgagtggttcgtaatgagttaa

SEQ ID NO: 317274 - DNA, 429 bp, Proteus mirabilis
ttgcaagtagatcaagcgttcatcaacgcactagaggtaacgctttcgaagtcccgattggacacctaccgcacatacttcagctgtcaaaatgatgctgaagctcttggaacgtatctttggaataagtccttatcaacagcattttacccccttcttcaggcgactgaaattactttacgaaattcaattcattcagctgcttccggccatttcagtggtaacaaagaatggtttttaatgaagaaatttccctctgcaaaaaaagaggctgagaagcaatacctgaaaaaagatcgtaaaacaccaattactcccagaccatcttcagataccgttgtagcatctttgagctttggcttttgggttaatttacttacgcagaattacgatgacccagtaaaaataccaaactttggccgacattga

SEQ ID NO: 317275 - DNA, 675 bp, Proteus mirabilis
atgatttcattatatgaattaactaaaactgaattaaataatctgattttagaagctagtaatcaatatggctctgagattgatggtactatcttatgtaaatcgttagcagtgatatatgaaagtttaaaaaaacataaccgaatattcgctattcgtacagatctaaggtttgcacaagaccatgttcaagatgagcctgatttacctttatgtttccagcgggtagatgaaaaagcgattactcgatttatagagtcattgaaaagtcagcttcgagcagaccataaacgttcaggcagaactggtgagccgacgctaccagcctatatctgggcaaaggaacgtaaggaaagtgaacattatcactatcacgtggttttattgttcaatggcgatgcttatcgatacttaggtgattatagaaatagtgatgctaataatatggctataaggattcagaaagcatggtgtagtgcattggagcttgagtttccttactatgcaccactagctgaatttcatgaaaaccattcatttagatttgataggcaggatgctcagaatcgtaattacaattacctttatttcttattacgaataacctatttggctaaagtgtatacaaaggaattgaatactggctatcgaaactttggaacaagtcagatttag

SEQ ID NO: 317276 - DNA, 1197 bp, Proteus mirabilis
atgagagtagaattcacaaataaaacaaagaatattcttgctgggagagcagggtatcaatgtagccatcctcaatgttcaataataactattggtccaggtgaaaaagaggatgagacatcaagcatcggtgaggcatcacatatttatagcgcagctaaaaatggccctagagggcaaagtggactaactagagaacaattaaaaagccctgagaatggaatttggttatgtaagggacacgcaagactaattgatacaaataatggagcaggatttaccgcagcagaactaattagttggaaaaaatttcacgaagaatttattaaacatcaccaaggaagaattttcaataaactatattggatatcaaaactatcaatagttggcagtcctttatttcaaaattcaataagcatcgaatttgcaaaaataacaattattgagagtgatagtaatggtgcagggaaaacagcaatatgcgagtggttatcaagtgtcagtgcaataaatagacttgagcgctgggttgattgtgaaaatctcaatattgaaatttatttgcacacgccagaaccacacttaattgaagtaagtgtagatagtggaaggtttctctatcaagttgataaacttgacatgacttcaagtccttttccttttacatgttatttctttgactttgattatttaaataaaaaatataacaaaacatctaactttttttctgaattcataaatatatccccagtgcaacttaggaatctttttgaatatgtatgtagaaataaaaaaggcatgcttaaatcaatcagatttgctactaaggaagagctggaacaggattatgataatgaaaaagagcaagatatttattgcatgatacaaggcaatgatttttatttgcctttcgagaatttatctggaagtgaaaaaaccagagtgctattggatgttatcatcgcatcattaaatgaacgttccaaatatacaccgatactactttttatagaaatgaatgaaacctttttatcaagggaatcttttaaaccatacattgaaaggttgaattctattgagacttcatttcaaaccatcgtaacaactcattcaaacatattaaatgagtattccgtaggttttcctcgttatgaattgataaaaggtaccaatgcatcaactttgaagaaaatataa

SEQ ID NO: 317277 - DNA, 585 bp, Proteus mirabilis
ttgagtctacaaatagattttaccaagggtggatcagaggtgttagatagagttattgaagcttacggttttgatacaaaaatagctctagcactacatttgggtatagcaagtagtagtttggcgatgaggtataaaagagatttatttccatctgatatcgttgttcgatgtgcattagaaactggagccagtctggagtggttagcttttggtataggtaaaaccttcacaaatgaaaaagtagacattctaaaaatcccttgttcgcgtttagtgaatggacgtctattaatgtttgatgatgttttatttgataaagcaatgctcaaaagcacagctccactacctcaaaaggcaaaatgtataaaagatggcgatagttactatattttagaagaaaactttgacgatatatttgatggtcagtggttggtagatattgaaggaaaaattagcatacgggaattaactcttatccctattaaaaaagttcgtgtttctggttctggagttccctttgattgcaatttagacgatttgaccgttttaggccgtgtaataactgttattgaaaatttatag

SEQ ID NO: 317278 - DNA, 237 bp, Proteus mirabilis
atgatagaggttatttatattaaatcagatggtacatcagaaactatgatagttgataaaaatatatcccatattgcattacatgatatcgttgattatggttctcaaggttttagagtaagacctattgaaaaatttctttataacgataaattatattttttcgtacgggatggtgaccgagtcagtgatgataatgttttatgtgttatggctagcggtcgccagttttcctaa

SEQ ID NO: 317279 - DNA, 336 bp, Proteus mirabilis
atgactaataatattaagggtattttgacaacactatggttatttttcttatcattatcacctaatgttgcatattctgccgatagcattattcaaataacaggttatatgagagataacacctgtgcagttgcaccagaatcacaataccaaactattgatttattaaataatgaagttaagcggttatataaagtgggagaaacaacaccctttattccttttcatataatactggagccttgtggagaatcagtgattgctgtgaaattctattttaatggtatttcagatagcaacatctgcttctggtgttggaatacaaatattagatag

SEQ ID NO: 317280 - DNA, 702 bp, Proteus mirabilis; identical to SEQ ID NO: 305899

SEQ ID NO: 317281 - DNA, 225 bp, Proteus mirabilis
atgaaacttttatctacattatctttttcttttgctaaagaaaaaggcaggatgaatgaggattcaattctccctcttaagtttttagatgatggttttttgatggctgttgcagatggcgttggttcttactctggagccgaagttatctcagaagaagtcataaaaactcttaatgaagtaacatcattagagttactaaatcagacatctgatattttttag

SEQ ID NO: 317282 - DNA, 1047 bp, Proteus mirabilis
atgagtatattttcaattgatgagtcaggctacactggacgagatcttctccaaaagtcacagccttggcaaggagcgagcgctgtaaagattagtcatgatgatgctctttacttgatcaaacaacattttcctaaacgcaaagcccccgaattaaaatttagttctcttaaaaagagagatagttatcagaaaccaattttcactttgcaacaagagctacttgctaacttcccatgtgtcacgtgtattgcagataaacgttttattttggttcaattgtttattgagtatgctgtagagcctttttactatgctaatggaataaatttgtacgaaaatggtgggaatgtttccatggcatcaatggcttactatgtatgtaaagcatattttggcaatgattttgaaaatattctgttatcctttcaaaatgctatgtatgaaaaaacgcatgctgcagtaaaaactcttattaagagtgttaaggctgtggattggtggctattgccagaagtgctgggaccgctggctcaggaacacccggattgtattgaagcaatcattaatccaagcacttccactgatgctgcatttattatccttcaagcactaatatcacgtaccgaactaatgtcagaaggaccatatggcattgagcatgaccgttctaaaaaccttctacaatataatgattacctttccatgctgatcaaatgtcagataccagctgaatttaaaatgtccgaaattgctagtatcagataccctttaaagttgaaaagtgtaaagcaagttgactccaaattgagtcctgccgttcaattatgtgatgttttaatcggtagtgcaatatcaggagtgcgcgatctattacatggcaaaccaacacccatttattctcctttaaaactatatgaaggtaaccagctaatccattttacacctaatattgattttaaggagcaaaaaaaattcaggaataacggtcaaggaaatgaatacattgattttattgctgaccaatttaataagtttggtggctga

SEQ ID NO: 317283 - DNA, 756 bp, Proteus mirabilis
atgttgctattaacaaaagtttataacagcaccttcttaccttggaatcaaaataaatacgataattcagcgatgattgagcaagctgtacgtgatgttttggaaaaaggtttagtattccgtatcgatgaagcatcacttaccaatagcagtggcgcaagcaagctaaactttaagttagatttaaatgcgttcaatgctgatgcactgaaaaaagaagacaaggcgccttcagttctgtttaatgaattgttcaataatatcgattttaatatcgatctttctgtaccaatgctaacggagttccgtagtaccacacaataccttgatgttatgcgttattctgaaaaaggcttaacagacgaagataaagctgaaattcagaaaacaaccgctaacgacatggcacagttaaaaactgaattacagcaaaatatcaatcaaatttctcaagacgagaaagatgctctgccattgatgctgttatcacaagacggtaataaactgtctttaaacctgaactatgctgctgataaatttactatgaacggtaaaacttacagctttgatgagtttatggaagtaacacaagcccctcaaatgttaggtttagcggcgatgttatttggtgcgggtgcttcttcttatgattatgatgactctgattatcctgaatattcagaagagccagatcaaaatgatgcaatagaagagccacaagttgagatccctgcagcacctgctgaaaacaattaa

SEQ ID NO: 317284 - DNA, 270 bp, Proteus mirabilis
atgcgtagtttggtaaacggcagaaagattattttagaaaatgatacaacaaataccggcggtaccgtacttaccggctcttctattgctaaacaaacccaagggattgcctgtgtaggtgatcctgtttattgccctgcgtgtaaaaaaacaggcactattattgaaggggataatttaatgaaaattaaaggtatccctgtcgccctcgaagggcataaagtcgcttgtggctgttcagatggctgtatactcgttgcaacagattaa

SEQ ID NO: 317285 - DNA, 249 bp, Proteus mirabilis
atgggattaataattcaagagcaatgtgttattgttgatcataattgccccgactggctaataactcggtctgaagggaatccaactattgattatacagatggcttaaaaatttatgctatttttaaaagacaattcctttcaggtaaaagaagacgtaatagaaaacaacgtcaactgggggataattgtcctttaatttatgctttgaaaaaaaggatgatgtatatacaaatatttctagcataa

SEQ ID NO: 317286 - DNA, 480 bp, Proteus mirabilis
atggaattagaacctaaagggtatcaactaataatatcaatgccttcagcccataatattagccctattatcgcaaaacgtttagcaaaaaaatttaatgccacatatttaactgatattttaagaaaaataacagtcgataatgcttttcaacttctcgataaagcagatattaatattgaagaggctaaaagtcttagtttcaaaattaaattacaagcaaaagaagttggacttaaaggagggttttcactaaaaagtatccctactgaatttaggaatatatttccaccatttgttttaaacacacaagcatcatccaatactgaaaaaatcagaatattacttgtcgatgatcttatggctacaggaacaacattaactacagctagggatatcattgcacaacagtatccaaatgccattatacatgctatctgcctattcagttcaataaaaaaacaaaacaaaaaggcttga

SEQ ID NO: 317287 - DNA, 384 bp, Proteus mirabilis
atggagcatagatcactcaaaatagtagatgatttcggttatgaactgacaacctcatataacagttatcatgatggtgaattagaaaaacttaacctagaaataaaaaaaataaaagaacaattaaagtcctccttgcacactgaaaaaccgagaacactagaatccgacctgaaaaaacttgaatcggatcgttatgaaaagaaaaaattaagctcacattctctattaatacctttaggccaatttgagacccgattaatgacgctaatgaaactggcaagaaactctattatttacctatcgctatccattcacttcgaagaaaggaaacgtcccaaaaacaatctatacttgccaaagcacgttcccttaaaagattaa

SEQ ID NO: 317288 - DNA, 333 bp, Proteus mirabilis; identical to SEQ ID NO: 289919

SEQ ID NO: 317289 - DNA, 450 bp, Proteus mirabilis
atgaaatcaaaaaactttaaactttcaccctccgggcgacttgctgcgtctttagcaataatttttgtctctcttaatgcttatggcaatggcatcgtgcccgatgcaggccatcaagggccggatgtctctgctgttaatggtggtacgcaagtgattaatatagtcacgccaaataacgaagggatttctcataaccaataccaagacttcaatgttggcaagcctggggctgtatttaataacgcattagaagggggacaatctcaacttgcgggtcatttaaacgctaacagcaatttaaatggtcaagctgcctctttaattttgaatgaagttgttagccgcaacccatcattcttattaggtcagcaagaggtctttggtatcgctgctgaatatgtgctttctaacccaaatggtatcacatgtgatggctcctcgtattga

SEQ ID NO: 317290 - DNA, 309 bp, Proteus mirabilis
  misc_feature (260)..(269): n is a, c, g, or t
atggaatggatcgtagatccgacgatatgggtaggtctttccacccttattgttctcgaaatcgtacttggtattgataaccttgtttttattgctattctagcagataaactcccagcaaaattaagagataaagcacgtatcacaggattattgtgtgctcttattatgcggattgtactgctatttagtctctcttggcttatcaccctaaccaaacctcttatcacactgtttgatcatcctttcagtgccagagnnnnnnnnnngagggatattcttacttttcaaagccacaatggagcttaa

SEQ ID NO: 317291 - DNA, 600 bp, Proteus mirabilis
atggcaccgggtgagcgacgtgaaattcttattgatctatcagaaggcgaagaagtgactatcactgctgggcaaagtgccggatttatggatagattacgtggtatttttgaaccttctaacttattacgcaataccaatgtgctaaccatcaagcctactggactgatgtcactggttaccgataaagttccacaacagttggtggtggatgacacacaaattaccacctcaattcaaccgagaacgatccaattacaaaacagtcctcctggtattaataatgcgcgttgggagttatcaaggatcgatcttgtcggtaaacaaaatggctgggaacgttggttagtgacagtggaaacaccacaaccttttcatattgaaggtgcacgttttaaagtgattaatcatgatggacaaaaaccagcgcctgctgattttggttggaaagatacagtgtggatcgaaaaacagagtgaattattagttgagctaaaacagccttcttattctcatttcccttttgtttattatagccaaatactcgaaaatgcggataaagggattgcggggcaaatggaaatcacgccatcagaataa

SEQ ID NO: 317292 - DNA, 558 bp, Proteus mirabilis
  misc_feature (7)..(16): n is a, c, g, or t
ttgatcnnnnnnnnnnattttgatcaatggactgaaggctctgctgaatcgccttttaacgaaaaaacagtatcagaaaaaggtaaccttgccgctgattcattgttagcgaaatttactcataacatgactgaacaagcgcgaaatggtgagttagatccggtcttatgtcgcgataatgaaatcgacttaatgattgatattctgtgccgtcgccgtaaaaacaatcctgtggtagtcggagagcctggagtgggtaaaagtgcgttaattgaaggactagcactacgtattattgccggagagattcctgataaattaagaggttgtgaacttcttactcttgatttaggcgcattacaagcaggtgctgcagtcaaaggcgaatttgaaaaacgctttaaaggcattatgcaagaagtcactcaatctcctcaccctatcattctatttattgatgaagcacacaccctcattggtgcaggtaaccagcaaggtggcttagatgtttctaatttattaaaaccggctttggcgcgtggagaaaaaatattttga

SEQ ID NO: 317293 - DNA, 1710 bp, Proteus mirabilis
gtggagaaaaaatattttgaaaaagatgccgcattagcgcgccgtttccaattagtgcaagttaaagagccatcatctgcagaagccattatcattatgcgtggcttacgtagtatctatgaaaaatcccaccatgtctttattgatgatgaagcactacgagccagtgctgaattaagtgaacgttatatctctggacgtcaattaccagacaaagccattgatgtattagatacagcctgtgcaagagccgcgattaatctatcttcgccaccaaaggcattatcctctttgaaaacagaactccaccaaatcaatatggaaatggatgtattacaaagagaacactatttaggtttagatgatcattctgagcgtcttgaaacgttagcctcacaagcaagtgctattgagcaacaagcaactgatttacagcaagcatgggagcaacaaaaagagcttgtatctcaaattattaccttacgagcaacattacttaataatgctaccgaagcgactaatgacgatgtcgcaaatgatgttgcaaataatgaagtggtaagtgatataagaacttatagtgaagcagaagatgctgaagataatgatgaaaaaatagcgacacagcccccctgctcatctgaagaattaaagcaacagttacaacaattagataaacaacttgctcagctacacgacacgcatttactggtttcacctcacgtcgataaaaaacaaattgcggcggtaattgctgaatggacaggcgtaccattaaatcgattatcacaagatgcattatcaattgtcactgagttaccgacctacttggaagagagtatcaaaggccaatcattagccattcaatgtttacacaaacatttacttacagcgcgggctgatttacgtcgaccgggtcgaccgctgggggcattcttattagcaggtcctagtggcgtgggtaaaacagaaacggttatccaaattgcccaattaatgttcggtggcacacaatatctcacgactattaatatgtctgagtttcaagaaaaacatactgtttctcgccttattggttcacctcccggttatgtgggatatggtgaaggagggatcttaacagaagctattcgtaaaagaccttactcagttgttttactcgacgaagtagagaaagcgcatcctgatgtgctaaatctattttatcaagcttttgataaaggagagatagccgatggagaaggacgagtcattgattgtaaaaatatcgcatttttcctcacctctaatttaggtgaccatgtcattactgcttacgcggataaaccggacgaactagaagatgcactctaccctgaactaacaactttctttaaaccggcattacttgctcgaatggaagtgatcccttatttaccgttgcctgcagaggttttacgacaaattgttgatggcaaattagctcgttttattaacctattaaaacagcgtttcaacgcagaaatcaatgtagaagagagtgttgctacggaaattttacgcagagcttctcgtgctgaaaatggtgcgcgtattttggaatctattattgatggtgcgttattgccgcctctttctttattacttctacaatatagtgcacgtaatgaagctatctctcatattcgcttagcgactgaaaatgatgagtttattgcggaggttaattaa

SEQ ID NO: 317294 - DNA, 606 bp, Proteus mirabilis
atgaaagcggttgataaatttgaatatcgtcgtggttataagttctcaacttatgcaacatggtggatccgtcaggctattactcgttcaatcgccgatcaggcacgtaccattcgtattccggtacatatgattgaaacgattaataagctaaaccgtatctcgcgccaaatgttgcaagagatgggacgtgagccttcaccagaagagcttgcagaacgtatgctgatgcctgaagataaaatccgtaaggtactaaaaatcgctaaagagcctatctccatggaaaccccaattggtgacgatgaagattcacatttaggtgattttatcgaggatactaccctcgaattacctctggattcagcaacatcagaaagtttacgttcagcgacacacgaagtattaggtggtttaacactgcgtgaagctaaagtcctgcgtatgcgctttggtatcgatatgaataccgaccatacattggaagaagtgggtaaacaatttgatgttacccgtgaacgtatccgtcagattgaagcaaaagcgttgcgtaaattacgccacccaagccgttctgaagtgctacgtagcttccttgatgaataa

SEQ ID NO: 317295 - DNA, 1260 bp, Proteus mirabilis
atgaccccggtttcatctgcattaaggcatctcttttttgcctcaacagcattgaaaaatgaaacaggatcatctgcaaagccagataacttacaccatataggtattttaggtggagggttaatggggggcggtattgcttttgtgacagcaacaaaaggtaatttacccgttagaattaaagatattagtgataaaggtattgcgcaggcacttaactatagttggaaagcgttatcaactaaggtcaagaaaaaacggctctctgctcgtgaacgccaaagacaaatggggttattatcagggacattggattatagcggtttccatcaaactgaccttattgtcgaagctgtttttgaagatttggctttaaagcaaaaaatggtggctgatattgaagccttaggtgaaggcaagatcatctttgcttcaaatacttcttctcttcctatccataaaattgctgaaaaagcacaatatccagaaaaaataattgggctgcactattttagtcccgttgaaaaaatgcccttagttgaagtgatccctcatgaaaaaacggatgctaagacaatcgccacaaccgttgcttttgctaaaaaacaaggcaaagttgccattgtggtaggagataaacccggtttttatgtcaatcgaattctcgccccttatattagtgaagccttaacctgtttggttgaaggggaaacgatagagaatattgacaaagcattagttcaatttggctttccagtcggccccattcaacttttagatgaagtgggaattgatcgttttgcatctcctcccgcggtggatgcgattattgcggatgacagaaaagggcgtaaaaacggtcgtggtttttatctctataatcagcatgccttacctttctctttaggaaaaaataaaaagcgtgcagacccgatgatttatcgcttattacaggttaaacctaaaaatcagttatcggcttcagaaataaccgaacgttgtttattgcttatgcttaatgaagctgttcgttgtttagatgaaaacattattcaacaacctagggatggtgatattggtgctgttttcggtattggttttcctcccttctttggtggaccattccggtatatagatagtatgggaacaacaaaaatagtcgataagcttaatcaattaactgaaaaatacggtgaaaagttccaaccatgtgagcgattagcagcaatggccaagttaaatgaacgattctatagctag

SEQ ID NO: 317296 - DNA, 273 bp, Proteus mirabilis
  misc_feature (256)..(265): n is a, c, g, or t
atgtctgagattgtgtatttaaataaccaatttgtacctaaagaacaagctaatatctctgtttttgatcgaggtttcttatttgctgatgccgtttatgaagttaccgccgttattaacggacaattgattgattttgaagggcattttcaacgtttacagcgctcttgcaaagcattatcaatgcctttttcattaaccaaagagcaattaaaagagatccacgggcaattgatagataagaaccatctgcatnnnnnnnnnnctgcatga

SEQ ID NO: 317297 - DNA, 588 bp, Proteus mirabilis
  misc_feature (573)..(582): n is a, c, g, or t
ttgaaaaacaacgaattagaatggcaggcgttacgcccagattacgcctcctaccaaactttctttcaaacagcatcgcaattgcctgcatcttcacttcgtgaggttcaacctcgcttatatgaaagcttacagtggctaaataatgcagaagcaggccaatttatgctgttaaaagcagaagattctactgcttatttcgaaacactcgctgatacattacaacaagcagagataaaaacttatcctgttgtaggtgcctatcaagctgagtctaatcaaatttattggcaagaaaatgtagaaggctcattttcatcatcagaatctattgcttgttgccaatggatagagccagaacaactttttggttcattttattatcataaagataagctcctcgttaacccaggactgttgcataaagtcaatggtggtattttagtcttatccattaaaacgctcttagcacaacccttaatgtggttccgactgaaaaagatggttgaagagcaacgctttgaatggttagtgtggaatgaccatcaagcacttcctttgcctattgaagcnnnnnnnnnntattga

SEQ ID NO: 317298 - DNA, 213 bp, Proteus mirabilis
atgcaaacaccattaaggttattgcgaattaagcaaaatcttacgttgagtaaagttgccgaagcagttcaaattgatgtaggaaatcttagccgtattgaaagaggcgctcaaaaaacttcgttagaagttgctgtttttttaatttgtaactacaaaaaatcattaacaagggtaggaaatgaatcactcaataaaattaacgtcgtttaa

SEQ ID NO: 317299 - DNA, 531 bp, Proteus mirabilis
atgtatggtcttgaaatttttcctgttgaaggcggtaaaccttactgtttaacgcgtgatacgcaaattctctgttatttaacctcttatcagataggaccagaagattggcctcattatcgacaaccgaaaaaaacacggagcaaagtcattcatgaagccatggagtatgaggcgttcgccatcccgagagtggcttctgtgtatatggcggtgaatgattatgcgtattttcagggaataacgcatatccgaatggaagggcctgtattacgttatgagtatgtttatgacaatgttcaggttcaagacccacagatggccaaaagagccaatatggtggtcgatatttatggtatcccgttaccggatagtacaaaaccaacgtatggtgtggagtggtatggcgcttttcagggatttcgaagtgcgattacacgtaatacacaaatggcttattgtgtgtttcgacaaaaatccaccttaaaggcgagcgctattggtctttgccgacaatattatcgcatttag

SEQ ID NO: 317300 - DNA, 219 bp, Proteus mirabilis
gtgcgtcaatttaaagcaacggcgaatacgacacctggcgaagttctacaatccattcgtatgctaaaagcactttcattattacaacaaaataaatatacattatcagatatcgcagaaagagtcggataccaatctgaagctgcatttagtaaagcatttaaaagtgtatttaattgcagaccagggcagtggaagaagcaacagagtaaagtgtaa

SEQ ID NO: 317301 - DNA, 321 bp, Proteus mirabilis
  misc_feature (297)..(306): n is a, c, g, or t
atgttgtggcacaaacttcctaaatcaatttatttccgccgtggttgcttacctattgcactggaagagattgcaactgatggtaaaaaacgcgcatttatcgttacagacagtttcttattcaacaacggttacgttgatgaagtgaccaatgtactgaaaaaatttggtgttgaaacggaagttttctttgaagttgaagcagatcccacattaagtgtcgtacgcaaaggtgcagagcagatgaacagctttaaacctgatgtgatcatcgcattaggtggcggttcaccaatnnnnnnnnnnagattatgtgggtaa

SEQ ID NO: 317302 - DNA, 993 bp, Proteus mirabilis
atgtatgaacacccagaaacacacttcgaagaattagcattacgctttatggatatccgtaaacgtatttataaattcccgaaaatgggtgtgaaggctcaaatggtagcaattaccacaacatcaggtacaggctctgaagttacaccatttgctgttgtgactgatgatgaaacaggccaaaaatatccattagcagactacgcattaacgccagatatggcgattgtagatgccaatctggtgatgaatatgccaaaatcactctgtgcttttggtggtttagatgcggtgactcacgcattagaagcttatgtttctgtattagccaatgagtattctgatggtcaggcactgcaagctctgaaattgctgaaagaatatctgccagcaagctatcatgaaggtgctaaaaatccggttgctcgtgagcgtgtccacaatgcagccaccatcgcaggtattgcatttgctaacgccttcttaggggtttgtcactcaatggcgcataaattaggctctgaattccatattcctcatggtcttgccaatgcgttattaatttctaacgttattcgttataacgcgaatgataacccaacaaaacagactgcatttagccaatatgaccgtccacaagcacgtcgtcgttatgctgaaattgctgatcacttagaactgtctgctcctggtgatcgcacagccgctaagattgaaaaactgttagcttggttagaagagatgaaatcttcattaggtatccctgcttctatccgtgaggcgggcgtacaagaaagtgatttcttagcgaaagtggataaattatcagaagatgcgtttgatgatcagtgtactggtgctaacccgcgttatccgctgatctctgagttaaaacaactgttattagattcttactacggccgcgaatttaacgagcaccctgttgctgaggtaaaagaagcgaagcctgcgaaaaaaagcagtaagaaataa

SEQ ID NO: 317303 - DNA, 1023 bp, Proteus mirabilis
  misc_feature (921)..(930): n is a, c, g, or t
atgtacgatcaaatgttcacagcgcattatcctacattaaattttgcgactgagtttcgcgatgatcagcctgaagtggcatctatttatcaacgttttgaatactatcaaggtgtcagtcgtgataaaaaaatcaccgctgaaatgatcgacaaaaatttagcattatggaaaaaattagccttagaacaacatgctgatggctcaataaccgcaaaagcccttgatcatcctaatcgccagaattttatcaaagtcgagggggtctttagtgaagaaacccaaaaagcattacttgatgccaacatgctaagagatgtaggcaaaacgcttcttcaaacagcgatttacttgcgtagtcactccttatcagcaatcgatagaaaaaaattagaaacgctctatttattaggcactcgttacgttcttgaacaaggtttcacacgggggagtggttaccaaattattactcacgtaggttatcaaacaagagagctttttgatgcatggtttattggtcgccatattctagcaaaacataatctgttagcaccgacacaacaagccatgatgtggtataacgcaacagggcgcatatttgaaaaagataatgaaatcgttgatgcaaatgtcgatattctcaatacccaattacagtggatgataaaaagtttattgatgttgccagattatcaacagcgccaacaagccttagcacaattgcaaagttggctaaacaaaaccattcttagttctaaaggtgtcgccggtggctttaaatctgatggctctatttttcaccattcacaacattatccagcttatgccaaagatgcatttggtggcttagcgcctagtgtttatgccttaagttattccccttttcgtctttcatcaccagcacatgcacgcttaaaagannnnnnnnnncttaaaagatgtattattaaaaatgcgtatctataccaaagaaacacaaattcctctggtattaagtggcagacatcctacggggttacataa

SEQ ID NO: 317304 - DNA, 1389 bp, Proteus mirabilis
atggctcttgcaggtacgcccgatggtaaacaagagctagatactacattagcagccgcttatgcaaaattagcaaacaaagatagctttgaaggtattaaagcagaaaatgaaccggtaggtgcatgggcaatgaattatgcttcaatggcaatccagcgtagagcatcaataacagcgccacagcaaagctggcttgctatcgctcgtggttttagtcgttatttagtgggtaatgaaagttatgagaataacaaccgttatggtcgttacttgcaatatgggcaacttgaaattattcctgcggatttaactaaatctggttttagtcatgcaggttgggattggaatcgatatccaggaacgactacgatccaccttccttatgatgaactagaagcaaaactaagccaattgccaagtgcaggcatagaagaaatgttgctttcaacacaacgttattctggtgccaatacactaaataataacagtatgtttgccatgaaattacatggtcacagtaaatatcaacaacaaagtctaagagcgaataaatcctatttcttatttgataatagagtgatcgcattaggctctggtattgaaaataatgataaacaacatacaacagaaacgacactgttccagtttgctgttcctaagttacaatcaattataattaatggtaaaaaagtgaaccaacttggtactcaattaaccttaaataatgccgatacattaattgatccggcgggtaacttgtataaattagctaaagggcaaacggtagaatttagttatcaaaaacaatactctgttgatgacagaaattcacagcaaacagaacaattgtttgcaacagccgttatctctcacggtaaagcccctaaaaatgcaaattatgaatatgcaatagccatagaagcacaagataataaagcgcctgaatacaccgtattgcagcataataatcaacttcatgcagtaaaagataaaatcacgcaagaagagggatatgctttttttaatgccaccgaagtcaattcatctcaagctttattattatcaagtgattcccccactatggtaatggtaaaaaaacaaaaacaacaattaacgctaagtattgttaatcctgatttaaatttatatcagggtattgaagctgaccaaattgataataagggtaaccaggttgaagtgagtgtttattctcgccaatggcttacagccgatcctcaaccaataagtagtacagttactgtaaaagggatttggaaattagccacaccacaattaggtgttaatattagatatcaaaatagtaatacgctaattacaacaacgactatacaagcaataccaataacagtttatttaattaagtaa

SEQ ID NO: 317305 - DNA, 276 bp, Proteus mirabilis
  misc_feature (18)..(27): n is a, c, g, or t
atgatattgcggatatcnnnnnnnnnnaaatttgacactgttgttccagtggcttttaaggttgcatcatataaagcaattgcgcctgatagagaagttcgtattgcttgtagagaagcgtttcgtaagtatcaaacactcaataaacttatccctttaattgaagaagttctttctgcgggagaaattactccacctgaaccacctattgatgctcaaccccctgcaattcctcaagctcacccttttggcgatgaaggtcatagagaaaaatag

SEQ ID NO: 317306 - DNA, 495 bp, Proteus mirabilis
atgtttggatcttctaacgtgattttgagaaataagcgcttatccagttatcaattagcacgacttcacacttttgaagcaacaggacggcatttatcattcgctttagccgcagaggaattgtccttgacgcctagcgcgattagccatcgtattaatacactagagaaagagttagggataaagctatttaatcgctttcatcggcgtattgaattaaccgaagaaggtgaacgtatttattgggcattgaaaaaaacacttgaagatattaatcaagagattttagatatctataatcaagaaatatctggcgtattaacagtgtattctcgcccttctattgcgcaatgttggcttgtacctcgtatttctgattttactcaacgctatccttctattgaattaaacttacttactggcaatgacgatattaattttcgtggttatggtatcgatctcgctatctatttcgatgaaaaatctctattgtga

SEQ ID NO: 317307 - DNA, 294 bp, Proteus mirabilis
  misc_feature (258)..(267): n is a, c, g, or t
atgagacgtcgagtcgctaccattacattaaatcctgcttatgatcttgtgggattaagtacccctattgaattgggtgaagttaaccgagtaacaacagcgggatttcatgctgccggtaaaggtatcaatgtagccaaagtattaaaaagccttggtattgatgtcactgttggcggttttttaggtaaagagaatcaagatggctttcaaaaagagtttagtgaagccgggattgctaatcgcttccaaatggtnnnnnnnnnncacacgtatcaatgtcaaactgactga

SEQ ID NO: 317308 - DNA, 1425 bp, Proteus mirabilis
atgagagcctgcgtaagaggtagaggttatcgtaaattcacttatcatgcggatagacttaaatatcccatgaaacgtgtgggtaagcgcggtgaaggcaaatttgagcgtatctcttgggatgaagcaacctctttaattgctgagaatgtaacacgattaactcaacagcatggtgcagcaagtcgttttcttacggtaaataccgccgtcactggggggatcttctctggtgatactatgatgaaaaaactctttaatctcacaggaggatatcttccttattatcactcagtgagcttagggaataccgctaaagtcacaccttatacttatggcgtatctaaaacaggaagttctcttgatactttagcggatacgcctttagttattttgtggggacataatcccaacgaaaccatttttggtcacaccaatcactattttcaaaaaatgaaaaataatgggaccaaatttattgttgtcgatcctcgttattcagatacagcccaatctttagctgatcaatggatcccattacttcctaccacagataatgcactgatggatgcaatgatgtatgtcattgtgaccgaaaatttacatgataaagcgtttatcgataaatatgtggtaggttttgatgaagatcatatgcctgaaggggtgccagctaacgaatcattaatggcttatttattagggaaaaaagacggtatagcgaaaaccccagaatgggcgacaaaaatcacacgagtcccagccaatactatccgtcaattagcacgtgaatatgcgatgacaaaacccgcggccttaattcaaggttgggggccacaacgtcatatttgtggtgaacgtaccgcccgtggttcaacgttattagcagcaattactgggaatgtgggtaaaaaaggggcttgggcggctggatatggcggaattggtaaccgtcaatctattcgtggtcctaatattggcaaaaatccggtaactgcacaaatatccattatgaattggatgcaagctgttgaggatgcgagcaaagtgacgccagaagatggccttattggcgtcgataaacttgatagtaatatcaaaatgatcttttctttagcgggtaactatcttgtcaatcaaaaccctgatgttaatgcggcagctaagttacttgaagatgaatctaaagtagagtttatcgttgttagtgatctatatatgtctccgtcagccaaatacgcagacttagtgagcgttggaatatcggtaatacatggggaacgggcaactatttcttactgtcagaaaaagtcgttgaacctgcttttgaaagacgttctgattatgaatggatcagcgatgttgctgagaaaatgggagtcaaagaggcttttaccgaaggacgaacagaaaaagagtggatag

SEQ ID NO: 317309 - DNA, 183 bp, Proteus mirabilis; identical to SEQ ID NO: 315146

SEQ ID NO: 317310 - DNA, 693 bp, Proteus mirabilis; identical to SEQ ID NO: 303586

SEQ ID NO: 317311 - DNA, 183 bp, Proteus mirabilis
atggcgtataatgccaatcttcgtgtcgataagctggaaaacccactttttccacttgtagccagtgattacgtgcatttaaattatcttcccctttacgctgttgatatagcgcagagaattgttttaatgcctgttgattacgctgttctacttgatgctgtttttcacgtttctcattga

SEQ ID NO: 317312 - DNA, 330 bp, Proteus mirabilis
atgattgccatggctttggcgttatcaccaaagttattaattgctgatgaacctactaccgcattagacgctcccttgcgcagagaaatattacagctattgcaacgtatcacgatatctaaaaacaccaccttaatttttatctctcatgatctaggattagtcagtcagattgctgatgatattttagtgatgaaagagggaaaattaatcgagtttggtgacaaaaacagcgtattagatacacctaagcaagcctatacccgttatttaattgaggctagagctaagctttcccaacgttttgcacaggtgctttatgctcggtga

SEQ ID NO: 317313 - DNA, 804 bp, Proteus mirabilis
atggctattaaaaataatgagtataacaatattgtaatgtactgtttatcaaaaagaattgttaataaggataaattatgtgaagaattcaatttaactgaaaatgaatatgacattttaattaaaatgctatttaatgatggtgtactgtatattcaagatagtaatggtagctatcatactaatccaaagtatatacatccagatgaaaaaagagagagagaaaaactaaagcaacaaagaagaaaatcaagtgctgacaatagaaaaatgctatctatattattagcaatggttgcctggactgtttttattacgactataatctttttatcgaccagaagtaacttactaatgggtattttattacctattgcatctttagtccttagctttgcattttatgaaaaaataggaacggtaattcctttatttttaatgattgtattatgtgttttttctattttattagttaataatataacgccactatttggtgaaaaatatgaacgtagagctatacaggaagagcttgatagaacaattcagctgaaactaaatgagcaaaaaatgtatatccagcaagctgaatccgccttacgtaaaatattaaaagatccagactctgctaaaatatcaaatagttttaagagtggaacaggtgctgtctgtggaaatgtaaacgcaaagaatagcctcaatgcatatactggatatcaacgatatatatatttgttatcgactccttttattgatgatggtagcgaatcttttgataaaacatggaatgaacattgtggttaa

SEQ ID NO: 317314 - DNA, 534 bp, Proteus mirabilis
gtgctgaccggccttctctatttgcttctgttgcgggtgagcctagatagacgtaatttaaatattcacaacgcacaaatttttactaatcgcgacaatatggcaatggatacctttatcgttttagagcctaatggtaaaccactggcgattgatcgctatcatgctatacgccaagcgcttattcgcgttgtatcagccccttataacgccaatgccaaaacccgtgctttaccagctaaattacgccattttgaggtacccactaaaattaactttatcgcctctaaccataataaacgtacttatatggagttatttgcacgcgatcgcccaggcttattagctattataggtaaggtttttgccgatctttctctttcgttacatggcgcaaggatcaccactattggtgagcgtgttgaggatttttttgtattaacagataacgaaaataatgcgttaaaccaaaaaatgaaggatgaagtcgtagaaaggttgacaaaagccctcgtttcaaaggataaaatatag

SEQ ID NO: 317315 - DNA, 351 bp, Proteus mirabilis
  misc_feature (330)..(339): n is a, c, g, or t
atgagtaaaattatggagttaatcggcactatttttcgatttagttggcaggcgattaactttatcaggaaactaatcttaaacgttattttcttctttctactttttatgggtgtgggactctatttcatcgtccaagaaacgcaaaaacctaccgattatcaaggtgcattactggttgatttaaaaggcgttattgttgaccaaacagctaaccaaaatcctttagggcaaatgagccgagagcttttgggtgtttcgggtagccagttacaagaaaattcgttattcgaagtcgttgataccttacgcaaagcagcgactgacccnnnnnnnnnngaatggtactaa

SEQ ID NO: 317316 - DNA, 741 bp, Proteus mirabilis
atgctcaggagtctcgtgggctcggagatgtgtataagagacagtaataacggagaaattgattcaaaagatattattgatgaaagttttttaaatgttgaactccctattccttatggaaaacgtttttctaattttcctgttttaggtaatattgataaagaattaagagagagttatattaagggagagtttaataaaaatatagaaataatttattttttgagccaaatctatataggagagagattctcatcactcaaagaggtaattataagaggtaataagtattattttcttcctcttgatggatatagatatattagagaggattattttagctctggagagtactttgtaataaatttatataagacagtaacttctgattgtaaattaattgttgtagatgaaattgatatttctcttgatgcctctgctcaagttagattaatacaagccctcaataatttgtgtgataaatataagaaaaaaataatatttacaacacattctcttcctattatgagagtgttatatcaacaggttggtgagtctatattttatttagagaatattaattccaggctaattatgagagaagtctcatatagttatattgtgggtgagctttttggttttaaagattatgataaatatattctaacagaagatataatgttggaagattatttatataggtggtgcttcaaatgttatagattttatgagaagaaataa

SEQ ID NO: 317317 - DNA, 270 bp, Proteus mirabilis
atgttcggaaaattaactctcgatgcaatcccgctacaagaacccattgttgtcgtaaccctaatcggcatcattcttggcggtcttgctgttgttggcgctttaacctatttccgtaagtggaaatggctatggagcgaatggttaaccagtgttgaccataaaaaaattggtattatgttatatcatcgttgcaatggtcatgatgttccgtggctttgccgatgccattatgatgagaagccaacaggcactcgcctcagcgggtga

SEQ ID NO: 317318 - DNA, 324 bp, Proteus mirabilis
atgaatattttattagttgaagacgatctgcaattgggaaaggcgctctgtcgtggtctagaaattgccggttttcagccctgctgggtaagattgcttacggatgcacgtgttcaattaaaccaaaaagcctttgatttaatgttgcttgatctaggtcttcctgatggtgatggtcaagatgaacttatcgcactaagaaaaagtggtgaaaaaatacccattattattttgacggctcgtactcaaatagataacttagtacaaacattagattcaggtgccgacgatttcttaccaaaacctttgctatgcctgaattaa

SEQ ID NO: 317319 - DNA, 162 bp, Proteus mirabilis
atggatcaagggcagtttacattgcagtttgacctcggtaaaaatgtcaaaatagaaaaagccgatttatcaagtggacttctgaccattgctattgagtatgagttacctgaagaagaaaaacggcaaacaatagcgatagaaaataaagataaaagctaa

SEQ ID NO: 317320 - DNA, 486 bp, Proteus mirabilis
atgaaaaataaatcattttatttcacgctattattattttttattgctatggatacttctgctgctcgatgtcggaatgtgtcaatcaaatataattttccagcccaaatagatattacaaataaaaaagtgggagataagctttattcttttggtgcgccagacgcccctataaacgttgctggtcaatgtctacgtgctaatagtggggcgggaaatacaaatggaaattatatttatattgttgatcaatatggatcatcaccaacattatgcccgactactggtacagttgataaaaattcaccagatggatacttgcgttttcgttcaacgggaagttgtgctaattcttcttggctgctagttcttgattataaaatatctggggttggctggaccaatttaacaggtcccggtggtggtactgattcaggcgttgtttatttacaaaaaaaagccacctgtaggaaaaacggttattaa

SEQ ID NO: 317321 - DNA, 318 bp, Proteus mirabilis
atgagtaatccttttacagtatcacaacaccctgaacagctagagacctcccctttaatagatgaatgccatcactatgatgaccctttaccgccaaaagatctgatttttttacaaagtataaatgaacacacatgtaaaattaaatcagcgcaagtaaatagtagattatcaaacatatttccaatgtttttagtaatatttatgttaatgttttatacattgtttattttttatgagaatcatagtgctaaaagatttacttttgaagaaaacgttcaaaatatagagtcagaatatggaaactctcaaaactag

SEQ ID NO: 317322 - DNA, 489 bp, Proteus mirabilis
atgagaattagttcaatttatacacaatctgtaggaccattagctgatggtgttattaagttagaagatgattggtctaatgagattgaagctcaagttttatttaccggtaataatggttgtggtaaatcgactttattacggggcatagctattttatgggaagcattaggtatttggctaagtactgaacaaccgttagctccagcgagcaatacacgaaaatggttagaacgttggggagggatcgctattatttttgaagattttaatctttcttctgatgataagattaaaattggacttttttatggttcagatgattttttttcccaagtagtaacaaactatttagatgtaatgtggataggtgaaatttcaaataataaaaagaaaaataaattatattttccatctagtgaaaataaacataatgataatctgattgagacctataaatatttagggaaaagaattatctattcctaa

SEQ ID NO: 317323 - DNA, 321 bp, Proteus mirabilis; identical to SEQ ID NO: 303195

SEQ ID NO: 317324 - DNA, 387 bp, Proteus mirabilis
atggttatttataaaacaaagatgttcaaaaatagtttcaaaaaaataacgcttacgaatgcagaactaatcgctatcgctaccgaagtccttgcaggacaatttgaggcagatctaggtggtggtgttatcaagaaacgtgcctgtatccaaggaaaaggtaaaagtagcggaattagaacaattatattttataagcaagggaataatttattctttgctgatggttggaaaaaatcgagtttaagctctaaaaaaaccaaagagatcacagatgatgaacttgagtcctataaagatctagcaaaagatctcttcaatgcaaatcaaaataaaatagataaaatgattgcactaggccttttaacagaggttaaatatgactga

SEQ ID NO: 317325 - DNA, 318 bp, Proteus mirabilis
  misc_feature (261)..(270): n is a, c, g, or t
atgcagagttatcactctctatcggctcaagtttatcaattggataaaccgataggatgcagtttcggcgatgttgaatactatcaacagcgattaaaagatgttaaaggtaaaattttagagccggcagtaggaacaggacgtatccttatccctttattgcaatcaggttttaatattgagggatttgatctttccgaagagatgcttgaattttgtaagaaaaatctaatcgagcatgggtttacaaccaactacgtnnnnnnnnnngttagattgttctttattgctaatgctcttgcatcatcattttgttaa

SEQ ID NO: 317326 - DNA, 276 bp, Proteus mirabilis
gtgcaagttattccattaagtgagattgcggcaaaagatgaatttctcaatatcaagaatgtcagccgtgacgatatgttagcagcacaccgcgtaccgcctcaaatgatggggatcattccacagaataccggtggctttggtgacgtagaaaaagcggcaaaggttttctttcgtaatgagttggcaccactgcaaagcaagatattacagattaatgattggttaggtgaagaagtgattaagtttgataagtacacactagatgatgagtaa

SEQ ID NO: 317327 - DNA, 276 bp, Proteus mirabilis
gtgcaagttattccattaagtgagattgcggcaaaagatgaatttctcaatatcaagaatgtcagccgtgacgatatgttagcagcacaccgcgtaccgcctcaaatgatggggatcattccacagaataccggtggctttggtgatgttgaaaaagcagcaaaggttttctttcgtaatgagttggcaccactacaaagcaagatattacaaattaatgattggttaggtgaagaagtgattaagtttgataagtacacattagatgatgagtaa

SEQ ID NO: 317328 - DNA, 207 bp, Proteus mirabilis
atgtctaaagaaagtgatgtaaccgatttaattaatgccgttcgagaagatgaaagaaaatctcgggcggttcttttttctgctcgtttgcgcaaattagcatcaaaagcactaagtgaacgaatggagccttcacaagtatttcaattattagaaggtgaagccgagtctatcgaacatcaagcgcaggaatggaattatgtctaa

SEQ ID NO: 317329 - DNA, 1026 bp, Proteus mirabilis; identical to SEQ ID NO: 16178

SEQ ID NO: 317330 - DNA, 591 bp, Proteus mirabilis
gtgctcattgacttatctaagcaagtcattgaccggaagggctctgattttgattcgcagcaggattcgagtgctttctttttcgatatttcgatgttgtttgaatatttcattcgtaagctcattaagcgagatgggctacgcctgctaggtaagttcgagcaacgtcagcaaatagcatctggtgctctcagtggttatatgagaaaacttgaacctgatcttgttatagaaatcgatgagagtttattcgtatttgatgtgaagtataaagcatttgattcacaatttggggtgaagcgtgaagatctttttcagctacatacttacatagggcagtatggaaatgttgccgcaatcaagggatgtggatttatttaccctatatcagaagaacgatgggcttcacttaaccttgaaaaaacacagggtgtgatttcagatattattcaccagcaaggacaagagataccgttccatgtgctttttctaaaaatccctgaagatacgtatattgattttaataggaaaatgaaagagcagtgcagcatttttattaatgccctttattctaaggtttttaatcggtga

SEQ ID NO: 317331 - DNA, 1500 bp, Proteus mirabilis
ttgtcgaaacgtggcggaggtgttgctttcttactgactaatttacgagaagcaggagcccccataaaacgcattgaaaaccaatcgtctggcgtagtaccggtaatgaaaatgcttgaagatgccttctcatatgccaatcaattaggcgcaagacaaggtgctggagcggtttatctccatgctcatcatcctgatatctatcattttctagatacaaaacgagaaaatgctgatgaaaaaatacgtattaagacgctttcattaggtgtcgttattcccgacattacctttgaattagctaaacgcaacgaagatatgtatctattttcaccttatgatgtagaacgagtatatggcgttcctatgtcagaaatcagtattagcgaaaaatatactgaaatggtcaacaatgcagagatacgtaagaaaaaaattaaagcacgggcattttttcaaactttagctgaaattcaatttgaatcaggttatccctatattatgtttgaagataccgtcaatcgcgcaaatccgattgcgggccgaattaatatgagcaatttatgctcagaaatcttacaagtaaatagtgccagtgaatacaatcctgatttaagttatcgacaaattggtcatgatattagctgtaatctcggatcaatgaatatcgccatggcgatggactcaccagattttgcgcataccgtaaatgctgtctcttatacacatctccgagcccacgagactcctgagattggcttagggcaaatgaacttacatggttatttagcccgtgaagggatttattatggttcagaagaagggcttgattttaccaatatctatttctataccgtaacatactatgcccttttagcctctaaccaattagcgatagagactaaacagcgctttaaagggtttgaacagtcaaaatatgccactggggagtattttgataaatatttatcaaaacagtggttacctaaaacccaaaaagtccgccagctatttagccaatccaatattcatattccaacccaagaagattggcaaaaacttaagctcttgattatgactcacggtatttataatcaaaacttacaagcaataccgccaacaggatcaatctcttatatcaatcactctacatcgagtattcaccccattgtggcaccgattgaaataagaaaagaaggtaaaatcggtcgggtttattaccccgccccttttatgaccaatgaaaaccgtcatttttatcaagatgcttatgaaattggcgcagaaaaaattatcgatacctatgcacaagcatcacaacatatcgaccaaggattgtcgctaacattattcttttctgatgaagcaaccacaagggatgttaataaagcacaaatttatgcatggcgtaaaggtataaagaccttgtattacattcgtattagacaaacagcattagccggcacagaaataaaaggctgtgtttcatgcgccctttaa

SEQ ID NO: 317332 - DNA, 435 bp, Proteus mirabilis
atggcaatggatacctttatcgttttagagcctaatggtaaaccactggcgattgatcgctatcatgctatacgccaagcgcttattcgcgttgtatcagccccttataacgccaatgccaaaacccgtgctttaccagctaaattacgccattttgaggtacccactaaaattaactttatcgcctctaaccataataaacgtacttatatggagttatttgcacgcgatcgcccaggcttattagctattataggtaaggtttttgccgatctttctctttcgttacatggcgcaaggatcaccactattggtgagcgtgttgaggatttttttgtattaacagataacgaaaataatgcgttaaaccaaaaaatgaaggatgaagtcgtagaaaggttgacaaaagccctcgtttcaaaggataaaatatag

SEQ ID NO: 317333 - DNA, 1362 bp, Proteus mirabilis
atgattgaaattcttatcggcgccctcgtcgctgtgggtgttgggcgttacattgttaagggatattcgccaacaggtgtgctacttactggtgggctattattgcttatcatcagtgtgattatgggcaaatcagtattaccagccagtgtcacaagtaccggttatcgcttaatcgatattgttgagtatgtaaaaaatctacttatgagccgtggtggtgatctggggatgatgatcatggtgctatgtgggtttgcttcttatatgactcatattggtgccaatgacgtggtcgtgaaacttgcctcacgcccattaaaaatgatcaactcaccttatcttttaatggtagcggcttatattgttgcatgtttaatgtcattagctgtttcatccgcaacaggtcttggtgtgttattgatggcgaccttattcccagtgatggtcaatatgggaattagtcgtggtgcggcggcagctatctgtgcttcacctgcatcaattattttagcgccaacctctggtgacgtgattttagcggcacaagcttctgaaatgccacttattgattttgcgtttaaaacaacactgcctatctctattgccgcaattcttgggatgtgtattgctcactttttctggcaacgttatcttgatcgtaaagagcatatcgaaacagagatgttagatgtgaacgaaatcaaaactcacgcccctaatttctatgcgattttacctttcacacctattattggtgtattagtttttgatggtaaatggttaccagagcttcatattgttgccattattattctttgcatgatgttatctgcggttattgaatttatccgtagctttagtgctaaagaagtttttgccggtttagaagttgcttaccgtggtatggctgatgcatttgcccaagtggtaatgttattagttgccgcaggggtttttgcgcaaggtttaacaacggttggctttattcacgcgttaattgatggtgcacaatcattaggatcaggggcaattgttatgatgattgcattagtcttaattaccatgctcgcggcaatgacaaccggctcagggaatgcgcctttctatgctttcgttgaattaattccgcgcttagcaagtaatatgggtgtgaatcctgcttacttaactattccgatgttacaagcatcaaacttaggacggactttatcacctgtatcgggtgtggtagttgctgtatcaggaatggcaaaaatttcaccttttgaagtgatgaaacgcgtttctgtaccagtattggtcgggcttgtgattgtgattgttgcaacggaaatactggtacccagcacattaggttga

SEQ ID NO: 317334 - DNA, 837 bp, Proteus mirabilis
atggaagaagatggtgtgaaattggcgcgtcgctcaagtggtggcggtgcagtatttcatgatctaggtaatacctgttttacttttatggcaggcaaacccgaatataataaaaccatttcgacgcaaattattttagatgggttatcgaaagccggcatacaagcaacggcatcaggacgaaatgatttagtcgtaccattggctgatgatgaaagaaaaatttctggctcagcctataaagagacaaaagatcgtggttttcatcatggtactttattaattaatgctgatttatctcgtttagctaactatttaaatccagatccaaaaaaactacaggcgaaagggatcacctcggtgcgctctcgtgtcactaatttagtggaattaaaacccgatataactcatgaaaagttatgccaagcgattactgacagtttttttgactattatggtgagcgtgttgaagctgaaattatttcaccacaaaaattacctgatttaccgggttttgcagaaacatttgcaaaacaaagtagttgggagtggaattttggtcaagcgcctgcgttttcacatctattagataatcgctttaaatggggtggtgttgagctgcactttgatattgaacgcggtacgattattagaagccaaatttataccgacagtttagatcccgcaccattagaaaagctatcgcagatgttagttggacagcgttatgcttctagttcgatgaaaagactattagcgcaattaatagagcagtacccaaataaccaatcagagcttgaagagctgcaacagtggcttgttcatgcgctttcttaa

SEQ ID NO: 317335 - DNA, 270 bp, Proteus mirabilis
  misc_feature (209)..(218): n is a, c, g, or t
atgtggcataccgtacaaaatatttttaatttaggaataaaagagttacgaagtttatcccgtgataaggcgatgctggcattaattgtgtttgcctttaccgtatcaatatactcatcggctactgtaacaccaggctcattacaccatgcgccgatagcggtggctgatcaggataaatctcaactttcggcccgtattgtcaatannnnnnnnnntttatatgccttactttttaccccctgcagatattacacccgagcagattga

SEQ ID NO: 317336 - DNA, 1146 bp, Proteus mirabilis
atgaaaaaagaaactcgttttaaatttaatgcgtacctcacgcaactcggtaaaatttacggtgttagcgcacaagagtttagtgatacaaaggttcaaattgaaccgtctgccgcgcaaacgctggaaaccaatattcagcagtcagcagaatttttaacacacgttaatatcgtgcccatggatgatcaagtgggtgaggccatcggtttaggtatcggctcaactatcgcaggcactaccgatacaacagcaaaagagcgcgaaacaagtgatccgattaagctgaccaaaaatagctatcattgccagaaaaccaattacgacacccaccttgattacgccaaaattgatatgtgggcgaagtttaccgactttcaaacccgtatccgcgatgcgattatccgccgtcaggcattagaccgcattatgattggttttaatggtacgcaccgcgccgataattctgatcggaaaaaataccccttactgcaagatgtgaattcaggctggttacaaaaagtacgcgagcgtgcgccagagcatgtgatgggcagtgaaacgaaagacggcgcaaccacagcgcagcctattctggtcggtaaagggcaagcttatcaaaatcttgacgcattagtgcaagatacggtcgatactgcgattgatcctgaatatcaggacgataccggtcttgttgtgatttgtggccgtaaattattagcagataaatattttccattggttaataaagaccaagataacagcgaaaaactcgcggcggataccattatcagccagaaacgtatcggcggtttgccggctgtacgtgcgccgttctttcctgacaatgcgttttttatcacccgccttgataatttgtcgatttatttccttgcggattctcgtcgtcgtcaagtgttagataacccaaaacgcgatcgcatcgaaaactacgagtccgtcaatgaagattttgtggttgaagattttcgcggtgtggcactggtcgaaaatattgtttttgaagatgtaaaagagacatcgccagaaacaaaaaaagagggggtagcttctgaaaatgaagtcgtcaaagacgacaaagtagtaacagaagaaacaccggctgaaaataaaaaggcgaaataa

SEQ ID NO: 317337 - DNA, 771 bp, Proteus mirabilis
gtgttaaaattgacacatatcaatatttttatttgtaatgagcaagcttatgatcccagaaaaacgcgtcgttcgccgaatccaatctggcggttgtgcaacccgtttactttaaacgagcatgagcttgatcaactggataatattatcgagcgtaaaaaacctatccagaaaggtcaaaccttgtttaaagccggtgatgagctgaagtcactttatgccattcgttcaggaactattaaaagttatacgatcactgaagaaggcgacgaacagatcacaggttttcatcttgcaggtgacttggttggatttgatgccattatcaacaccgaacacccaagctttgcacaagctcttgaaacatcaatggtttgtgaaataccatttgaaacactagatgatttatcaggcaaaatgcctaatttacgtcaacagatgatgcgtctaatgagtggcgaaatcaaaggtgaccaagagatgatcttactgctatcaaagaaaaatgcagaagaacgtttagccgcctttatttataacctctctcgccgctttgcgcagcgcggtttttcacctcgtgagttccgtttaaccatgacccgtggtgatattggtaattacttaggcctgacagtagaaaccattagccgactattaggtcgtttccagaaaagtggtatgttaagtgtaaaaggtaaatatatcactattgaagatagtgaaatgttaagtgaactcgcaggcaaactgccttcctcaacagaagcttaa

SEQ ID NO: 317338 - DNA, 237 bp, Proteus mirabilis; identical to SEQ ID NO: 5228

SEQ ID NO: 317339 - DNA, 282 bp, Proteus mirabilis; identical to SEQ ID NO: 5229

SEQ ID NO: 317340 - DNA, 354 bp, Proteus mirabilis; identical to SEQ ID NO: 5230

SEQ ID NO: 317341 - DNA, 963 bp, Proteus mirabilis; identical to SEQ ID NO: 5231

SEQ ID NO: 317342 - DNA, 426 bp, Proteus mirabilis
atggtgtttttttggtgtgtgtttgggtatgttttgggttttaagtgggtttgtttgtcaagtttaccccatttcaaccatcaatcaatgattatttgtcttgttttggtgttttattgggttgggtatgggttgtttttgggttttgtttggcgggtaacaaaagatgtcgccgggctcctctttttactgcgccggctgacgcggcgcggcaggaacgctgcctgtggtcagtgtcccgcgtccggccgggcacgggacgggcgcttttaccgctcccggctggcgttggtgacagtgtacgccagcccgtcgcccttttctgatgaacgcccttcaagccgctttcgcggcatatcctcgccgtcaaaaagacgacggctgcggtattccacggtcggcctgacccgttaccggacgcggtga

SEQ ID NO: 317343 - DNA, 684 bp, Proteus mirabilis; identical to SEQ ID NO: 5232

SEQ ID NO: 317344 - DNA, 222 bp, Proteus mirabilis; identical to SEQ ID NO: 8585

SEQ ID NO: 317345 - DNA, 435 bp, Proteus mirabilis; identical to SEQ ID NO: 19248

SEQ ID NO: 317346 - DNA, 828 bp, Proteus mirabilis; identical to SEQ ID NO: 5235

SEQ ID NO: 317347 - DNA, 426 bp, Proteus mirabilis
atgcaatatgcgaaacctgtcactctgaacgttgaagagtgcgaccgtctctcctttctgccgtatctgtttggcaacgattttctgtatgccgaggcgtatgtgtacgcgctggcgcaaaaaatgatgccggaatatcagggaggcttctggcacttcatccgcctgccggacggtggcggttacatgatgccggatggcgaccgtttccacatggtgaacggtgcaaactggtttgaccgtaccgtgagtgctgatgccgcaggcatcattctgacttcccttgtgattaaccgccagttgtggctgtaccacgacagcggggatgcaggactgacccagctttaccggatgcgcgatgcgcagttgtggcgtcacatcgaatttcaccccgaatgcaacgcgatttacgcggcactggactga

SEQ ID NO: 317348 - DNA, 423 bp, Proteus mirabilis; identical to SEQ ID NO: 5317

SEQ ID NO: 317349 - DNA, 192 bp, Proteus mirabilis; identical to SEQ ID NO: 5318

SEQ ID NO: 317350 - DNA, 231 bp, Proteus mirabilis; identical to SEQ ID NO: 7907

SEQ ID NO: 317351 - DNA, 1362 bp, Proteus mirabilis
atgacattagcagcaatcaccatgaccgccccggaagccgccagccctgtgcagatgtaccgcgcgacctactcaccggatgacaacaaactgcgcctgtatgccgcgtcacgtcttgacccggagacgtataaaaaagtgcatgatgccggtttccgctgggcacccagacaggcgctgtttgtcgcgccagcctggacaccgggccgggaagacgtgctcctctcacttgccggagagattgaggatgaagacagcacgctcgctgaacgtcaggaagcacgggcggagcggtttaccggatacagcggaaagcgggccagtgaatccgcacaggcacttgatgaagtggaaagactggccgcgatgatcccgcccggtcagcccattcttgtggggcatcacagcgaacgccgcgcccgtcgtgatgcgcagcgtattgaaaacggcatgaaacgtgccgtgatgctctttgaacgtgcggaatactgggaagaacgggcgcggtcggcactgcttcacgcgaagtataaagaacgcccggacgttcgctggcgtcgtatcaaaaaaatcgaagctgatttgcgcaaggctgaaaagaccatcgcacagtcgcagaaatatctgacgatgtggcgggctgaatcgctggatctgaatatggcaaaactcatcagcagtcatgaccatatcagcgcctgtttcccgctggatacgtatccgcgcccggcagaaaaaagccagtatgaagggagccggtcgttatggtcggccctggatgatgacatcatcaccacggagcaggcccgcgaaattgcgatccgctgtcatgaacggcagattcagcatcagcaacgctgggttaaccactatcagaaccgcctgatctatgagcgtgccatgctggacgaaagcggcggcgtggttacccggacacaggattttgagccgggcggacaggttttcagccggggcgagtggctgactatcatccgcgtgaacaaaagcaacggggcggtgagttcagtcacaacgccaaattacagttttctcgggtacagcggcacgatgaaagtgacgcccgatcgcatcacggactacaaagcaccatcggcagaagaggctgccgtcgccagtcaggccgcgaagcgtccgccggtagtcaactatccgggggaaggtttccgggaaatgacaaaggcgcagtgggccgccctgccccgggactgtaaggccgtgcgcagtgtggaagaagcagaagaccacggggcataccgctaccgccgcacaatggacaataatttccgtctggtgaatgtgtatatcaccgacatgaaaatcacggaaatcccacagaaataa

SEQ ID NO: 317352 - DNA, 564 bp, Proteus mirabilis; identical to SEQ ID NO: 5765

SEQ ID NO: 317353 - DNA, 456 bp, Proteus mirabilis
atggcaccggacagaacaacgggcagggacccgccgcaacgacgtgaagcgcggtttgcgaaacggcgttgctccttacatcccggcgtcttttgccgggatgccgggagcgcaggccacggcgcgacaagggtggcgcgaccgttccggtcgctgcaaacccgggtttttgcgtcagggatggaagcccgccagggcggagacagcttcgctggctccgttcacgacagcccgccccgccagggggacgcccggaaaaggcataagcaggagaacaacaaaacagacaataatcagggcagtagaaaaaagaagaacagtagcagtagcagtagcagtagcagtagcagtagcagtagcaggaacaacaacatcatcagtaacagacaaatgacaggtctgaaaagacagaagcccccatcagaacgtccgcgtaatgaaaggggcggcgcgtga

SEQ ID NO: 317354 - DNA, 945 bp, Proteus mirabilis
  misc_feature (7)..(16): n is a, c, g, or t
gtggacnnnnnnnnnncagcacaaagtggcgcattaggcacaacttttactttctgggataaagaagcaaaacaatttttacaagcgacacaagctcgccctaatcaacttgataccctatttaatcgctatagtgtttggcatagtttatcgttatggaaacaaactgcagataagctcatgcgccgacctttcttattacaagcgcctcgtatttctgatgaagggaaactagctactattggcgatagctttgcgcaaaatcaaaccgattttcttgatgtcacagattatcatcaactacaaacagaattaggtattcataactggcaagatttacccaattattttacggatcaaccagaaggatttctttcccctctggttttacatatcaaaagctataatcccttaatttggcatgaagtagagcagtgtgttatttgggaagtggtagataataatggaaattcggcctttttgcgcctttattgggaaggcgaaacgcaaaataatttagaagaattacgttttctcactaaacgagaattagaaatcgttgcgatcaccgtgcaacctgttcgacgtgatttcaatatgtctggttttattagtcatattcaagaatatatggctaaacgtaagcgacaaacggcaatgcatcacagtgaacctacccttgcacaaaaattttgtcgccccattttatccgtattggaagcccaagcatgtacagggcgagaacaactttctgcaatgcaaaaagaacaattagagagaagcaaacaaattgctgacgatttaggtatgacattaatagctaaccaattaactcgttatctcgctttaactgctcgtgactctcaagctttattacagttaatttggctatgtgataatctgcaacaattacaaagcccgttacccattcaacttaatgaataa

SEQ ID NO: 317355 - DNA, 201 bp, Proteus mirabilis; identical to SEQ ID NO: 316884

SEQ ID NO: 317356 - DNA, 294 bp, Proteus mirabilis
  misc_feature (242)..(251): n is a, c, g, or t
atgcctaccccggcacgcacaatctaccgtgatagtcttaacttttataaaaatgaacaacgtagcattatcacgctatctgcagttttggccctcattttatctgtcatatatctattggttggccctaatgcacaagaatcacaaataattaatgactttattattaattttcaaaaaaccagattcgctgatgtctcacccgctgaattagaagcgatgaataacagtgttattggggnnnnnnnnnnttattggggtatttcaaaaggtcttactggtctatgtttttga

SEQ ID NO: 317357 - DNA, 3171 bp, Proteus mirabilis
  misc_feature (3158)..(3167): n is a, c, g, or t
gtggctaagcctttgcgaattattgaagtcggtggtggcacgggaggaaccacctcttggctgctacctattttatcaaccatacaacatgttgaatacgaatttaccgatatttcacctatcttcacccgacgtgccgcacaaaaatttagtcaatattcatttgttaactatcgagagttcaatttacaacaatcccctgaaatacaaggttttcaatctgattattatgacattattattgctgctaatgttattcatgccactcaacatattggagatacattaactgctcttcgtactttactgcgttccaatggtcatttgcttatgcgcgaaataaccaaacaagctcgcttatttgattttgtttttggcccactggtgttacccctccatgatgaaaagatccgtaaaggaaaactatttttatcaccagaattatggcatcaacagtgtcgcttagcaggatttcaacatattcgctggttacctgatgcattaccagaaaccaaagatatgtgtgaacatattattctcgccagtgtttcgacagaaaacgatcactttgatcaagagttacctagtgacaccaagatacaacaaagttcacactaccaatggcaattaacaccttgtgtggaacaagatcttatcaagccaacattaatatttaaccatcaacaaacattgccttctgaaatcacagctattttatccgctattggatgtctttctgaacagggcgaaaatcaattaatcgttgccaaccttgcagatcctttaattatcgccgagcagatccgccaaatattactgtcatcgtctgatgggtttgttgttatcacgcaacaagcctgggcattaactgccatagaaacggttaatccagcacaacgtagtattcgaagtttattaaaaactattcaaaaagaatatagctcaaggttaattgccattgttgatttaggtataaatgcctcatggtctgaattagttcctgcttttatacaaatagaacaaggtaataatgaaattattgttcgtaaccattgctgctacttaccacaattaaccccactgccctcatcttctacgatcatagcgcagaacatcatggtatccccgcgctggcatattattactggtggttttggaggcttaggtcgaattacagcaagttggttagtaaggcaaggtgctaaacgtatcgctattttggcaccacgagctgatagcagcgcattagattggatgaataacttacagaaatctaaccagctagaaataaaatggctaacatgtgattgtcgtgataacgctcaatgtcatgcagcactcactcagcttgaaaatgaaggtggcattgaggggcttatacacagtgcaggtattttggatgatgcacttatgacacaactcacccctaagcgtatgtctgacgtattttctgttaaagcgatatctgccaagcaattttgtgatgctttagaaaaaacagatgccagttaccttattttatactcctctgccgctgcaactataggctctgaaggacaagcagctcattccctcgcttgtggatatttagatggattagctgaatatgcacgtcgcaatatcaagggattaaccgtcatttctatcgcttggggggcatggcaaagtgttggctttgtggcagaaaaacaactccatgataaattacaacacaaaggtatgagtacgcttactactgaggaaggactggcacatttagatgcttgtctgctagataatacctcttgtcgccttgcaatgcgtttagcgactccacctttaatgacacaaaaaacgcctttatttcatcagactaatcataatgatcattatgataaccatgaaattaatcacactcgccagctttgtgaaaccccaactcaaacggatcaaacagagccggtaagccctaacagggttgattatcgcgttggtgataacttagaacagtggctaacagcatgcatcaaacaactgttgcgtcttggtgatgaacatattgatactcacattgaactattccaattaggactagattctctctctttcctcgatctcagtgcggaaattaagaaacagtttgcggtcaatattgacgctgaacaatcttatgatgatatgactattgctggtttagcctcagttattcgaaccgcagcacctgagaaatttactgtgacagaagcactccataatcaagacaacatttcccacacaatggagtcagaacgatatgccccatttccattaacaccaattcaacacgcctattggatcggacgtaaaaacctctttaactacggaggcgttgcttgccatgcaatttttgaatgggattgtcaacgccatatatgggagccggcctcacttgaaaaagcttggaataaagttattcagcgtcatgatatgttgagaatgatcatagatgatgatggacaacaacgtatcttaaaagaagttccttattttcattttattcaacatgacctaacaaatttaacccaacaagagcaacaagagagcctaacacagataagggaagccctttcttatcgggtattaccgactgagtcatggccattatttgaagttgaaatttcttggctaaataacgattgttacagattacatatcaatctagatttactgcagtttgataccatgagctttaaaattctgtttgatgatctatttaacgcctattcaggacaagaattaataccacaaacatttaccttccgcgactactgcttaaaaaatcaaacaaatcgtaacagtgatgagtggaaaatggcatggtgttactggcaggatctattatctgatttaccttctgccccatatttaccgataaagaattcatccattactgaacaacctcgttttacgactttccaacatcatgtttctatagcgcaatgggacaaattaaaacagaggtggaaaaagcatggtattacaccatcagcagggcttttaacactttttgctttagttttaggtcgctggacaaaatacccagcctttacactaaacttaactttctttaatcgtcaaccatggcacccagatgttacacaacttattggtgattttacctctgtactccctatagatannnnnnnnnnatag

SEQ ID NO: 317358 - DNA, 717 bp, Proteus mirabilis
atggcaaaaatacagcgcagactttggcaacatttaagtaagtcccaagtaaatggtgtagagattttacgtgaatggggacgctataaaggggatagtagccaatctctgttacctattgtatttactagcatgttaggtatgacactagatggtgacaatattgatgaagcattaaatcagcttttcggccaacccgtatatagcttcgcgcaaacacctcaagtttggttagatcaccaagtaatggaaggaaaagaggggctaacattaaattggttctgcatggatgacatctttgctgacggtttattaacaatgatgttctctgattatcaaagcttgatcactcaattatgccaagatgaagataataatcaatcagttgataagattattgcgcaacttccttcatatcaacatttagcaatagataatcacctccaatcacgctatcaacaactcgagcaaacattggaaaatcatccgcaaatcaaacgtgctcatgctatggtaatggtaaaagacgatacgaaagtagagcctcctctacaattccactatccgttattaaacagcccaattggttacctaatttactttcgccatcagcttcactcagtgacattattgaaaagagttggcaacgatttgaggaacgagcacggtatggcatatgtcacacactgtatcgaaatgctctttttaccgagctaa

SEQ ID NO: 317359 - DNA, 474 bp, Proteus mirabilis
  misc_feature (414)..(423): n is a, c, g, or t
atgacttatgcattggagttaaccgagttaacgaaaacttaccataatggtgtcaaagcgcttaaaggaattaatttaaccgtagaagcgggggatttttatgcgctattaggccctaatggtgcaggaaaatcgaccaccatagggattatcagctctttggtgaataagagcagtggtaaagtcaaagtatttggctatgacactgataccgatatggttaatgctaaaagacaactcggattagtgccacaagaattcaatttcaacccttttgaaaccgtattacaaattgtccttaatcaggctggctactatggtgtaccacgtaaagtggcattagagcgtgcaaaaacatatttaacccaattagatttatgggagaaaaaagatgatagagcacgttttttatcnnnnnnnnnnatctgggggaatgaaacggcgtttaatgattgcgcgtgcattaatgcatga

SEQ ID NO: 317360 - DNA, 270 bp, Proteus mirabilis
atgaaaacattaggcgaatttatcgtcgagaaacaacaagattttccccatgcaactggcgaattaacggcattgctgtcagccattaagcttggggctaaaattattcaccgtgatattaataaagctgggttagtcgatattcttggcactaacggtgtttctaatgttcaaggtgaagcccagatgaaactggatctttacgcgaatgagaaactaaaagcagcacttaaagctcgtggtgaagttgcggggatcggttcggaataa

SEQ ID NO: 317361 - DNA, 1269 bp, Proteus mirabilis; identical to SEQ ID NO: 316147

SEQ ID NO: 317362 - DNA, 618 bp, Proteus mirabilis
  misc_feature (585)..(594): n is a, c, g, or t
atgatcctcaataaaaaaaacattcattccaaatcagtaatgctattttgtgccggcattgtttctttaatgccgttgcacgcaattgcttatttacaaggtgaagtgagaaccaatggtggccctaatattttctatgcagtattagatcacaccacctttcctaataacaaagcaggagaattagcaacagtaaacttttcgttgcctgatcgctatgatgggacagtatattgtcctaactcacgtatctatgatcgtgcattaacctattttaaagcaacgactgatttacctcctgttggtaataatttttatcaattaaatgagtatgttgatatcaaaattaattttgaaatttgggggcctaatcctttacccacggtgcccttttctgacatacctaataatagaaataaccaacaaggttgcagagtaccctcttcgcctaaaccgcatatttcctcaggaagtagcggtcaactcaccttccgtttaagaaaacccattattaatggtgtcagtcttaatgggcaatctcttgcacaaatgtatgccatggtaagtcacagcggtgcgccaaannnnnnnnnnctatggttcagagcctatttctaa

SEQ ID NO: 317363 - DNA, 315 bp, Proteus mirabilis
  misc_feature (234)..(243): n is a, c, g, or t
atgaaaaacagcataataaagtcagctataacttgcttgttattgctctctcctagcacttttgctgccactgatattattggtggagagatggaatttaaaggtgttgttgttgcacatggctgtacgattgttgcgggagatgaaaataaagttattgatttcaaacaaatatctgcaaaagatctctattcactacaaaaaagcaaccccgttgcttttagtatcagtttnnnnnnnnnncaacggggttgcttttttgtagtgaatagagatcttttgcagatatttataaaagtgtcactatcacattag

SEQ ID NO: 317364 - DNA, 444 bp, Proteus mirabilis
gtgaatgggcatttaaaaccgaactcgataaatttagcacaattaaaaacaggtgatttagcagtatcaagaggtgttattcaagcgctaaaagaagatcctgataatgtagcattaatacaacgtttggctggtgaattagcgatgtcagataccattgctactgcattcggtatgcggagaatgctgattgcagggcaagcagaacccctcgtagctgaacataaaatagcattagaagaaacagatcgccgtcttgcttttctcgatagagaaattctagcattaaaaaatgaaatggaaattcgtaaagcgatcagcaataacacgctgttaatggtgttgagccgacaagaaagccgtgatgctgaaaatagtgttcatcagcccatcatacaaagtgataaggcaattcatcagttaaatcagaaggtagatcattaa

SEQ ID NO: 317365 - DNA, 303 bp, Proteus mirabilis
gtgcgacattttgcagaaagatgtttaacacgttggggatgtcaattagcgaacaagctagaattaactgataaggagatatttgagcatcatactgatattaaaaatgatgaggataaatatattgctatgcgccgtaaaacttattccatatatgaaagtagcggtgatgatgaacgtaaagtttcattaggtaaagagggtaaagcattctctgatatatatggggcacaatatgagccttcgatggcattaaccgcagactattttgcagatcctcaactctacgatgtgatcaaataa

SEQ ID NO: 317366 - DNA, 1188 bp, Proteus mirabilis
atgatccgttattgggttgaacaagagtatcaagcaaatgctgataatacgagcttattaacagaggctattaatggtatagaaaccataaaaataacagcaacagaacatcaatttattgaaaagtggcaatataaactcactaattatatccttaagcgtttttcagcggccaaaaaagcgttatttgctcagcaattaattggggctattcataaaattactatggcaattatcttgtggcatggtgttaatctgattatgaaagcgcaattaagtgtgggagaattagtggcttttaatatgtttgccacccatattacacaacctattttacgtttagcccaactttggcaagatgttcaacaaacaggcatctctatacgtcgtattggcgagatcgttaatactcccacagagcatcaacatcaaggacttgctactgtacctaatattgcaggaagtatagtattttctcatgtacgctttcgttatacagccaatactccagatgtgattgagcaactctctttttcgatccccgcgggcaaatttattggtattacaggcccctctggttcaggaaaaagtactatcacacgtttaattcaacgtttttatactcctcaacaaggccagatttatattgatggtatggatctcgccattgccaatccccttactttacgccaatcaattagtgttgttttacaagataattttttatttagtggcactattatggaaaatattcggttatcaaaacccgattgtagtgaagaagatattattgaagcgagtaaattagccggcgcttttcattttattactcaactccctgagggatttaatacacaagtaggtgaaagaggtagtaatttgtcaggaggacagcgtcagcgtattgcgctagcaagagcacttttacctgatccacgaattcttattttagatgaggcaacatcggcgttagattatgcctcagaagcggaaattttagccaatcttccggctatttgtaaaaatagaacggtaatttgtattgctcaccgacttaatgctatttctatttcagattatatttatgttattgataaaggtcgtatattagaagaaggtacacatagcgatttattaaataagaaaacactttatcagcaattgtggcaacaacagacacagcaataa

SEQ ID NO: 317367 - DNA, 525 bp, Proteus mirabilis
atgtggtgcattccatcactattaaaacaaaaaaaatcattatatttaatttttattttatcttgttttattcaattatttgctttagttaatccaattatttttgaaaaaattattgataaagtattaacagggagaagcctctctaatttgcaagttttaggggtactcctcgtgctgcttgctattatagagcctatctatcttttattacgagataaactttatgcttttgtttcttgtaccctaggtgccgaattctcagggaaaatttatcaacacctcattcggctacccagtcagttttttaatcaacgtcaatctggccaaattattgctcgtattcaagagccagtttattactggctctgcgttgatgatggtactggattttatttttattatcgtatttctttcagtaatgtttgcttattccgtattattaacttggataaccatagcagcattagtcgtttactttttattttggctgatacttggccccatgatccgttattgggttga

SEQ ID NO: 317368 - DNA, 399 bp, Proteus mirabilis; identical to SEQ ID NO: 302088

SEQ ID NO: 317369 - DNA, 189 bp, Proteus mirabilis
atgttagatatattaacacctaatgaaacagaagccagcttattatcaggtattgaagttgttgatttagtatctgctaaaaatgcagccaatgctatttatcaaaaaggtgttaataaagttgtcattactttaggtagtaaaggttcattagcttatgacggttataaatatatttactcctggtga

SEQ ID NO: 317370 - DNA, 528 bp, Proteus mirabilis; identical to SEQ ID NO: 311432

SEQ ID NO: 317371 - DNA, 360 bp, Proteus mirabilis
  misc_feature (332)..(341): n is a, c, g, or t
atgagtgaagaaacctcaacaattatttttgaacacccgcttaatgagaaaatgcgttcatggcttagaattgaaaactcattaattcaattaaatagttttcaatctattaattcattatcttctgcattatctttttttcgtgccgtttcagaatttattgaagttttagatcgcggggagatccgcgcagagctacttaaagagttagaaaaaagacaaaaaaaactgcaacagtggttatcctttcctaatgtcgataaagagattgtcagtcatattattaatgagttatcagaaagtgcttgcgcattaagtaaagcaccacgtannnnnnnnnngataaaatcatcagcttag

SEQ ID NO: 317372 - DNA, 972 bp, Proteus mirabilis
  misc_feature (872)..(881): n is a, c, g, or t
atgaaattgatcatagaaggtctttctcttacaacccagttattaggcacacatttatctgtggctacactgactgcacatacaatccgtactacaaagatgggaattgatttttcatcactggttgaatatctgaaaagtgaaggatttgaaaatacattatcacaacgattattagatgatattccctctctagctatgccagtattattattattaaaaaatgaagagagtgctgttttaaccgaagtttcatttgatgaaactggacaacgtaaatataaaattcagcaagtagatggtttatctatatggttaacacaatctgaattaagtgaaaaatatttaggttattgctggttcattaagccacgtattacagaagatgttcgttcagaattgcctgaatatacgatgcctaaagcatggttttttaaagttatatggcgctttaaaaaatattactatcaaatcattctcgctacttttgttattaattttttggcacttgttagttcattatatgtcatgaatgtttatgacagagtaatacctaataagtcatatcaaacactctgggttttaagtatcggggtaattattgcaatattatttgaatttacagctaaaatgctccgaggccggttaactgatattgctggtaagaaagctgatttaattatcagttctgctttatttagaaaggtcacaaatcttaagttacaagaaaaacctatatcatctggctcctatgttaataatttacgagattttgaatctgtccgtgattttatgacgagcgcgagtttattaacattagatgatatgccttttttaattttatttgtatctgtaattgcgcttgttggagnnnnnnnnnngaggctatttagcttttgtgccacttacgataattccattggttattattgtcggacttttagctcagatccctttatccaaatatattaa

SEQ ID NO: 317373 - DNA, 903 bp, Proteus mirabilis
ttgggtgataaagattggtcgttattagttcaagcggtcgatcactggcattttccaagtgcggcattgatgaaaccttttcgtgtgttacccgattggcgtattgatgatttgatgatctcttactctgttcccggaggcggtgtgggccctcatcttgatcaatatgacgtatttattattcaagggcaaggtcgtcgtcgttggcgtgtgggtgagaaaatcccaatgaaacagcactgccctcacccggatttacttcaagttgatccttttgacgccattatcgatgaagaattagagccgggtgatattctgtatattccacctggatttcctcatgaaggttatgccattgaagaatcactaaactattctgttggctttagagcacctaatgcacgagagctatttagcggttttgctgactatgttttagcaaatgacttaggaagctaccgttacagtgatcctgatcttactcctcgagataatccggcattagtccagcatcaagaattaaataagttgcatgatatgatggaagacttacttgcccaacccgaagtattccgtcattggtttggggagtttatttctcaatctcgccatgaacttgacttggccattcctgaacctttatatgaaaatgctgagatccacgatttactgcaacaaggtgaacaacttcatcgtttaaacggtattcgcgcactgcgtgttggtgatagttgctttgttaatggtgaattaatggatactcatcatattgaagctgcagatgccctttgccaatatgattgtattgataaacaacatttaggtgatgctttagcagatccaaaatttatacgcttattgacgcatcttgttaaccaaggctattggtattttgaagattaa

SEQ ID NO: 317374 - DNA, 129 bp, Proteus mirabilis
atggaatctaatgatattaaacgattaaaagagcttgaagatgaaaatgctaaactgaaaaagctatttgcagaagtcagccttgaaaatcatgccatgaaggagcttttcgcaaaaaagggttggtga

SEQ ID NO: 317375 - DNA, 129 bp, Proteus mirabilis
atgaaaaaagcccgttttagtgaagctcaaatcgttaatattttaaaactctctgattctgatatgaaagtggaagatatttgtcgccagaatgggatcagtaatgctacttattataattggaaataa

SEQ ID NO: 317376 - DNA, 138 bp, Proteus mirabilis; identical to SEQ ID NO: 312980

SEQ ID NO: 317377 - DNA, 276 bp, Proteus mirabilis
atggaactttctacattacttctttttatcccagcctgttttgctttaaaccttgcaccagggccaaacaacctgctttcaatcaataatgcagcctactatgggtttgctcgttcatgtgcaggaggtctcggtagattactcgcattcgtgattatgattgttctagcttcatttgggctagctgttgtattgcaaacatctgagttcttttgttgcagcaggaaatccaaaggcaatacttatctttacggcctttcttccgcaattcgttag

SEQ ID NO: 317378 - DNA, 444 bp, Proteus mirabilis
atgttagtaaaagccgaagtttctgaggcagatgttatctatttaaaacctgatctcaaagcctcttttactgtattaggagcaccagataaagccttcaatggtaagttaaaagatattttacccacacctgaaaaaatcaatgatgcgattttttactatgcacgttttgaagtccccaatgaacaacatttgttgcgtttacaaatgacagcacaagttaaaattctccttgagcataaaaaagatattctcttagtgccattatcagcattaggggaggatgtgggcataaatgaatatcaagtagaggttctcgtcaatgggcagcctgaaaaacgcgtagttaaaatcggtattcgtacagatgtttatgcagaagtcattagtggattaaatgaaaatgatgacgtgatcctcggtgagattgcaggagagtcataa

SEQ ID NO: 317379 - DNA, 315 bp, Proteus mirabilis
gtgtcaccattaaccacatcaacgacttctcgtgctgattctgctgaaggcaattcaacacccgcaccaattgtggaaaatcaactggtcttgatgtttgatggtgaatgctggttagaaattcgtaatgctcaaaataaagttttatttaatggtattaagaaagccggtgaccgtttggaatttaatggtgagcaaccttataaactaaaaataggcgcaccttctgttactcgtttacagtttaatggtgaagctgttgacttaagccgttttactggaaaaatagcaaaaataacagtaccgagcgcttaa

SEQ ID NO: 317380 - DNA, 462 bp, Proteus mirabilis
gtgccgaatcctgatttcccatttttaggtgtccattttacacgtatgtataacgggcatcgtgacgtaggccctaatgccgtattagcctttaaacgtgaaggctacaagaaaagtgatattgacttaaaagatctcactgaagtactaacctataaaggattttggaaaatagccggaaattatttaggtgaagggatggccgaattacgtcgttcctattcacgtaagctgtttgcccaaaatgcacaaaagcttattcctgctctacgtgaagcagatattcacccaggcccggcaggtgtacgcgcccaagctttaactcgcgaaggaaaattagtcgatgattttcactttgttaaaggtaaacgttcattacatgtatgtaatgccccttctccggccgcaacagcatcaattgaaattggtcgtgaaattgtaagagagcattttttattataa

SEQ ID NO: 317381 - DNA, 633 bp, Proteus mirabilis
  misc_feature (608)..(617): n is a, c, g, or t
atgaacattgttgatcggtttatttcttacaccaaggtgaatactacaacaaatagagaaaatggcgccgcggggattatgccttcatcggaaggtcagcgagtcctcgctttacaattagtcgaagagttaaaggcgttaggtgttgaagatatcaaaattcgcgatactgccattgttaccgcgacactaccttctaaccttgattatgaggttcctaccgtggctttctttggtcacttagataccagtgcagaacaaactaatgatactaaagcacaaattttaccttataaaggtggcgacctttgcttaaacaaagaacttgagatttttttacgtcaaagtgaattccctgaattagaaaactatattggtgacgatatcatcgtaacagatggtactagcttattaggcgctgacgacaaagcggctatcgcctctattatggatatgttgcaatattttaaacaacatccagaagtcaaacacggtacagttaaaattggttttgtacccgatgaagagcaaggtttacgtggtgcaaaagcctttgatgtaacagaattcggcgcagactttgcttataccttagattgttgtggtannnnnnnnnngttgtggtattggtga

SEQ ID NO: 317382 - DNA, 774 bp, Proteus mirabilis
atgttgtcagccagacactcagctaaattacaggtgttctaccctgtgcttcttttgcttctttctatgctatcaatacaaagtggcgcatcattggcaaaaagcctgtttcctgttattggcgcccccgcagtcacagcattacgcctttttttaggtactctgatcctgttttttatttttaaaccatggcgtctaagcttttctcgtagtgccataatgccactatttttatatggtttatcattaggggcaatgaactacttattctacttggctcttgaaactattccattaggtattgcagtagcacttgagtttacgggaccgcttgcggtagcgatgttttcttcacgcagagcaatcgattttttatggataatcttagtgattgctggattagggttattactgccgattggggataatattcacggactcgatcccctaggcattttatatgcattaggtgcgggtgtcggttgggcactgtatattgttttcggacaacgtgcaggaaaaggctatggcgcagcgacagtttctattggctcacttatcgccgcctttatctttttccctattggtatgctacaaagtagccctgagctagtttttagtacctattggattagctattgcgattttatctaccgcttttccttatactttggaaatgattgcacttacccgtttaccggcaaaaacctttgggacattgatgagtttagagccttgtatgggggcttttattggtattattttcttacatga

SEQ ID NO: 317383 - DNA, 1020 bp, Proteus mirabilis
atgaataagaatgtacccatagatcttgatttagtacatttaccagaaaaacttaaaaaagctgctcaggaatttgtcgagcttaaatatcagttggattgtaaaggtcgatataatcccgactacattccggatgatttatatggtatggctcattccggagattattcttctgtttctggttggacattttttatcaatataatgccatttgttcctgcggaaacaaacgaaagacaaataaaatatattccggttgaatatactttagggtgcagctggcgatggtggcctgagcatgcagagaatgataaagataagattattgactttattaataatttagaacaggctcagagtacatcttatacctttatttctaatcttggtattgtattagcttctgaaggaaaaaatagaattaatttttgtcgatatcatggtattccaaaaataccaggtaatgtggatgaggttaaatacccggaagcagaaaggataattatctataaagtagatacttatgatgattattttggatgcaaaggtataaaatcatcttatctggccgtgttggatgacagatatattcaggtaatagagcatattgattatgcactgcctttattacgtgaatatggggtaaatatagcaaataagtggccagagagttttcctgagttaatggatatcgatagatttgctgccgggtctctttccgaatatgcagggcgcagaaaatctatcgatatggagaaagttaatgcgtatgtaaaaaaagaaaaagaaggggaagaaactcagaaattaagtattttggatatgaagataaaaaacaaattatttgtattgtcagtttcaatattattattgattgtgtgttttatattgtttgtcgagtttagagatggttatcttgctcagttgttttgtgggttgctaggtatgagtatatcgatttttattatgatggtgatgcctgtttttattgttaaaaagaaatataaagataatagataa

SEQ ID NO: 317384 - DNA, 483 bp, Proteus mirabilis
atggcagaatatggattgtcagcatcgacactggctacttcaatgccaaaggataacaaatcaccacaaggagttaccgccgcattatctaaacatgcgaaaggtgatctccctgaaggacaagatccagccagaggtttactggttgcatgggcaccagttcctgcgattgcagccagtacagttatagcaccggcaacagcgacaatttattggtggtactacgttccatggcaggagtgcatcaacacggttggaaggtcattccggcagtacactcaggatatgacacagatacgcttcctgatcgataccgttcagtcggcaggtgccgatcagcccatacaacagcgcaccacgctctccaccgtgatcgttgctaagtctttttcccgagacagacggaacgtagggttctttcagttgtgttattgtctgcctccgccctctgttatcactgtaataacagagggcgtcctgtaa

SEQ ID NO: 317385 - DNA, 219 bp, Proteus mirabilis
atgagtattgaaaatgaagagttatcccatgttcagaggtttgaaaacgatacttttaaatctattacactagaatattattcagatgaagtgaatgaaagattttatagctataatttttatggcgtatggtcagataaagcattactaaaaattattgcaacaagtgattatagtattaataaatgttcagagagggattgttttggtggtgattaa

SEQ ID NO: 317386 - DNA, 318 bp, Proteus mirabilis
atggtagatatcaatgttcgtcaacaggaagaaattaaagctgtttgctctacatctccagagcaatgtcagcaacagtatggctatctggttgagcagtgggaagcctttgatacagccatcaaacatctggctaccgataaatcgttgcctgatgaatttcgtaattatatgccagcagtttattcgttaggtatggaagcggaaggcataacggttgagcatggctggaccaaacgttttgaggagatgggatttgataccggtacggccaggatgaaggatgatggctgcgaatcttccgattataatttataa

SEQ ID NO: 317387 - DNA, 498 bp, Proteus mirabilis
atgaaatttaataaagatcaggattactgggctagtgtgtattgtacaaaagaatttttactaattgaaacgcaatcaggtttcggaagaactagttcagatcctctcttccctcctcatttattacagcctgatgctaacgatcaatgtattggtgaagccgtcttacaagcattatcaaatagcagaacattggttgatttagaggatcgtattgttttttttgatcttgaaaaaggaaaagaaaaatacacggcatggatagaaatgttgatggatagatatggatataaaacaaaacgagcattattcaaagatatgaaacattctattatacatcttacgaatggtgaaattacaatatcgccaatgcgccatgaaaaactagaagcttgggagggacttgaactgtcggagaatgttattattactgttgataactctccttctgaaatcggtgaaggtctcaggctggcgctgagtcgatgtattggttag

SEQ ID NO: 317388 - DNA, 723 bp, Proteus mirabilis
atgtttatttttgaagagtatattaccgcatccggatttattcgtcagcagagcactggctttgcgaaaaaatatccagaaataagcgtctgtctggtagagtatgataactctgtttatagtgactccctgtttgttcatttcatgctcccgtttccggatatattgaaatcagctgttacaaaacgtcgggcagagtatcttgctggacgttacgctgctagacagttgttacaagaagttggatataatggtgttgttgctactggtgcagatcgcgcacctatttggccaattggttggcgaggaagtatttctcatactgaaacattggccattgctgttctgacgccaaattataccagtataaatctaggcgttgatattgaaatttttcgtccttacataatacaggaagttgctaataattttgctacagatgacgaatgtgccttattgacagcaaacgttcttccatttgagacaatgttgcatatagttttttctgcgaaagagagtttgttcaaagcattatatccactagtacaccatatatttgattttgaggttgcgaaactatgcgaatttgacacacataatcagagttttacactggaactaaccagacagttatcaccgagtttgagtataggatatcgcactactggtcattatattatttctcaggatagtgtaattactatgattgttgtatcggtataa

SEQ ID NO: 317389 - DNA, 1047 bp, Proteus mirabilis
atgtacaagataaatgaattgtgtatcgacaatttagtgagtcccgataaattagcagcgaaattaccagcatctgctgatattatcaataatgtcattggaacacgtaaacgtataggacgtattctgaatggggaagataaaaggttgctggtcgtgattggcccctgttcaattcacgatagggacgctgcactggagtatgccgggctgcttgcgatccagcgcgagctgtatcaggatcgactggaaatcgtcatgcgcacctattttgaaaaaccacgtacggtggtgggatggaagggattgatttccgatccggcgttggatggtagttaccaagtgaacagaggcatagaaactgcacggcaactgctgctagatatcaatcagcttgggcttcccaccgccactgagtatttggatgtggtggtatggcgctacatcgccgatttaattagttggggggcgattggtgcgcgaacgacggaaagccaagtacatcgtgaaatggcgtcagcgttatcttgcccaatcggatttaaaaatggtaccgacggtaatgttgccatcgctattgatgctattcgagctgctcgcaatagacatacatttttctcacaagatcaacatgggcggatggcagtttatcagactaagggcaacgctcatggtcatatagttttacgtggggggaaaaaaccgaattaccatgcagcggatattgccgccgtgtgtggtaggctgcatgcttacaatttaccggtgtatttgatgatcgatttcagccacagtaacagccagaaaatagcacgtaatcagttaatggttgcagcggaagtttgtcggcagattagaatgggggagaaagctatagctggcgtcatggtggaaagttttctgatagagggctctcagtcggttatttcagggcaggctttgacttatggacagtcgatcaccgatccttgtttgagctggatggatagtgtgcagttattggctatgttggcggaagcagtagactcgcgtttttctcaaagttag

SEQ ID NO: 317390 - DNA, 1413 bp, Proteus mirabilis
atgaagaaaaaaaatattgctattatcggtggtggtgcggcgggcacagtagcggcatggcagttgcgcgaccggcataatgtaactgtgtttgaagcaaacccttatatcggcgggcatatttatacgtgctttgttgataccattgaacaaaagaatattcccgtggatatgggcgtagagtattttaacgaacggattgcgccgaacgtttttaatttactgaattacttaggaatcgaaaactacgtggcaccttcgtcattctacgcttgtttccctgaaaaagagcagtactggagtaatgttcactacggtggtcctatgcgtcaggccatgcagagcgaatttagtcgtttccaactgggcatgtcagaggtgatgagttccgcagacgcgcgttataaaacgatgtcaatcgcggattacctggcagaaaatggctattcgtctgagtttgtgtatcaggcactctatccgatgatcagtatttctactggttgcaatgtcgatgtgagtaattatccgctgatgtttttcgcattgtcgtttaacgctaatctggtttcgttctttgcccctgggtattggcgtaaggtcgttggcggcatgaatcgctacttgcaatgtttggccgacgagttgggagagcgcgtgcggctgaatacgccggtacattgggtaaaacctcgtgataaagccgttgtattgtgtcattcgggaaaagaggagatttatgatgctgtgatttttgccacttcggcggaagtaactctgtcgctgttgactgaggcaacggcgcagcaacgggagattctctcctatttcgtctatcacgatatcgagagcgtggctcattatgacacgcgttatctgagggataaattggaaccgcattacttcaactattgccagttcactgattttcctgctgaaacgctaggtggaagtgtcagccgtgttattaatgcattatcaccataccgacacctcactacgccgttgttggtgactctagatcccaaaatgcccatcgatcctcaaaaacagataaaaacttgccgttggcgtgtggctagacagcagccaggagattttgcgcacaagatgcgtcttaaagaaatacagggcaaggctaacatgtggttttgcggtgttgataccagcttaggggggcatgaaggggctgtagtgtcaggcatggtgattgctgatcggtttggggctccttatccttacaaacatgacctgctggcgtatattcaattccaggtaaccaaagatattatgggagtcaaaacacgcggtgaaattttaaaagatcggttatccggcttgttattcttaatcgccaaaaaatgtgctctccataaaagtctttcttacaaattcattaaagattttattgtataa

SEQ ID NO: 317391 - DNA, 459 bp, Proteus mirabilis
atgaataacgaacagcaattatgtgaaatctgccaattcattaatcgggagcgtgtattaacgatcagtgtcgctgcggaagggattgtgtggtctgcaagttgtttttatcaattccaaaaagagcaaatggcactgtacttgatgagtgatattaattcacgccattcgcagttaatgcttaaggcgtcaatagtttccggaactattatatcatcggtgaaatcaatgatgtcgatgaaaggagtgcaatacatagctcacatcattccattgtgtgcggaagaagagcagcaagcgcgaaatttctattgtgaacgttatcccatcagtcgcgttatggacttgaaaatatggcggctgcaattgatggaaataaagtttacacaaagacgcatgggcattaaaaaatgtttgcattggctgcggacgccgaaactggagacatgtacacaatga

SEQ ID NO: 317392 - DNA, 1770 bp, Proteus mirabilis
atgtcagacctgatgacaggaaaccgcagtgtgaatatcagtgaaactggcaacgtggccaagttgattttacagtcaatcgctacgcatccagagaaaactgcgctaattaacggtgagagccgtatggattacactgaattcgggcagcgtgtcgtcgccgtacagcagaaactaaaggaggtcggtgttggcccggatgacattgtcgggctattgttgcatcgtgatcagtggctaattccggcaatggtcgcgacattggctcttggggctacctttgtcccgttggatccagcctatccattatccaggctgaaacgctacgtcgatgttgccaaaccgaaagtactgctcattcatccggacgagaacgtcctggcgcgacagttgcaccaaaacgtggtgtatcccgaacttggcgcggtcggaaagatggtttgcgtcaccaggcagtacgaggacattgcttacatcctgtttaccagtggttctactgggcaacctaagggcgttagtatcgggcaccaggcactacgcaacttcttaattgccattgccgagcggttgaaagtgtgctcatcccatatctttttggcgcataccacagtagcgttcgatatttccattcttgaactgctcctgcctttgagcgttggcgggactgtactgttggctaacaatgatgaagttagcgccatcgaaggcattatccctctgattgaaaaatgcgatttcattcaggcgactccgagcctatggaaaattttgtgggcgactggctggcgccctaaagcttctatgacgctgctgaccggtggtgaagcgatgccgttggcattggctaaaaagctgtgccagacatgtggcaaattatggaatatgtatggcccaacggaagcaacgatctggacatcgtgcgaatgtgtagaatgtgacgcagattatatttccatcggcgaacccttggcgaatactcaactgcatgtgcttgacgaagcacttgagccatgtgagcagggggaactctatatttcggggcttggcctagcgcaaggttattatggtaacagcgaagggacagaaaagatgtttatcactcaccaacaaaccggcctgaggctttatcgctcgggagatcgcgttcacttgcacgagtcgggaaaaatagagtggcttggacgtggtgaggaggaaattaaaattcgtggtaaccgtatcggtgtgagcgaaattgagcaagagctggagaatatctccggtatcactggcgcggtggtggcggctaggccgtttgaagggcagggggacgatatgcttaccgcgtatgttgtcagccaaggctcattgagcaaagcgtcgttggaggtttatttagctgataggttgcctgcttatatggtgccagatctgttcgtagtactgcctgaattacctctccagccgaacggtaagcttgacagaaagtctctgcccgatccctgttgggataatacgttgcaccatgatgcagtccgctcctcggaagagcaggacaatgtccaacggcaatccattgttgagacggtttgtcaggttttcgctaccatattgggatgcaaagaatttgacgccacatcaagctttttcgatcgtggaggcaattcggcgctggccgtaatttcagcaggtgttatcagtacgaagttacagcgtaaagtaccggtatccttgatcatcaatggtgaaaaccccagtgctattgcagagcaaatattgcaacactcctga

SEQ ID NO: 317393 - DNA, 927 bp, Proteus mirabilis
gtgaccctcccttatgcgctgatttttggacctgcggatgtttcccacatgatgaaagacatgcagcgtctttacgataaccacccccaggttcgagcccgcttcgggcaagttgcacgctcggctagtgtggatgtcaacactctattacgtaagacgccactgcctgatgacacatcatgcatgcaggtggtttctttaggactactcgctggcatgctgggcattgccgacgacatcgttgaacaacgtggtgcgccgaactgtgtaggaggcatcagccttggagaggtggctgcgctctgcgtaagcggaggattaacgttggacgacgcaacagcactaattagcttgcgggccgacacaccagagggcgaagacgaaacagtgggatttgtcatggtgacggaagaatgtgaacgcgatttctatcatcagccgccggaaatgcgtattgctgttgattatggattgattcatcacggtattggctcactgctgatggttgctggattgcgacgggtgctggaggagcgtgggaaggaaggttcaggtgcgctggaggtgctaccgtcggcgttgtgcaactcggcgtatcacaccccttatcgccggcggatcgctgaacagatcgacgcatatttgaaggagcgtgttttgccttcgccgcgttacccggtggtgacctgcttaccagagatcggcgtagttgacgactcgcagggagtcaaacagatgtgcgtacgcggcgaaacggaaacgttatttgtgccggcgatgattcggcagatgcagagcttcaacgtggcggatgtcatttgcattggaccgttcctacgcagtctcaatatggatttcggcagtatatcggcctcatttcgtgatgaacagtgggtagacgatattatgtcgtctctcggcagttga

SEQ ID NO: 317394 - DNA, 1371 bp, Proteus mirabilis
atgtgctcttcctttgattcttcagccgtggagcagattgaagccgtagcgatggggcgcgagtatgctactcggcgccgagtcacggtccgggatctgcttggtactcctgtagcggaaatggcgatcgctccgccagtttatatccatcgtactattggctcaatgagagaagcccccactttctccctagcggaaattcatgctgcgatggcgcgtgcggcggatagttttcaacatgactcaatcgcggggctgtcacccgatgcgtattgtcaacgggtacgtcgtaccactggattaccgatggcggtgacgcaaaactccttggcagttatcgcgcaggcactgcgcgatatgtcgcagattatcgatgcgggcaggccaaaaggtgcttgctggtcaaggtatgatgcgcaggcgctggctggatgcagtttattcagccgaaaaggcgacgttttcgcggtactggcggctggtaacgggccgggcattcatgccctttggccgcaagcagtagcgctgggctaccgtgttctcgtcaggccttctacgcgcgagccattcacggcgcaacgcgtagtttgtgctatggtgcaagccggattggagcattatgtagcgctgatccccacggactatcgtggagcggatgagctggtggcttcatctgatctgacgctggcgtatggtggccaagatattgtggataaataccgttttcatccccgggtgcgcgtgcaagggcctgggcgtgccaagattgttatcggtgctgacgcttgtctggatgaagcggtcgcattggtggcaaaatcaatgaccgatctcggcggtgccgcctgcgtgtcggccagtgcagtgctagtagagggagacatgcatgacttttgtcgacgtttaaggctggcactgcaacagctaccgctggaaacgtttccacttgtatcacggcaatcggtagattggctgagcagtgtgctcgactcgccaattgaggctgatccgatgccggagggttacgtagtgtatccgctggtgactgaagtgactgagcctgatgatccgagggtacagcgcgagttgcctttcccatgtgtgacggttgcgccttatcacgctatacgcagcgcacctatgctctctggatctctggtcgtgacagtcttttctcgacgcccccagttgctggagtcgattttgtccgatgccagcatcagtaatgtttatatcggcgacattcccactacctggatggccccctcggtgcctcacgatgcctatctgagcgattttctgatgtgtaatcggggatttcgcgtctcaccatcttggtcagaaaataaaagtaaaggagatatactgtga

SEQ ID NO: 317395 - DNA, 1059 bp, Proteus mirabilis
atgaatttacctgactttacttcccatctgatgggaatgatgaaatggcatttttcaccagaaactggtgcaccgttctggttggaaatgcgccaatcgctcgattttgatccgctgtatgaggttaatacctttgccgatctggcgcgtttccccgatgtctcggatcgtttacgcgatattccagtcgaagcgttgatcccgcgtggtttacatcatttgacattggcgggtgtttttgaaagcggcggcactaccggtaagccgaaacgcatagttgtatttgagcagtggctagacgagttggttagctggcgtttggccggcctgcggtcgggcactgacgaacagcccggcaatactctggcgttagtcccctccggcccgcatattgtcggcgcgattaacgctcgtcgtgctagggctaaaggtgggttgtgttttagtgtcgatttagatccccgttgggtcaagaaatgcattcagcgcaacgatatagtagggatgcaagcctatgctacgcatattgtcgaacaggctgaggatattctgtacacacagtctatccagtatcttatcgccacgcctccaattctggaacggatggctcaacgcccggcgctggtagcgcatatgaaccagactctgaaggaaatcacttgggggggaacccaaatggatcccgatacgctggctttcctgcagaaggaggtatttccggtggtgccgataaacgctagctatggtagtacgatggttctgggagaagccaaggcgcgttgcccagtagatcctaataattcagtaattttcgatagttttgcgccctatatcttgctggaggtggttgagccgaaaacgcggcatcccgttcagtttggcgaacgcgggcgagttatcatgcatcatctcagccgttacgccttcttccccaatattctggaacgtgatacagcggtacgctggccgcgcaacgatgattttcccggctcgtcagtcagtgatgttggtccgttgccggtcattgacggacgtacggttattgaaggggtctattaa

SEQ ID NO: 317396 - DNA, 636 bp, Proteus mirabilis
atgggaagcagtgcgtttgaaagtatcagcggcaaggtagatacggactttttgcctttccatacgcagttgaatcagccgattgaactcgcttgtgcttgggtgcaggaagcgatacgcgaacaggtcagagaaccgcgtgcaatggtgctaacgaccgccaacgctcagggggaaatgagctcgcgtgttatggcaatcctcgattttgatgaaagaggtattctgtttgctactcacagctgtagccgcaagattcaggatatcaacagtcatccacacgcttgtgctcacttttactggaaagagttgggacggcagctctcagttagcggcagagtggttaggcagccgcagtccatgtccaaggcggtttggggaaaacgcccgattccgttgcatgcgatgtcgacagtttctcatcaaagtgaaccactgttggacagtgagacgttgcgtcgggcggcaaaggctcttgagagcaggggagcgttgccctgccctgatcgtttcgccgtctaccagttgataccgcaggcggtggagttttgggccgctagttctgatcgactgcatcgtcgactgcgggccgagtatcaccggaacgaatggcgaagcacttggttacagccgtaa

SEQ ID NO: 317397 - DNA, 846 bp, Proteus mirabilis
atgcaccgctatgtcatcgtaaatgcgttcagcgatcgcgtgctggcaggtaacccagtcgccgtatttttcgattgtgatgatcttgagccggaaatcatgcagcgcatcgcggcagaaatgcggctttctgaatccacatttgtgtcacgtcctcgtagcggtggggatgcgcatgtccgcatttttactccggtgaacgagttgggatttgccggccatccgttgttgggaacagcgctggctctgtctcttcggttgaaaaaaactaccctgaatattgaaacggcgaagggtattttccccttcaagctggagaatgctaggctgcgcagcgatttaccagtcgcacatgttgatatgcttcagccatccccggtaatccaaccttatgcgcaagctgaagcgttgatgctcgctctgggggtatcgcacagcaccttgccgattgaacagtacgatgttgggccgcgtcacgtctttgtcggaatcacggatagacaaactttggctgccctcaatcccgatcagagagcgttggcgcagcatgaaaatatggccgcgctctgtttctgccgtgacgacaattactggcgtctacgtatgttctcaccggcatacggtgtagtggaggacgcggcgactggctcggctgcaggacctttggcgttgcatttggcgcggcatggctggagcgactttggccagccgctggagatctggcaggggatagagatagggcatccgtcaaaaatgtatggcatggcacatagagatggcgacacatatcggctgtatgccggaggacatgccgtccaagtagcgcagggcacctacgcaatttga

SEQ ID NO: 317398 - DNA, 354 bp, Proteus mirabilis
atgatcatggaatgcgtgtggtgggagttggggccgggcgagccggacatcgggcaactgcaggcgcagcttgagcaagtcgacttggtcgcctggcagcgaattcacgccttgcaggtcaaatactggatcatgaatgagctgccgccgcgttggggggcagtgatggtatggcgcgatgataagcccgatctctcggcgttgccgttgaatgcggccgctgaggcgatcggccgggaacccgatgtacggctgcgttttatcgttgccgcatcttgcctgaatgaatcgattatcgagccttgggcgtctttactgaatcgggaggaatcatgcaccgctatgtcatcgtaa

SEQ ID NO: 317399 - DNA, 1866 bp, Proteus mirabilis
atgaatatagatccggcaatcacctctttgctacggtatggcagcaaccatcaatcgtttgcgctgttgttcagatgtgagcgcagcgcagttcccgaaatcgaagtgatcataggggaagaacagcatctaaacagtttgcaaagtctggcggatttatccgcgattgctgacggtggtgatgggcagcaaacgttgcttgtcgcgccttatcggcaaattgctgaacgaggctatgctgttaatgacgacggtaaacctctcattgcgttagtcaatacacgcagtcataaagtactactccatgaggctctggccttgctgcccgatgctccgttgaaggtgaacaatgccgtgtttaagccgtccgacgatgagtatgcgcatatggttgctcaagtcattcagcgggagatcggcactggtcaaggagctaatttcgttatccgccgcgcctttactgccaccttcacagattatggctgcgaaacaggattaactctctttaaaaacctgctacaacaagaaagtggcgcttactggacttttttcattcagtgtcgggatgtcacgttgataggcgcatctcctgagcgacatattactctacagcaacaaagagtatccatgacgccgattagtggcacctatcgctatccctccactgggcctacccgtgaagggctgcttgacttcttatccaatgagaaggagaaggatgaactatcgatggtgctggatgaagagctgaagatgatgactcgcatttgcgacgctgacgttaaggcatttggtccttttttaacgccgatgtcgcgtctggtacataccggctatcggcttgaggggcattcgtcgctgcccgtatctgagattttgcggtcttccatgtttgcaccgacagttaccggcagcccgctggaaaatgcggcgcgcgttatcgccaaatatgaagcatccggacgaggctattatagtggctttgctgccttgctgggatatgaggacggtgagccgacgatcgattcagcgatcctcataagaacgagtgaaattgattcgacgggtgcgctaactctaggggtgggagctacgttggttcgcacttcagatcctgacgcagaagcggcggaaacgcgggcgaaggctgccgcgttacaacgtgccatgggtgtgaatggcaagtcaacatccatttttcaggatgaacaggttgccattgcgctacaaaagcatagtcatcgcttggccgctttttggtgtgataacgccggtacaaattcgagatgccatcagggcgaggtgctgatgattgataacgaggatgccttcacctcgatgatgaagtatcagttgtgtgcgatgggattcaacgtccggcttgttcattacgcttctcctatccaacccaagcctcatgaactgctcgtaattggcccaggccctggcgatcctcgtgatctgagcgacgagcgggtgatttgtagccgcaaactaattaagaccgcgatgcaagaagggcaaccttttatcgcgatctgtttcggtcatcagattctgtgcaccatcctggggtacccgatagttgcactgacgttacctaatcaagggatccaaaaagagattccattttttgggaaggtcgagcgcgtgggtttttacaacacgtttaccggactagcgaccagcaatacgttagcaagcgagtatggcgagattcgcgtcgcgcgggatgaggcgactggccaaatttttggcctgcgtgggccgcgattttcatcaatgcaattccatccagagtcggtgttgaccatcgatgggccacggatcctttatgaatcaatccaacaggtggtggcctcatga

SEQ ID NO: 317400 - DNA, 621 bp, Proteus mirabilis
atggctatacctgaaattgaagattatgatctttgttcggtagtatcgttaatgccaaataaagtgaactggtgcatcactccatctagaagcttgcttttagttcacgatatgcaaaatttcttccttaacccgttacctgagttattgcgaaataccttgttgacgaattgtgcgcaattgttagcttgggcgagagggcaatccattcccgtggtttacacaggtcagaaaggcagtatgaacgccaaagagcgtggattgctttatgatttttggggggcgggaatggatgccgatccggtgcacacagcaatcacaccattattattgcctcaaccgaatgagccagtattaaaaaaatggagatatagtgcgttcttttcctcggagcttgcgaatatattttccgaccagcagcgtgatcaaataatcatatgtggtgtttatgcacaaatcggtattttaaccacagcactggatgcttactccagggatattgaggtctttttagtgcgggacgcgatagctgatttttctcaggcggcccatcagcgtatgctgacttacgctgcttcatgttgtgcgtcgatattatcggtgggtgaggtaacggtatga

SEQ ID NO: 317401 - DNA, 459 bp, Proteus mirabilis
atgatggaaagtgaagtgcgtgcgagaaatcgcaatattgttgaacaatatatgaatgcttacgggcaagcccgtttatctaggcacgaactgtttgatgaggagggatgtggtggactgtggactacagatagtggcgaaccggtagttattaaaagcaaaaatcagttggctaaacatgcagtatggtcgttggcctgtttccccgactggcgctggtacaatgtgcagatatttgatacacaggatccagatattttttgggttgaatgtgatggtaaaggagagattaattttaagggctaccccaaagggttttatcaaaatcatttcattcattatttccagtttaaaaatgggaaaattatccttcaacgtgagtttatgaatccttgccagcaatttcgagcactaggtattgaagtgccgagaataatcagggaaggaattccgacctaa

SEQ ID NO: 317402 - DNA, 783 bp, Proteus mirabilis
atgagaaagatatggttgatcaccggtgcggctcgtggctttggtcgtgtctggactgaagcagcgttaaaaagaggggatagcgttattgctactgcacgtgagccggagaaattgaccgagctagctgctgggtatggcgagtgtctcttgcctgtgaaggtgaatgtgtgtgatcgagctgctgttgcggctgcagtggaaaccggcttccaggctttcgggcgcatagacgttgtggtgaataatgccggttatggcttgttttgccccttagaggatgtgccggaaaaggaagctaagcagattgtcgaaaccaatctgctggggtcgctgtgggttattcagtcggtgctgccatatttaaggcgacaagggtatgggcacattgtccagatttccagcattgctggtttgctggcgttacctggcatggcgatgtacaacgctacaaaatgggcggtggaaggtatggtcgaaacactggctcaggaggttaaagagtttggaatcaatgtcacactggtcgaaccaggtcctcaccttactgattggattggcagttcggctgtgcgcccagaacgcggtcaggcctatccctcacatgagcagatgatgctgcaaagttggccgcgtttgccattggctgctcctgatgccgccgtggcgccgatgatggcgctggtagactcggatacgccaccgttgcggctgctgttgggggaatcgttaaatgcattgatcatccaagaggggcaacggcgtctggctggcatcgtataa

SEQ ID NO: 317403 - DNA, 387 bp, Proteus mirabilis
atgttcaagcctaatagtgtaattttatacgtcgataacgtagaagtcagtaccgcattttataaagctattttgggcgaggggccgatcgaatctttccctggattctccgtattctctttgaacgatggctttattttaggactacaatccaagcatgatattgagccgaaaccccagcaagcattcggtgggtttgaactgtgcctgagtgatatttcgatcgaggaggttgatgccatttatcgcgattttaaagcccgcaatataccaatggcattaccaccaagcaaattggagtttggctacacttttgttgcactggatcctgatggacaccgtattcgcctatgtgcaacggacacaagtgggatcgagaggttgtaa

SEQ ID NO: 317404 - DNA, 714 bp, Proteus mirabilis
atgggtatgataacagcatcacactgtcagtttagtagagaaagtatctctttcttaagtgaagtaaaacaacaaaacagtaaagagtggttcgataaaaacaagtctatatataaatcatgtttactagagccttttcaaaaactggttaaagaactcacccctacaatgcaaagtatagatcccaatattgaagtcagtcctacaataggtaaaactatatctcgcatctatcaggacatgcgcttttctaaagataaatcccgatttcgtaacagaatgtggctgacgtttaaacgagataaaaagtattggattgactctccagtttatttctttgaaatcagacctgatagtttttattacggcttgggctattactctgccacacgagccacaatggatcgtgtaagggaacatattattcgttgcgaaaatgaattccgaaacgccacgactcatcttttgccggtatttgaactggtaggtgaaacatataaacgccatttaaagcctgaacaacctgaagacatcgccacttggtataatcgaaaatctttttccgtcattaaagaaaatcatgatattatcgagctattcgagccacaattagtaagtacattagctcacgcttttattcagttagcgccactttatactttcctgatgcatattgaagaggaaaaaaaaccacacggaaacatactatcataa

SEQ ID NO: 317405 - DNA, 309 bp, Proteus mirabilis
atgagtgataaaacaaccatttccagaggagaacgttgggggattaatttcgccaacaaattaaaatatttcaataaataccttcaagataaatgtgaaaaaaactcaattcccaaggttgtaggaaaaattttgtttatatctttactgggattaatttgctgcgtggctatatatttcttatttatacctatatttatacttacaagcattgggtatattctaatctggtattcgaatagtggagtcccagtaattattatgaactctgaagatatttcaaccaataaagatgacaaccagaaataa

SEQ ID NO: 317406 - DNA, 222 bp, Proteus mirabilis
atgaacgggcttcagaacacgtctgatgatgtcattatgaacctggtgatgggaacaatgtttttggtgttgccggcgttgtggatgggggcatttggttgggctggtgttcatttaggatctactttgagtaatggtatgaaatcaggaactgatgaagcaacaaaagctggagaaaaaagtaggattgtaactgaacaggtaacttcaaaaagtaaataa

SEQ ID NO: 317407 - DNA, 1233 bp, Proteus mirabilis; identical to SEQ ID NO: 301599

SEQ ID NO: 317408 - DNA, 384 bp, Proteus mirabilis
atgcggatcttaattattgaagataatatcttacttcgccatcatttatctgtgcagtttcgcgatgcaggacatcaagttgatgcagcacaggatgcgaaagaagccgatcactttatcgcagaaagtacacctgatgtcgccattgttgatttaggtcttcctgatgaagatggtatcagccttattcgtcgatggcgggaaaataatattactattcccattatggtattaacggctcgagaaagctggcaggaaaaagtgactgcattaaatgccggtgctgatgattatgtgacaaagccttttcattttgaagagatcgtggcacgcgttcaggcattaatgcgagaagaaacatgggcattgcatcacaaatactga

SEQ ID NO: 317409 - DNA, 531 bp, Proteus mirabilis
atgtttgggttaagtgcctttgatttggcgcgtatccaatttgcgtttaccgtttctttccatattatcttccccgcaattactatagggctagccagcttcttagctgtcttggaaggcttatggctaaaaactcgcaataaggattatttagcgctattccatttttggtcaaaaatattcgctgttaactttgctatgggcgtcgtctctggtctcgttatggcatatcagttcggtactaattggagctttttctccgattttgccggctctatcaccggccctctattgacttatgaagtacttacagcattcttcttagaagctggatttctaggtgtaatgttatttggctggaacaaagtaggtgaaaaattacactttttcgccacttgcatggtggcattgggtacattaatgtcaacattttggattttagcctccaacagttggatgcaaacaccacagggattcgaaatcgtcaacaatcaagtggttcccgttgattggcctagcggttatttttaa

SEQ ID NO: 317410 - DNA, 348 bp, Proteus mirabilis
atgagtcgtcatacacagaaaggtggtcatttaccgctcaaaacgggcttcgcccgtatcgctgttgtcgtcaaaaaggccaatgtaatcaatgtcggacggcagtggtttattttcattaatgatttttttcatgttttattcctctggttaattgaaaataggctgcctgtattttcagatcggagcggccaaactcatcgatctgaaattgtgcagacagttcagggaatcatatctctgacgactgctcgtccgacaccaacaattcatattccaaaaaaaataatttatttgcatggtgggaatagggtatttcggattaacggggggcttttcaatgcataa

SEQ ID NO: 317411 - DNA, 1638 bp, Proteus mirabilis
atgaaaaccgatttacagcataaactcagtctggcgcttctcaaaggaaatcctgtcagttctctgtcatcagaacagaaaacgctggtgtttgtttccgaaatcccgatggtcctgacactggaccaactccggccaaacccggataacccccgccggcgcagaaatccgcgttatgaggagattaaaagttcgatacgggcgcgtgggttggcgagtgtgcctattgtgaccaaagagccggacagttcagtgtatattttcagtgacggcggaaatacacggtatcaaatcctttcagagttatggcaggagacacaggatgagcgtttcttccgccttcatgtgttattcaaaccctggccgggacgcttggcgtgtctgattggtcatctggcggagaacgaagtcagaggggagttaacgtttctggaaaaagcacaggggatttgtgtggcgcgttctctgtatgaggacgtgctgggaaaaaaattatcactccgggcatttgcccaacgcatgaccgcggatggattgcctgtcagtatttcgcacatcagtaagatggaagagacggtttctgctttattcccttatatgccccggttactggaagacgggctggggcggcatcagatagaggcgttgttatccctgcgttcaacattgaaaaaaatcacacaacttttttctgagcatcccgacacagaacggctggttggttgttttaatgagacctgccgttatattgatgagcagaattactttgttttggaagattttattgatgaacttattgggcagttattacgtgaatgtccgctatccggatttgactacgaccggtggctgtttgaactgaaagtgaataaaggaaaattattatctcagcctgaaacctcatcagagattaaatattcatcagagatagatggcggtcaagacgatgaagatgctttttcgacggttttaacagaagcaatatcagaaaataaggatgataaattatctgaaaagccatctgataattcagatggttcaaaactgttattttccccggagcctgtggggcagattgttgaaattcaggatgatttgtatggcggagagcctgtttttagtggtgatattccggtatgcggcagtcataccgaaaaggatatatcggatgagggtgtgaatgagtcggggatatccgttgtttcgcctgttgatataataacacccgatccattaagttgtgccggaatttggccgatggttgccggtatggaagatattgaacatcttcaggtacaagcttaccggacattatttaaattgagccgtgaactgagttcagactctgattttatggcttcttcgggtgtaaattcaccgggttttatgacgacagcagaaaattcagtgctcagtatagtgatgcgtatatttacggaagagagtgccagcacagatactgtttcctctgcattaaagcagttacttaccggcggcactcaggcggataatttccctgttctggatgatgctcaattcgtcttatggatgaagttaatgtatatacttcgttgtttattttctttgcaacgagctattggaccggatatcactgatgatgattcagaattcgaataa

SEQ ID NO: 317412 - DNA, 261 bp, Proteus mirabilis
gtgaatgataaatgggtcgcagaggcaattaccgctgaagggcatacatttgaggcgacaccgggcagttattataaattcgggcgtaagctgggtaacaatactcctcaggatgaagtgattctggaacaggaaaagaacggcacaggggctctggtgtatgtggtttatcactcctccttccgcgggcatttaacggatgattatgtagatcctttatttgagcagataagggatgttgcttccggcaaaatcagataa

SEQ ID NO: 317413 - DNA, 783 bp, Proteus mirabilis
  misc_feature (234)..(243): n is a, c, g, or t
atggtgcagttttattcccctaaaaaacgtcctgctaaaaaacaggtaaaaaacttggcggtaaccgctaatgcattggatgctaacggtcaaggtattgctcatgctgagggcaaaactatttttgttaaaggattacttccacaagaaactgcacgcattcgtttgaccgaagaaaaacgccagtttgccaagggagaagtgatcacacggttaaccacaaacccagaaagnnnnnnnnnngagtatggctatcggcgccgagcaagattagggttacgttatcaccctaaaaagggtttggtgatgggatttcgccaagcactttctaatgacttagtgatggtcacccaatgcccagtattaaaaccacaacttaatgtactgttattgccactgtggcagtgtttaaagcaactctctgtcgtgcgtgatttaggtcatgtggaattagtgttagcagataatgggccattagtgattttgcgtcatttatcaccgctatctgagggtgataagcaattgttagatgatttttctcatcacgctcaagtgatgatatatctggcgggtgataatggtgagatcgcacaattaacaacgattgagaaggaacccttctatcagatagagggtctaaaattacactttgcaccaacggattttattcaagttaatgatgaaataaatcataagatggttgctcaagcgatagcatggctcgatttatcgccaaacgatcgcgtactagacttgttttgtggcatgggtaacttcagataa

SEQ ID NO: 317414 - DNA, 630 bp, Proteus mirabilis
atgaaattatataatttaaaagataaccaagaacaagtcagttttgctcaagcggttaaacaaggtttaggaaaacagcaaggactcttctttcccaaagacttgccttcattttctcaagcagaaattgatgcgctattaaaattagactttgcaacacgcagtagccgtattttaagtgcttttatcggtgatgaaattcctgctgatgtgttagcaaaacgtgtgaatacggcatttgcttttcctgcgccagtgacacaagtagaagaggatattagttgccttgaactcttccacggaccgacgctggcttttaaagactttggtggccgttttatggctcaaatgttatcagaagtcgcgggtgaccagcctgttacaattttaacggcgacatccggtgatacaggagcagcggtcgctcatgctttctacaagttagataatgtccaagtcgtgatcctctatccacaaggaaaaatcagcccattacaagaaaagctattttgcacattaggggagaatattcatactgttgctattcaagatgactttgatgcttgccaagcattagtcaaacaggcatttgatgatgaatatttaaagaacaccatgcatttaaactag

SEQ ID NO: 317415 - DNA, 348 bp, Proteus mirabilis
  misc_feature (308)..(317): n is a, c, g, or t
atgattgcaattactggtgcaacaggcctattaggtcaacatgtgattgaaaaccttcttcaaaccgttcctgctaatcaaatagtggcatttgctcgtgatgtaaaaaaaggatcgtctttaagtcagaaaggagttttagtacgtcaagcggattacaatgataaagcttcattaataacagctttacagggtgtcgataaattacttttaatttcctcaagtgaagttggcaaacgtaccattcaacatcgtaatgtcattgaggcagcaaaatcagcagatgtacaatttattgcttacactannnnnnnnnnagcatattacatgctgatcgctctccattaa

SEQ ID NO: 317416 - DNA, 627 bp, Proteus mirabilis; identical to SEQ ID NO: 305352

SEQ ID NO: 317417 - DNA, 738 bp, Proteus mirabilis
atgagtcattcacgagaacgatcagtctctctttccggtggattacataaactgctgattgtgacggggggggttgcctgtgctctggtggccggtctcccgctgtttatccacagtaatgttatcagttcacactctgaggctttgtcacaactcggtcagcgattacaggccattgagatgaagatggctgactctgtcacgcatgacggagtgaatgcgcaactggatacgctccgtcaggaacaggctgccctgaaacaggacgcggcatcacagcgtgagaccctcagaacggtgacagcgcaactggccgttgccgggaaaccggatgagcagctcgcagtgctgtcagacgggctggaaaaacggctggcgcagctggaaacccgtctggcacagtgggctccggcgttacatcagttgcaggaacagcggcagccggtgcaaaaaacggtcaatcccccggttgtcaaagcaacccccgccacacccgggacttcccgttccggggcttctgtccgtgcctcccggaccgtaccgtttcagttaaccgccattgaacagcggggcggccgtcttcttgccgctctggccccggcggatgtccgtcagctggggcaggtgcagttactgccggtgggcggacgttatcagggctgggaaatgactgacatccagacggaccgagtgacattacgttatcaggggcgcacggtaacgttgcgcctgccataa

SEQ ID NO: 317418 - DNA, 468 bp, Proteus mirabilis; identical to SEQ ID NO: 103796

SEQ ID NO: 317419 - DNA, 258 bp, Proteus mirabilis
atggtcagagcctgtatgatacgggaactgatagcggatttatcccgctgcaatccggaggcattcgtcttgtgtgagatgtggttccccgatgatgttacctatgttgatgaaacggcttgtccggcagagacacgggcaacattaacgcatgttgcacatcattttgatgcggagctggggatcaactgggacacgctggcgtgtgcgttatcgtgtgtcagagatgctgagcagaatgtgcccggcatgaactga

SEQ ID NO: 317420 - DNA, 342 bp, Proteus mirabilis
atgaggagaggattcgtgcagggggggagggagtgggctcaggatttttggcatgacattctgtttccgttagtggtgagcacagggtttttgtgtgcagtcggttatttcagctggccatatctgagtcagtttctggcctggggtgaacagcatctggttgagcgggggcgttattacctgacggaatgtcagttgatggaaagaaacagagatacgggcttctggtcagggcgggaaaatattctgcaatgcggggtgacacgggaacatgtgaatgcggatgaatatgaaaaggccgtccgtgcctggcggcagaaacagacagagacagaaaaatga

SEQ ID NO: 317421 - DNA, 729 bp, Proteus mirabilis
atgactgcaccggatttgacagcgtcatgttgtcagcaaatccaacagtggtatcagatgtggttgtctgaaggcggggcgtaccattcgtgggactcactgacagcgacgcagaaagcgatactgtcaccattgttatcgggaagtagttttgactggcttaaccggtttaccggagaggatgaggccagtctggctgctgtctgggaggatattcagtatcttcgcggtaccggggaagccataccgatggatatgcggagcctgttaccgaccagcattgcggcggaattacacggcttcaacggtcgtttatggaaaacgccggaatcgctttggacgctggactgctggcaggcattttcccccggtaacagtacatatcatctttatcagtgccgttatggtgtgaaatggccgaacggcaatggttttcgctgtattgatgtcggagatgcaaccgcactgtcagtgatgtttgataccccgtggagtccgccgtcagcagaggtcttgtgtacgctgtctgcgcgtttccgttgtcaggttcgtcatatctatgccgaagaaggctgtgggttctgcggatacagcgagtatgaccatggcaggttaaccgaccatgaatctgatgatattgaatacagtgatgaagagaatgaggacggtttccgggaggtgacgggaccggactatattcttgactctctgcctcattacggagggtaa

SEQ ID NO: 317422 - DNA, 606 bp, Proteus mirabilis
atgaaaaagtatttaattgttttgttttttgattttatttttagttttccgttaatggcaaaaacattatttttaggtgattctttaacagctgtttatgaaaaagcagcaaaaggtgttgttgacgataaaataaaagcggaatatatttctggttcggggttaataaataaaaaagactgggtcgcttttgtgaatggttacgattttcgggagttcgataatgtcattattagtctcggggtaaatgattttgtcccgtataatcagaataacagtcttgggtattattgccgtgtatttgaagtgattactgaaattcaaactcaaaatccgttagcgacaattatctggatatctccgccacatttaaaaaatccggcacatgagcgttatttaatgcatacccgagatattattaagcgcagtacgatgttattaaaaattcattatctggatgttaatcagcctcatattttggggacacaatggcagtccgctattcataatgacattgtccggaccgatgatggaatacatatcacccgcaaagggggcgaacgggtagtgaatgaaatagtaaaaatcctgaataaacggggttga

SEQ ID NO: 317423 - DNA, 609 bp, Proteus mirabilis
atgagtcagaccatcacccgaaaaaccgggcattttgcctggtgtgcactggttgccctgcatctggcccgccgggacggacgggtgcagtccgacatgcagaaaaacctgtttttaatgcgctggctggcaacggccaaaaaacaacgccggtttgaccgggacgttacgccggatattgactggttactccgacagggacgaacactgggtgtccgggccaaactgccgcaaaaactggattatctgtaccgatcctgtaccggcgcattacacgagcagagcgatctgttccgcctcacgtatgcctttgaatcggccaaagaagccggttttgcttatcagttgctgagtgataaatcctggcacgggcgacatgcggtgaccccggataagcactgcaacgcactctacctgtcccggagtgcactggagcaggcctttgatacggacggtcatcagaccgcccggttaccggtcaaaatcgggggggatatcacggtgctgactgaactgctgacacaatgtggctggcaacttatcccgaccgacacaccgccactttattttctgcactcactcatccatcccgccggcagcgccggataa

SEQ ID NO: 317424 - DNA, 294 bp, Proteus mirabilis
atggtggccaagcccttactgttaccggcggatattattcagttaccgaaagggcaggcgtttgccctgctggaaggcggaaagttgtggaaaatcaggatgcccctgccggcggcagaggcggatgcactgatgccaccggatttgcaaaaaatcgcgcagtatatggagaaaaattaccgtaccggcgaaacctggtggacagccgcgtcattttcagatgcagggtctgataccaatgacatgaatatggccgcgccggatactgaaggaggcaacgatggcaacaactga

SEQ ID NO: 317425 - DNA, 294 bp, Proteus mirabilis
atgattctaaactcgctaagagatgatgtatatactatttatctacctcagatatatcttcttgaacctaaagaagtctcgttaataatgaattattattacagtcagaaagagctattacaaagctcaaaagccattcagataggattagcccaaaatagagacaataaaaaatggcttgaagaaaaaacataccttcttacccatagttttgagaatgaatacttattaggcgaacaaatactgtcaatgtataaagcttatattcctgatgaattagtgaataaacgttaa

SEQ ID NO: 317426 - DNA, 237 bp, Proteus mirabilis
atgcacccatcaaaagtaagagtttatgtatttaattggagtacttttgtgatggtattaggaatattagcatcattatattttcatatttctactcaaaataacatagcagatagagacaaagaaaatagagaaaatgaaagaaataatataagaacaatgttcgcctatgagatttcatataatcaatcaaatctaagacttttagaagtgccaagcagaaatctgcactgctag

SEQ ID NO: 317427 - DNA, 639 bp, Proteus mirabilis; identical to SEQ ID NO: 14558

SEQ ID NO: 317428 - DNA, 639 bp, Proteus mirabilis
atgggtaaaaaattcctgcttacgcttgtcctgctgctgttttctgtgacgttaccggcgcgggaagtgccaccgggctaccgtgaggtggcccggcaggagaaggtgccggccgaagccctgtattccctggcactgacggagtcttcctggacattaccggcgcatcatccgcaggccggtgaaatccatccctggccgtggacgctgaatgtggccggtaaaggataccgttatccgacccggcaggccgcctggcaggctttgcagtcatttttacagacgacatcaccaaagcgtattgatgtggggattgcgcaggtgaactggggctggaacgggcatcacttccgttctgcctgggaggcctttgatccttataccaatctgcatgtggccgcccgtatcctgcggcggtgttatgaggtgtcaccgggcagctggatccgtgctgccggctgttatcaccatccggcgggtggtcagcctgcggcccgctataaaaatatcgtccggcgtcagctggcgacactgacaccggagcgtcatcctgtaccggcgccgttgccggcggtcaggcatgacagcccggggtcatttgtatggatagaaccggagaaagaaactcatgccaaataa

SEQ ID NO: 317429 - DNA, 372 bp, Proteus mirabilis; identical to SEQ ID NO: 311121

SEQ ID NO: 317430 - DNA, 372 bp, Proteus mirabilis; identical to SEQ ID NO: 311121

SEQ ID NO: 317431 - DNA, 468 bp, Proteus mirabilis
atgaccagcaaaaataatgcaacatctgaaaataaatactttaatctgcatgtgaacgggattgggtatttatcgaatatccgtcaggttaacggccctaaagggcagtttttaaccgcagtgattaatgcactcagtggaccggctgataaccctgtgtatgttcgttttgatacgaccgttgtcggggagaatacggcttcactggtcagacggtgtattaaagcggtggatgaggacaaaaaagtcctgaccggatttacattaagtaacctggcctccgatattttcaccctgacaaaaggggagcatgccggagaacagcgggtcagcctgaaagccagactgctgaatattgactggattaaaatcggtaaagacgtggtatataaagccgagaaaaatcagtcaacgcctccggggaatgaacagcctgcatcccgagagtatgcggcggattctttttag

SEQ ID NO: 317432 - DNA, 390 bp, Proteus mirabilis
atgttttatctcgattttgaccaatttccacgtaagaaaaaacagtctggttttattagtcatattcaagaatatatggctaaacgtaagcgacaaacggcaatgcatcacagtgaacctacccttgcacaaaaattttgtcgccccattttatccgtattggaagcccaagcatgtacagggcgagaacaactttctgcaatgcaaaaagagcaattagagagaagcaaacaaattgctgacgatttaggtatgacattaatagctaaccaattaactcgttatctcgctttaactgctcgtgactctcaagctttattacagttaatttggctatgtgataatctgcaacaattacaaagcccgctacccattcaacttaatgaataa

SEQ ID NO: 317433 - DNA, 249 bp, Proteus mirabilis
  misc_feature (233)..(242): n is a, c, g, or t
atgcgctcaaatataaaaagaaataatctccccaatcagataatattaggtgataaaaatagtaattctaaagaacaaggtataatttcttctaaaaatatcattatcaatgcttctgatactactatttataattatggtagtttagaaagtagtaaccgtagtaaaaatgccatacaacttaatctaaataaaacaatatttaataaccatggatatattctcgctagaannnnnnnnnntatttag

SEQ ID NO: 317434 - DNA, 417 bp, Proteus mirabilis; identical to SEQ ID NO: 14567

SEQ ID NO: 317435 - DNA, 417 bp, Proteus mirabilis
atgcagaccatcgattttatgccggatcgcttaaatgcagagcccaccgtgtttcgcggatttaccacccatgaaatgttcgccgccgccggtgtcggttgtgcgggcggggtcgttatctgtattccgctgttaccgctggccggctgggtgatcctgccgaccggggcgctgattatgccgctgttggtggtgtttttcggcggcacttttctgacccgcatcaaacgcgggaaaccggaaaattatctctaccgccggttgtcctggaaactgcaaaccgggtttgcccgcaccctgccgctgaccgggcggctgactgaaaaatccctcattaccgtttctcagggctggtttttacgccggacgcaggcggtgtcgctgtgccggtatgttaccggagggcgccatgagtaa

SEQ ID NO: 317436 - DNA, 426 bp, Proteus mirabilis
atggatttacgcacctccatttccgtttgcagcatcccgatttcgcgatccagctggtcaaccgactggttaccgatctcctgggctttcggaaaattaccggcattcggctccccctggccggtgatcagcatccgccgcatcgtcagcgccagctccatcgtgtccgccatcgccagctcgccggccagacgctgtgttaacgctgttttatccggatcccggcgcagcgcttcaatcaccccccgggagaccgtcaggctgccggttttcagtttcgccaactctgccgccccgaccgcgccccggctgttcaccagtttatgcagctgttccaaattttcccgggtggtggtctccagcaccggtgccagcccggttcctggctgggaactgcccggttgctccgcctcaccgccgctctga

SEQ ID NO: 317437 - DNA, 417 bp, Proteus mirabilis
gtgaacgggattgggtatttatcgaatatccgtcaggttaacggccctaaagggcagtttttaaccgcagtgattaatgcactcagtggaccggctgataaccctgtgtatgttcgttttgatacgaccgttgtcggggagaatacggcttcactggtcagacggtgtattaaagcggtggatgaggacaaaaaagtcctgaccggatttacattaagtaacctggcctccgatattttcaccctgacaaaaggggagcatgccggagaacagcgggtcagcctgaaagccagactgctgaatattgactggattaaaatcggtaaagacgtggtatataaagccgagaaaaatcagtcaacgcctccggggaatgaacagcctgcatcccgagagtatgcggcggattctttttag

SEQ ID NO: 317438 - DNA, 387 bp, Proteus mirabilis; identical to SEQ ID NO: 301411

SEQ ID NO: 317439 - DNA, 186 bp, Proteus mirabilis
gtggttattagaaccagccccggtgccgcacagcttattgcacgtttattagattctttaggtaaagcagaagggatcctcggaagtatcgctggtgatgacactattttttctacacccgcgccaggattctcaacagaagaactacgagatgcgattttaaacctatttgatcaggaattataa

SEQ ID NO: 317440 - DNA, 351 bp, Proteus mirabilis
atgccgctgtcgtcacagtttgaccgggatgctgattactgggccaccttactgcatgaactggtgcacagtaccggccatccgtccagactggcccgtgaaggtatcaccgcatcgaccctgaagtttggtgacccgttgtacagttttgaggagctggttgcggaaatgggcagtgcttttctctgtgcgcagttaagcgttgagggagaagtgaaccatgaaagctatcttgacagctggctgcgggtactgaaagcggacaaaaaagcgttgttccgggcggccggacaggcccgtcaggcctgtgagtttttactgaatgcggccgcatcccggcaggctgcgtag

SEQ ID NO: 317441 - DNA, 135 bp, Proteus mirabilis
atggtaaagatcagtgcaatagtgatagtgcgttttattttattattaggatacgttattgcattattattaccatcttcgaataatgttgagtgtaataacgatgaaaataataagataaccatactaaaatag

SEQ ID NO: 317442 - DNA, 627 bp, Proteus mirabilis
atgtattattccttagtaaggaaggcattgtttcggctagatcctgaacgtgcccatgattttacctttcgtcagttaaaacgcttatctcattccccatttcaatttcttattcaacaatcacttcctgccaaacccgtttcttgtatgggactttcatttaaaaatcctctcggtcttgccgccggccttgataaaaatggtgattgcattgatgcattaggggcaatggggtttggctttattgaagtgggtactgttacaccacgagcacaagtaggtaatgacaaaccgcgtctctttcgcttagtagaagctgaaggcttaattaatcgaatggggtttaataatttaggggttgataacctaatagagaatgtaaaacaatctcaatatggtggtgtgctgggtattaatatcggtaaaaataaagatacccccgtagagcaaggaaaagatgattacttaatctgtatggaaaaagtttacccttatgcaggttatattgcgattaacatctcttcacctaacacccccggcttacggacactccaatatggtgaagcattagacgatttattatctgcgattaaaaataaacaacttggattaattcttcatgagtaa

SEQ ID NO: 317443 - DNA, 417 bp, Proteus mirabilis
  misc_feature (339)..(348): n is a, c, g, or t
atgatgaaagctgttattcctgtcgctggattaggcacacgtatgttacctgcaactaaatccattccaaaagaaatgttaccgatagttgatcgtcctttaattcaatatattgttgaagagtgtgcacaagcgggtgttgaagaaattattttagtgacacattcatctaaaaactcaattgctgatcattttgataccagctttgaattagagaatatgttagagcaacgaataaaaaataaattattaaaagaagttcgctctatttgtcctgaaaatgtaaaaattatccaaattcgccaagggcaagcattaggattagggcatgccatttgnnnnnnnnnnccatttgttgtgctcaccctgtcattggtgataatccttttattgtattactccccgatgtgctattaa

SEQ ID NO: 317444 - DNA, 192 bp, Proteus mirabilis
atgttagaaaatattcgcattatccttgtcgaaacttcacatacaggcaatatgggctcgacagctcgtgctatgaaaaccatgggattaacgaatctttattttgttaatcctaaagaaaaacccgactctcactctatagccttatcagcaggggcaagcgatgttattggcaatgctcataattgttga

SEQ ID NO: 317445 - DNA, 567 bp, Proteus mirabilis
atgttattggcaatgctcataattgttgatactattgatgatgccattgaaggctgtgggttagtgattggaacaagtgcgcgtaatcgtacgctctcttggccaatgctagcacctcgtgaatgtggtgaacgttgcgtaaaagaggcagcaaataagcccgttgcggtgatctttggccgtgaacgcacaggcttaactaatgaagaattacaaaaatgtgattaccacctctatattcctaccaaccctgaatatggctctttaaacttagcgatggcggtgcaacttgtttgttatgaaattcgcatggctgcacttgctcaacaggaaaaacaagaggaaaatacttcatcagagattgattatccacccgctgaagatattgaacgcttttatgttcacttagagcaggtacttaatgagtctggttttattcgtcctaaacatccaggacaagtgatgagtcgtttacgccgtttgtttacacgcgcacgtccagaaacacaagagcttcatatcttacgtggtattttaacatccgttgaaaaatgggctaagaaataa

SEQ ID NO: 317446 - DNA, 669 bp, Proteus mirabilis
gtgctggctgattactcactacctacttcacgtagtgaggataacgacacaacgattaatagttggcgttcatggttgttaaaaaataaacaaagcacaccttggttctctttcttacaaatcaacggtgataagcatacatcagcttctcaagcacagttaaatagtcaattagagaccatttttactactttaaaagaaagcaacatacttgataataccgttgtggtcgtaacgtcaaattatcatcagaacaatgataaacaagatagccaatggcttgttaacaaagacacttttaacttaagccaatcgcaggttccactggtaatacattggcctaatgttacaccacaaaaactagataaactaaccagccaccaagatataatgacaacgctaatgcaacatgtattaggtgttattagccctgcagataactattctcaaggcgaagatctatttgctaatacgcgtaatcacccttggatttttactggtgataatgaaactctagtggtctttttacaagataatacgttaatgatagataaacatggcagatatgctttgtttgataaatcaggcaaagagatccaatccgccaaacctgatttacgcctattattgcaagtacttgctgagcaaaaacgatttattgagcgttag

SEQ ID NO: 317447 - DNA, 750 bp, Proteus mirabilis
gtgcagactcgtggatggttacttcagctagcaggacgcatagctaaccagtggggtcaaacagagcgtggggatgaattgcaacgagatgcttatgggaataatcgaaatctattacgccctagaattataccaccatatcgtcccttggcgactccaactgctcaagcaactgtgatctctcagcaattccaaagttatcgtatccgccgtggcttgctcaaaagattcgaagacgtggtgtcgcatctacatccaaattcaactgcaaatcaatttgagcaagccttggtagacttagcacaaatgattggactaacagctgagcgattcgatactggaggattaggacccgatgtactttggctacttcctcagaaaattggattcatcattgaagctaagagtcgaaaattaaagaaaaatgcgttgacaaaagaaaatcatggacagctcctagttgcgcaggaatggttcaatcaaaattaccctggctacgaggctgtgcgtatttcagttcatccaactaacaaagcaaccaagtcggccgcagctacagattcctatgcattaacgtacgaaacactgactgaactgattagcgacactaggactctgcttacaaaattgtgcgaatcacaactaactaacgctgagctagcagcagagtgtgcacgtgaacttggggtatcgtcagttcgcgcagacaaactaatccaaaattacttaatcaagtttgtggaagtataa

SEQ ID NO: 317448 - DNA, 357 bp, Proteus mirabilis
  misc_feature (330)..(339): n is a, c, g, or t
atgaaaaagatattaaataaaccagaaaattatgttgatgaaacattagctggcttatgccttgcacataatgatatttatcgtcaaccacaaccacgtttaattacgcgagctaacagctcagataaagctaaagtgggaattgttactggcggaggatcagggcaccttcccgttttcaccggatatgtaggtgaaggtttattagatgccgccgcagtcggtgatgtatttgcctcaccgtcagcagatctaatggctgatgcgatacgcgctgcggataatgggcagggggtattactgctctatggtaattatggtggcgatatnnnnnnnnnncgatattatgaattttga

SEQ ID NO: 317449 - DNA, 216 bp, Proteus mirabilis
  misc_feature (24)..(33): n is a, c, g, or t
atgttcacggaacacagtttcgtnnnnnnnnnnggtcataaacctgaaaaacatcgccaaggttggaaagatattgtcagagtggaagggcaaattagcgagatccttgtaaaatttgaccatttagcgacaaaggaacacccatttatggctcactgtcacttattagagcatgaagatacaggaatgatggcgggctttacggtgagtcgataa

SEQ ID NO: 317450 - DNA, 135 bp, Proteus mirabilis
atggcggtactggcggtaggtaaagtgccgtggacgcgttgggttaaatttgtattccctattttaatgatttgggtcgtgataggtatggctgcaattggtattgctaccgcaataagttatggaccagtgtag

SEQ ID NO: 317451 - DNA, 933 bp, Proteus mirabilis
atggatggattagtttttacctgtcaatttaaaggaattcctgaagaaacattcactgtgacagaatttcaactgactgagcatttatctgagttatttacactttctttaactgcggtaagttcattaccgtctatctgttttgatgatatgttggggtttgcttgttccttaacggttacgcgcaatggtaaacctattcgtactgtacgtgggctattagctagtgcggagcaacaaaatacagatggtaatcaaacgtggtatcactttattattcgacctgaaatttgggtcatgtctttagggcaaaacagtcgaatttttcgacaaataacggtgcctgacttacttcagcaattattatttgagtctcatattaaagcagattgcaaactctatgctgaggatgcttatcctaagcgtgattatataacacaaaagcgtgaatcagattatcagtttttttgccgtttagctgcagaagagggaataagcttttggtttgaagatgcaggaattgagccacggatgttttacagcgattctcacttaggtatgacggcagatattgacttaatctacaacccacaatatgaaacagatactaaagatcatactgcatatcattggcgttatagagagtcactgctttcagataaaattctttacaaagattataattctaaacgtccttcttatccccttgaaagtaaaatagaaggggaaatacacaatcagcatccattttatgaaagttatgggcgttttcagacgcaagatgatgcggatcgttataccaaaattcgaatggaagagatacaacaacaccgttgtgtcggcaatgcattaactaattgttttgctttgatgccaggaaaaattttttcgttatcttctcacccatgctcaaatatgaatctataccaatga

SEQ ID NO: 317452 - DNA, 1392 bp, Proteus mirabilis
atgaataaaaaaacgccaagttatagttcactcgatgatgtttatgcatcggttgatttatcacaatccttaccgaaaacacattttccgcaacaagagagccatcctcgtcatgtttttgatgctgtaagggatgagctgatgctagatggcaattcaagacaaaatctggccacattttgtcaaacctgggtagatgatgagatccgtgatttgatgaatttatctatcgataagaacatgatagataaagatgaatatccacaaacggcagaaattgaaaaccgttgtgttcatatgcttgctgatttatggcactcacccgatccactcaataccctaggttgttcaaccattggctcctctgaagcggcaatgctggggggacttgcattaaaatggcaatggcgtaaaaaacgtcttgctgctggaaaagcgacagataaacctaatcttatttgtgggccagttcaagtctgttggcataaatttgcccgttattttgacgttgaactcagagagatcccgcttgaaggtgatcgcttgatgatgagtcctgaagaggtcattaaacgtgttgatgaaaatactatcggtgtagtgccaacattaggggtgaccttcacctgtacttatgagccagtaaaagcggtacatgatgcactcgaccaactacaaaaagagaccggacttgatattcctattcatgtcgatggtgcgagtagtggctttttagcgcctttctgtgcacctgatttagaatgggatttccgtttgccgcgtgttaaatccattaactcatcaggccataagtttggtttagcgccattgggctctggttgggtagtatggcgtgaagctaaagacttaccggaagagcttatttttaatgtgaactaccttggcggtaatatgccaacctttgcgcttaatttctcacgtcccggtgggcaaattattgctcaatactataatttcttgcgtcttggtagagaagggtatgcgaagatccacaatgcctgttatcacaccgcgcaataccttgctcgagaaattgaaaagctagggccttttgaaatgatcttcagtggtgatagtcaaaaaggaatacctgcattagcgtggaaactgaaaaaagaggctaaggtaagctactccttatatgacatcgctgataaattgcgtagccgtggctggcaagtacccgcttattctatgcctgctgatcgccaagatttagttattcaacgtattcttgttcgtcatggtgtgagtttagatttggcgacattactgatagaagatatgaaacgtactctcgattatttcgaaaaacatcctgtcagcacacctttatctgaagaagacggcggtggctttaaccacagctaa

SEQ ID NO: 317453 - DNA, 1203 bp, Proteus mirabilis
gtgggctatgaacagtttattccaatgatgaaagattgttctccacttctacttgaactgaatgaaaacgatccggggatcttagttacacaatctgtacataaacaacaagcgggattctctcaaacctcacagatccacaaaaaagatcgccatattaaaggtcaaaaacgctatgtaaatcataaacgtctcaataacgcctttatgatgcatgcctcaactagtccattctacccattatttgcagctttggatgtgaatgccaaaatgcatgaaggtgagtcaggtaaacgtttatggatgaattgcgtaaaaacagggattgaaacccgtaaattactcctgcaatcctgtaaacatattcgcccgtttattccagaaactatcgatggccgtgcatgggaagattttgatactgatgaaattgccaatgatctccgattctttaattttgttccgggagagcgctggcactcatttgagggatatgaaaaaaatcaatactttgttgatccatgtaaattactactaaccaccccaggtattaatgccaaaacaggaaaatatgaatcatttggtgttcctgccaccattttggcgaactatctacgtgaaaataacattattcctgaaaaatgcgatcttaactccatattattcctgctaacacctgcagaaagcatggcgaaaatgcagcatctggtcgcacaaattgctcgctttgaacaattactggaacaagatgccccactgaaagaggtacttccatcagtatatcatgccaaccaaacacgttatcaaggatacaccatccgtcaattgtgccaagaaatgcatgatatgtatgtgaaatttaatgtaaaacaactgcaaaaagagatgttccgtaaatcacatttcccacaagtcagtatgttacctcaagaagccaatatcgcttttgtgcgtggcgaggtggagttagttgccgtggaaaaaattgaaggccgtatcgccgccgaaggtgctctaccttatccaccaggagtactgtgtgtagtgccaggggaaatttggggtggctctgtacagcaatattttctagcgctagaagaaggaattaatctattcccgggattctcaccggaattacaaggtgtatatatccgcaatgatgaggacggtcgtttgcgggcatatggctatgtaattaagcactaa

SEQ ID NO: 317454 - DNA, 210 bp, Proteus mirabilis
gtggcaatccattcaagagctgggcaacatactcgtcaaagcgatctgattaatgtagcgcaattaaccgcacaatattattcactaaaaccacaagcaaatcagaatgctcatcgtgtgaaatttggtacatcgggtcaccgaggcagtgccaaacgtcatagctttaatgaagcacatattctagcaattgctccatgcattatctga

SEQ ID NO: 317455 - DNA, 249 bp, Proteus mirabilis
atgcgtatttgttctttgttgctctgcaccactttcttagtatcatcaataacatcaagctacgcagaaataagcacacataaactgattcgccaagataatagcgaactgatttattatctagataaacaagctgaacataacaaaacactgttagttttaatgcaaggttctgactgtaatagcataaaaaataatacttttattcaagaaacctttggtagatggctaccgagtagtgtgccctaa

SEQ ID NO: 317456 - DNA, 1284 bp, Proteus mirabilis
gtggcacaaaaaatccaagccattcgtggtatgaatgactacctacctgctgatacgcgggtatggcagaaaatcgaaaatacgctaaaacaaattttagccggttatggttttagtgaaattagaacacctatcgtagagcatacccctctatttcagcgagcaattggtgaagtgaccgatgttgttgaaaaagaaatgtatacttttaccgatcgaggtgaagacgcacaaagcttaaccttacgtcctgaaaataccgcaggttgtgtccgcgcaggaattgaacatggtttactttataaccaagagcaacgcttatggtatttagggccaatgttccgttatgaacgccctcaaaaaggtcgttatcgccaatttcaccaattaggtgcagaagtatttggcctacaagggcctgatattgatgctgaactgattatgttaacggcacgctggtggaaggcgttaggtattgcagagcacgtgactttagaactgaactctattggttcactcgaagcgcgggcaaaataccgtgaagcattagtcgcatttttagagcaacacgttgatcaattagatgaagattgcaaacgtcgtatgtattctaacccattacgtgttttagactctaaaaatcctgaaattcagactttattgaatgatgcgcctgaacttttcgattatcttgatgacgaatcaagagaacactttgatggtttatgtgcattacttgatgctgtaggtattacttatcgtgttaatcagcgtttagtccgaggcttagattattataaccgtactgtttttgaatgggtaaccagtgcattaggttcacaaggaacggtatgtgcgggtggtcgctatgatggattagtgaaacaattaggtggacacccaacgcctgcggtcggttttgccatggggatggagcgcatgatcttattagttcaagcggttaatcctgagtttgttgctgatactcatgtcgctgatgtttaccttgcgtcttttggtgataatagccaaagtgcagcattaatgctggcagaagaaatccgtgatcaattacctacattgcgcttaatgaccaatcacggtaaaggcaattttaaaaagcaattaggacgtgctgataaacatggtgctaaaatcgcgttaattttaggtgaagatgaaattaacgctggcacagtagccgtgaaagatttacgttcaggtgaacagaccattgtatcgcgtagcgaactggcccaacaattgacgctgttattaggttaa

SEQ ID NO: 317457 - DNA, 891 bp, Proteus mirabilis
atggaagagcaaacagaagttactcagcccgttagagtgaaaaatgccactctacaacgcgggctaaccaatcgtcatatccaattaatcgctattggtggtgctatcggtactggtttatttatgggttctgggaaaaccatttcgctagctgggccatcgattatttttgtttacatgataatcggctttgtcctgttctttgttatgcgagcaatgggagagctattattatcaaatttagaatataaatcatttagcgattttgccggggatttattagggccttgggctggcttttttgttggatggagttattggttttgctgggttatcaccggtatcgctgatattgttgccattacctcctatattagttattgggcgcccaattttcctgaatggggaacgtcttttatttgtgtgctgacactacttattttgaatttagccacagtaaaattatttggggaaatggaattttggttttcgatgatcaaaattaccgctattgtctctttaattattgttggtatcgtattgattagcataaattttcaatctccagccgggcacacggcaactattgaaaatatctggaatgatggcggtatgttccctaaagggatcagcggattttttgctggttttcaaattgctatctttgcctttgtggggattgagctggtaggtacagcagcggctgaaacacgtgatcctgagaaatcattacctaaggcgattaacgctattcctattcgtattattactttttatgttttggcattggcgattattatgtcagtaacgccgtggcgttctattttggcagacaaaagcccgtttgtagaactctttgtcatgattggtattccagccttcagcaaatag

SEQ ID NO: 317458 - DNA, 369 bp, Proteus mirabilis
  misc_feature (322)..(331): n is a, c, g, or t
atgagaaaattattattagtggtgcttttggcctgtacttcattggttttaaccgcttgctcaccagatgaaggtgataaaccgttaaaagtggcaataaatacagggccagatcagcaaatttgggatgaagttgttaagctggcaaaagaaaagcagggattagatatcaaggtgatcacctttaatgactacgtattacctaatgaagctttgcgtaataatgatgttgatgtgaatgctttccaaaccgtaccctactatgaagctcaaagcaaagagcgtggttatcaatttgaaatcataggtaaaacgtttattnnnnnnnnnntcctattgcagcttattcaaataaaatcaaaaatatag

SEQ ID NO: 317459 - DNA, 675 bp, Proteus mirabilis
atgccactaattgtattaaaagggctcagaggtggagtaggaaccacctcaataaccgttgcactggctcgccaatttcatcaccataaatacaatgtcattgttatcgataactgtgtgaataatatcttacatttctattttccagaaaaatcacaagtcaccacattaggacaagcactactcgcgcataccccaatagaacaagcgatttgtgattatcaaaacggttatcagattttaccttttggagtcgttaattcagaagataaattgcatttgcaagcatctgccactgccaaccaacatctgcagcatttttttaccgcttttactcaacaatacccagacactttaatttttctcgatttacaaccagagcacgataccctttttaaatcatgggttgcgaaagccaatatcgtattaaccgttaccacacctgaaagtaactgtcatattcggcttaaccaacatacctttgctgccaatgagtatattctggtgaatcaattttgtgccactagccaaatccatcaagatttttatcaattttggcaaaccagtcagtttcctttctgcccaataaaacttcatcgcgatgaagttttattgggcagaaaggaaactgactggtttgccaaaattgataaaaatcttgatggatttggctag

SEQ ID NO: 317460 - DNA, 675 bp, Proteus mirabilis; identical to SEQ ID NO: 317459

SEQ ID NO: 317461 - DNA, 303 bp, Proteus mirabilis
gtgcgacattttgcagaaagatgtttaacacgttggggatgtcaattagcgaacaagctagaattaactgataaggagatatttgagcatcatactgatattaaaaatgatgcagataaatatattgctatgcgccgtaaaacttattccatatatgaaagtagcggtgatgatgaacgtaaagtttcattaggtaaagaggggaaagcattctctgatatatatggggcacaatatgagccttctatggcattaaccgcagactattttgcagatcctcaactctacgatgtgattaaataa

SEQ ID NO: 317462 - DNA, 231 bp, Proteus mirabilis
atgccatctttaacctttcaattgttttatcaaaacaaagcacctctctctttagcggttagtccatttcgtttaggtgaatttcctaatgtaagtacgggtattgcgacagtatcttcatcaacagaagcaatattccaatatcaatctctgtttgatacgttatgggcaaaagcaataaaaaatgatgatgccattacacgcttaaaagagattatcagtcattattga

SEQ ID NO: 317463 - DNA, 189 bp, Proteus mirabilis
atgagtactcatgatttgaatcattcttatctaaaagcagataagttatggtttatgttagagggaaaaataatcaactcaggtgactcagcacttttgttggatgaaaatttattatctactacatttaatactaagattagatgtaatagatcagcaaatagtgtaatttggcaagtaatagagtga

SEQ ID NO: 317464 - DNA, 531 bp, Proteus mirabilis
gtgatcgatgatgatggctaccgcccgaatgtggggattgtaatttgtaatcggcaagggcaagtgctttgggcccgtcgctatggacaacattcatggcaatttccccaagggggaattaatcctggagaatcaccagaacaagctatgtatcgtgagttgttcgaagaagttggattaagtcgtaaggatgttaaaatccttgcttccacgcgtaactggttacgttacaagttacctaagcgtttggtgcgttgggacacaaaacctgtttgtattggacaaaaacagcgttggttccttttgcagttaacaagtaacgacaaggagattaatgttcagcaaagcaaaacgccagagtttgatggttggcgttgggttagctattggtatcctgttcgccaagtcgtctcttttaaacgagatgtatatcgtcgcgtgatgaaagagttcgcaccggtagttatgccattacaagaacaaatgtctatgtctcgtccttcttatggatatcgccgtaaaaggtattag

SEQ ID NO: 317465 - DNA, 558 bp, Proteus mirabilis
atgcgcttaggaacgcagggtggtctgatgataaatcagtttggacaggaagctgtccttgccagccttttagcaatgcgggaaaagctaatggattctccgatgatagacacctttggccttacttctttcacctcattagcgaatgtcgacctagtgttatctttggtgagcaagttgcaaataaaggaggattatcctggtttgaccttgtacaagctgatttggaagctcaaaactacatctcagcagcgattgatttatgcgctgcgggcttcgggttaccgcatatcaggcaaagattgttttgggtgggttactccgaccgcgaggggatacagggattgcggaaatgtaagtcagtcatttttcagaaaagacggaaggatgaggaacgatacactttatcgccaactatggttgcacgtgttcggtctacatggaagcccacccaaggagcagataaaaaaactcgaatgttcccatctgactttggcaagagagctgatgggattaccaatcgagtgggaaaactgcgcgcctacggaaattcgatag

SEQ ID NO: 317466 - DNA, 243 bp, Proteus mirabilis
atgaacacaccaaaaccaatatttacaccagtattagatgccacttcaaatgatgtgattttaattgatggttgcattaactggaatcgtaacgatgagcgccaagtttgcaatgaccgttacgcgtcacgcttgcgtaagttgcaaaaatatgtgctacaggaaaaaccagattatgccgttatcagccagttaattgaaagcgaaattaaccacattgaaaatcaatctgctggtcattaa

SEQ ID NO: 317467 - DNA, 873 bp, Proteus mirabilis
atgaccagaattgttccaattatatcaacaaaaggcggagccggaaagtcaaccaaagccagcaatattgcgggtttttgtgctgatgcagggttaaaaaccctgttgatcgacggcgatcattcccagccgacagccagcagtctgtttaaacttgaatatgaagcaccaaacggcttgtttgagttgttaatgcaactgaccgatctttcccggccggataccatcatatcacgctccgttatccctaatctggatatcatcatttctaacgatccgcatgatcgtctccctgcggctatattgcatgcacctgacggcagaatgcgtctgcgtaatattctgcaacatccgttattcgcttcttacgatgttattatcattgattcaaaaggcgcggcttcggtgatgctggaaaccattttgttagctgccaccgattatgctgttgggataatcaaacctattttgccggatacgcgtgaatttttacggggaacactgggattaatcggcgggctggtgccgctgacggcttacggaattcccctgccggcaatacgtattcttgctaattgtgttgaagatacggtgttagatcgtgcaacactgactgaattaactcagattattgaccaaaaagcgtacccctttgcggagtcgatttctctttcgttactgaaaaccgctgttcccaaactggaaatatttaaaaatggtcatgcacagggacaaccggtgcatcgtctggaataccggactcagcgtaaaacaccggcagccgcagtcattatgcatcatcttgtttcagagctgtttccggaatggaaaacccgttttgatgatgtgctgaaacgggaggtgcgtccatga

SEQ ID NO: 317468 - DNA, 729 bp, Proteus mirabilis
atgatgatctctttgaaagtcatttctctgttattggattaccccagcgaagagctctggggccatcgtaatgagatcattgatgcattacaggaagctgacgagcttcctgtcacgcaagtcgcaaaattaatggcgtttattcgtgaactcacgcagcaagatctgctggatgcacaagcgaattacagtgagatttttgatcgaggtagggcgagatcgctattgttatttgaacatgtacatggtgaatcgcgtgatcgtggtcaggcaatggttgatctgcttaatcagtatcaacaagcggggatcaccttaagtagtcgcgagttgcctgattacttacctacttaccttgagtatttaacgctattacctacggatgaaagtattgaagggcttaataatattgcccctattttggcattgctgagtgagcgtttaaaacagcgaggcagtgattatcacgctctttttgatgtattgctttgtctctcacaaagtgagttagacgcttcacaactggcggctcaagtagagaaagagcctgtagatgatacaccgactgcattagatgccgtatgggaagaagagcaagtgacgtttctaggtgaaagtgcgcaatgtggtagtaacaaaatgagccagcatcagcggcgttttgcgcaagaaacgccagttcaatatctcaacgtcggtaattcgctggatatgggagcacaaaaatga

SEQ ID NO: 317469 - DNA, 1392 bp, Proteus mirabilis
atggcactttctcaacacccagaaaaaatgaaaaaaggggtgatcgaaaattggcatcctgaagataaagctttttgggaaaaaactggtcaaaaaatcgcatcgcgtaatttatggatttctgttccttgtctactgctatccttctgcgtctggatgctatttagtgcagtcgctgtcaatttaaataaggtcggctttaattttaccactgatcagctctttatgctgaccgctctaccttctgtttcaggtgcgctactacgtgtcccttactcttttgttattcctatttttggtggtcgtcgttggacggcaattagtactgtatttctgattattccttgtctctggctagggtttgccgtgcaagatctcacaacatcttattccacttttatcgttatctctctgctgtgtggttttgctggcgcaaacttcgcatcgagtatggcaaatatcagcttcttttttcctaaagcacaccaaggcggtgcattaggattaaatggcggactgggtaacttaggtgtcagcgtgatgcaattaatcgcgcctttggttgtcagtgtgggcgtttttgctatgtttagtggccccggtgtcgttcaacctgatggctcacgtttatggctagagaatgcggcgtggatttgggtacctttcttgcttatctttacctttgctgcttggtttggcatgaatgatctggctgctaataaagcttctttaagtcaacagctacctgttttaaaacgtggtcatctttggttactcagtatcctctatctgtgctcttttggttcttttatcggcttttctgccgggtttgcgatgttatcgaaaacccagttccccgatattgtcattttacattatgccttctttggtcctttacttggagcattagctcgccctgtgggaggtgcgctatctgataaatttggaggcattaaagtgacgcttatcaactttatcattatggctattttctcagtgctcctgttcttaaccctaccggaaaatggtgctggtggatcgtttattgctttctatggcgtgtttatggtgctgtttttaactgcggggctaggcagtggttcaacattccaaatgattgccgtggtatttagaaaaatcactattgatcgcatgaagacacaaggggcttcagatgaagctgcgcaaaaagaagccgtaacagaaagtgcagctgcattgggttttatctctgcaatcggtgcgattggtggcttctttattcctaaagcctttggtacatcccttgctatgacgggttcacctgctggggcaatgaaaatcttcgttctgttctatatcgcctgcgttctgatcacttggttggtctatggacgtaaacacaataaataa

SEQ ID NO: 317470 - DNA, 1830 bp, Proteus mirabilis
atgaaaatgcacaacattcaatggcattatcgcttttcaattattaatcaaatcgctattttaatgttgcttttcacactatttggtgtggtaggtatggctatttctaaccacattattttaagcgtacaaggcaatgcccacgccattaataaatccggctcactgcgcatgcaaagctatcgtttactctcagccttaccccttgatgataagctccgtgattatctacaagaattagaaaatgatttagatagcaaagagttacgtcaagtattaagcacctcatcactgcaatcacaatatgcacaactgactcattactggaaagagacattaaaaccgaccttattagcagccaaacagcgtaatgatgcgaaacaagaagttatcttttttgtttctcaactcgatacattagtatcaagtattgaccaacttactgaacaaaaaatccgtctagtcgcttatacccaacttatctttaccgcccttaccttattactgttatttggttctgtttggcattttcgtcgtcgcttattacttccttggcaacaattaatggccatggctaattctattggacatggtgatttttcaactcgttttcggcctcgtcctcaccatgatgaaattgctaccctagggattgcacttaacaccatgtcagaagagctatcgacgctttacagtgaattagaacaacgagtcattgaaaagacccatgatttacagcagaaaaataaggttctctcttatctttatcactcaagtcaacaactgcattcccaagcgccgctttgcgctcgcttaaggcagatccttgcagagctacagcatattattcctgatagctatttgcagatccgtctatatgaagataatcaacatacattatttaatgagataagcttagccccttcctcacgccctgaatattgtccaacgccagactgtgagcgctgcaatgaagatgccagcatcactacaccattaaataatcgcttattacattgggaattgaccgatcagatccaccgctatggtttattcgtgatgcagttaccggaagatagtgtacttactgacgaacaaaataatttaatgctcttattgactaagcaaatttccgcaatgcttgccatggagcaacaaaatgaacagcaacaacagctattattaatggatgagcgttcagcgattgcacgtgaattacatgactcgattgctcaatcgctatcatgtttaaaaatgcaggtcagttatctacaaatgcaatcggaaaccttgccagataactgtcaaaaactactaaaagagatgcaagaagagctaaatgtggcttatcgtcagttaagagaattactgaccacatttcgcttgaaattgacagagcctggcttattagccgcattagaaaatacaataaatgaatttaatcaacgtttagggtttgctatccattttgattatcagttacctgcaaaatgtgttaattcacatcaaagtattcatgtggtgcaaattgttcgtgaagcattaaataatattctgcaacatgcgaatgcaaactgggctgaagtcgcattaacacttaataatggcatcgttgaactgcaaattaatgataatggtgaaggtattacgcctaatcccgaaaagataaatcactacggactgattattatgcgtgaacgcgcgaatagtctgaatggctcttatagtataaaggttcgcaaagaaggtggaacgcaagtatttgtcacatttccgttaatcactacccataaagatcctatcgaaaagggagcaaatcataatgaataa

SEQ ID NO: 317471 - DNA, 663 bp, Proteus mirabilis
atgaataatatgggggcagtcgcagataaagcgacaattttattaattgatgatcacccgatgttacgtaatggtgtgaaacaacttttaagtcttgatacaacattaaccgtcgttggtgaagctggcgatggtattcaaggggtaaaattagctgaagagttagatcctgatttaatcctactcgatctcaatatgccgggtatgaatggttttgaaacactcgatcaactgcgattacgatcgctctctgggcggatcgttgtgtttagtgtatcaaactacagtgatgatctgatcaccgcattaaaacggggagcggatggctatctcttaaaagacatggagccagaagagctattagccgctttaaagcaagcagctgcagggaaaatggtggttagcccaacattaacccccattttagcgcagtcactgcgagaagatcgttctgaaggtgagcgggatatagaccaactcaccccacgagagcgcgatattttaaagctgatagcacaagggctatctaataaaatgatcgcacgtaaactcgatattactgaaagtacggttaaagtacatgtcaaacatctactaaaaaagatgaaattaaaatctcgtgttgaagtcgcggtttgggttcatcaacaacgtgtagattaa

SEQ ID NO: 317472 - DNA, 441 bp, Proteus mirabilis
atgcaaggtattaagcgaaaaattgtctatgttaccgcttatgaagtatttggttgggttatctcatcagtaggactggcactgttagccgatagttcaaccgctgttacgggaccactcgcacttattattaccactatcgcggtaagttggaattttatttataactgtttatttgaattttgggagagtcggcaaaagtcgagaattcgcacctttagacgtcgtcttgctcatgcggtgggttttcagcttacgttggtggtttaccttattccgctgatagcttggtggttaggggtttcattatggcaagcactggtgatggattttgcacttatcatcatcatcccttgctatacatttgtctataactgggtatttgacaaaatttttggcttaccaaaatcagcattacctgaagatgtacctgttgcttaa

SEQ ID NO: 317473 - DNA, 927 bp, Proteus mirabilis
atgaccaatttacgcacagtatcaaaacaccctgaacaattagaaaccacaccattaattgtggaaagtcatcactacgatgatcctttagcacctcaaaaactggtgtttttagaggcagttaatcaacagcgttgtgtgattaactcaccacagcgtaatagccaactcactaatacgatcccattttttatcatacttttagttatggcttgttatacgttgttcggatttgttgataatcatataggtaaaaaaatgtctattgagcaaatggctaaacatatagaagaaaaatatggtaatcaaagtaatttagaccctgaaacatttaagatgattgaatcatataagccattttttaataaagaaaaaattagctggtgggagtatataaaagcgtataactccggtgaattttttactgatggccaatatgaaaaatacctcgtcattggctggctaatttttttccccggttttttatggctatttggctacctctctttctttacgcctcctgtataccttattgctgataggcaaagaggaatactgtatagctatggcatgggaaaagtgcgtctaacccgctataaagaggcgcaatttggttatgcgggtaacatgttggcaattaaactctatggcattaatgaaaaaacaggccaattaaaaacgatcctctatcgccctaatgtgtcccattactccagtttcctaaccagtactgacagtgaaaaccaccgttttatcactttccttaatgcctatatgcaacaaggccgagatgccgtttcgcctattgattaccaagcccgtaagccctttttatcttttggtaaaaacccactgccggctgattttgagcaacaggtcgaacagattttagcaaagcttgatcaggagaaagaacgtcatgcgtaa

SEQ ID NO: 317474 - DNA, 594 bp, Proteus mirabilis
  misc_feature (505)..(525): n is a, c, g, or t
gtgtttttaataatccctttttcaagcgagagaaaaagccttcttttttcggtctctcttgctctacgggtttatcaactaatacctcttcgcgtaacgcggcaatatcttcggcttctgcttgtgcctgtgcaatacgcgctttttcttcagcttcggcttcttgacgtgcttgctctgcttctaactgtgcttggcgctgggcttcttcttcggctaaacgcgcctgctccgcacgctcagcagctaatcgttcttcctctgctctttgcgcttcttggcgtgctttttctgcttctagctgtacttgacgctgagcttcttcttcggctaaacgcgcctgctccgcacgttcagcagctaatcgttcttcctctgctctttgcgcttcttggcgtgccttttctgcttctagctgtgcttgacgctgggcttcttcttcagctaaacgcgcctgctccgcacgttcagcagctaatcgttcttcctctgctctttgcgcttnnnnnnnnnnnnnnnnnnnnngcagctaatcgttcttcctctgctctttgcgcttcttggcgtgccttttctgcttctaactgtgcttga

SEQ ID NO: 317475 - DNA, 1050 bp, Proteus mirabilis
gtgactaaacctctttatgagagctacctgcaagcaaaaaatgaaaaaaaagcatcttatgcgcgtgatttagcaacttaccttaatgtaagtgaagctgagcttactcacgcgcgtgttgggcacgatgcaaaacgcttacgtgatgatgttcgtgatattttaaccgctctcgccaccgtaggcgaagtgaaagccattactcgtaatgagattgcagttcatgaacatcttggtgaatataccaatgcacgttttaacgatcatgcaggcttgatcttaaaccctcgtgccctcgatctacgttttttcttctctcattgggcaagtatctttgcattaacagaagaaaccgctcgtggtattcgtcatagtattcaattctttgatattcatggcgactctctccataaggtatataccactgacaacaccgatatggatgcttggaataccttaatcgatacttatttatcaccagaaaatccacaattagagatcacccccgttaaaccttttactgatgccccagtaacaacggcgttagcacaacagttagaacagcagtggcgcgcaatgactgacgttcatcaattctttaaaattctgcaagaaaataatctcagtcgccagcaagcgttcaaagcggtcagtgatgacttggcttatcaagttgataacagtgccttaaaaacattattagcaaaggcgaaagaagtacaaaatgaaattatgattttcgtaggaaatcgtggttgcgtgcagatcttcactggtaagattgaccgtttagtgcctcatcaatttgaaaatagcgagcaagagtggattaacatttttaatcctgcttttacactgcatttaattgagagtgaaatcgctgaaagttggatcacgcgcaaaccaactcaagatggttttgtcacgagtcttgaactttttgatagcaaaggtcaacaaattgctcagctctatggacaacgcactgaggggacaaaagaacaacaacaatggcgtgagcaactcgatgctcttgctaaaatagcttaa

SEQ ID NO: 317476 - DNA, 267 bp, Proteus mirabilis
  misc_feature (187)..(196): n is a, c, g, or t
atgatattaagtttgaattcaattaactgtgataataatgaacttgttgatagaactgttttttttatctctgatggcaccgctattaccgcagaagtattaggccatgcagtactctcacaatttccattaaaaatgaaaagctataccttaccttttgtgtcttctgtagaaagagcagaagaannnnnnnnnngattaatgaaatttataaaaaaagtggcgctaagcctctggttttctactctattattagtcctgatgtaa

SEQ ID NO: 317477 - DNA, 567 bp, Proteus mirabilis
atgaaaataaaaaatcatatcagattactatctgcattattagttatctcttctagcatgaatgtattagcagatcatcgcaaaacagtagaaaagaaaaataccaatatcattcattttagtggaacagtaacatcaacatcctgcaatatagatagcgctagttctcctatcattttgcctgctattaataaagcggaaatagtctcagataaaaatttggccaatgccaaaagcagtactggtagtaattttgaaattaaactattagattgtggcaataataatgcaatattaacatttaatggtactgatttggctggtgataataaaattatcaagaataacaatagcacaaataatggtgctaaaggagtaggaattttcattcgtagtgatgaaaataataaaagtattattcttttaaatggtagccaaccaataaataagagaattgaaaataaatcagcagtttataaattccatgccaattacgcaagttatcttccaaatccaacatcaggtactgtcaatacatcagtaaatttcaccgttaaatattcttaa

SEQ ID NO: 317478 - DNA, 150 bp, Proteus mirabilis
atgcctgatatcgcagatgatgctaatgacttaacggatctacaaatcaacaccgcattagcaaacagagaacctgtaacagagaacagcgcttactgctctaaagagtgcggtgatgatcacgctcagtacaaaaggaaaaacggctaa

SEQ ID NO: 317479 - DNA, 300 bp, Proteus mirabilis
atgacattcgcttttatatctgaacgaacaacgccattgatagaaacattaaattgcgccgttcctatgtcaaaactattaaacttagctttatatacttgcttattggtatcaaaggtcgttgcgcctaatgtacccagctttggcgttgttaagttaatgctaacattatcatttttaactctgataggttttcctgcttcattaagtaaagtcagtgttaaatctgatggatcccctgatattatcgttgctggatccggcgttaatgttgcagaatcatacaattcattgatttga

SEQ ID NO: 317480 - DNA, 183 bp, Proteus mirabilis
gtgttacgttggcatttagatagtggcttggttgttattcctaaatcagttactccttctcgtattgaagagaacttccatatctttgattttaaattagaaaaagaagaagttgctgaaataaaacaactagataaaggaaagcgcttgggtcctgatcctgatacttttgttgatatctag

SEQ ID NO: 317481 - DNA, 354 bp, Proteus mirabilis
atgcctttgttgattggtgcgttacttatcggggtgatccgttttgttattctcagcttttttgattttctggtgcgaaaagtcggctgggcaggcttaaagttttttatttttatggcgttttgggtgtcgttgtatttaacgattatcgtgagtacgaccaattggatccaatcgttattgacgaatcaagccgtgttcggtgacgaagcgtggttaatggggattagtttattaccggctaatgcgtcattttgcatgatgacgacttcccttgcgtatacgttattttggattttatcgtttaagcgccaaatatcggcaaaatatagagactctacggacgggaaataa

SEQ ID NO: 317482 - DNA, 1017 bp, Proteus mirabilis
atggctattacattagtgacggggtctgtgggggcaggaaaagggctatattgttcgatgttagcgtgtcaagcctatcgtaacggtcggcgtgttgcgtcaaattatccgttagacatggaaaaattatcacctcatggcactgaacccttatcggttattcctaagcaatttacctacgatgatttgaagaatttagggcgagggtgtcctgaagatgaatttgaaaacttggggattttattattagatgaaatttccctttttttgaatgcacggacgtttaaagacgctgaacggcttaaatttttagattggtttgtgcattcgcgtaaatacggttggaatgtttactgtcaagtgcaagcctcctttatgctcgataaacaaattgttgatggtgtgtcagaatttattatcgaattatcccgtttagacagtttacgcttgccgtttatggaatttgtttttccgaaagagtttggggtaatggcaaaacggaaaagcctattaccgcatattgtcaaatatcgttgctatctactgaaagaaaaagggcgcagaacaccgatagaaaaggggagttttcgggcaaaagactattttggtgtgcatgatacgttatccacgtttggaagtgatgctgattgccaaggggcatacagtttattacctgccaaacagttaaaagcgatgtctcaagcccctattttaccgccgtcattgcctgttacgccaacgatgcaatccactgaaatccctgatagtcaacccgtaccgttatcgtcaacattgcggttaattggtcatattaaaaccaaaggaaaaatgcaattgatagtcaaagatatgtcgtcggggctcgtgcgttacattccttatacggcatccgatccgcgtcaacgtattgaatccttggaaattgagggggaaaaagtcactttttattcaggtatcaccgtcaaagataaatcgctgacgcttccgtccgccacatcgtcacccttaccgttttaa

SEQ ID NO: 317483 - DNA, 1326 bp, Proteus mirabilis
atgacaaaacgagaaaagcaaaaattttatatttttgatttgggtcgttttcgcccacggcaggtgctgagagcgttaaaggcacattttatgagtctcatttttacgctgtccttatctatttcattgccaacgcaggctaaaggcactgagtttgaggttaaaaaattggcgttacctgatgcaatatcgttgatttgggattctgtttttaatgccccgtatatgcttgcgcctgaactggttaatgactcgcgtttgctctcgctaaaattgatgccagaacaagacgaacgggaatttattttgcggtatttatcgaatatgaatatcagcgtgagccgtaaaaagggcgttgattatatttatacggtgacacctgatttacctaaagagcaattaatttcatacacttatacgccacgttatcgctctgtagactatctttatcaagcgctgtcggtctttttttctgcaccgcttccaaccagtcaacgtcaacaaacggctcaaggtggacaggtttttattcccgttcagcctatcacgcgttatttaagcccaaacggtgatacgttattatttcgcggtacggcgtcagaagtagctcagcttaagcaattgcttgttgatttagatgtgcgagcggaacaagtggaaatcatggcgtatgtgtttgaagttcagacacaagaaaagaacgggtcaggcatggcattagcggctaatttactctctaatcgttttaaattagggattgggacagccagcggttacagtaattttctgcaattttcgggcggttcgttagatgtactgtatgagctgtttagccaagatagccgttttaatgtcgtcagttcgccacatttgcgggtgtcgtcagggaatcaagggcgttttagtgtcggttctgatgtgcctgttttatcctcggtgacatacaaagataattcgcctgtacaatcggttgaatatcggagtagcggtgtcatttttacggtaaaaccgttgatcacccgtgaagttatcgcgcttgatgtgaatcaacaattgagcaattttgccaagacagaaacgggtgtcaataattcaccgaccttgatcaagcgtgaaattgcgaccaatgtcaatctgcaagatggcgatattattgtgctgggcggactggcggaaaataaagacagcgaagcgaacacgggattttcatttttgcctgatatgttcaaatcgaagtcagacgaaaaaagtaaaacggacattttaatcgcgctccaggttaaaaaggttcagccgatacaaaaccgattgttaactcaaccctag

SEQ ID NO: 317484 - DNA, 1245 bp, Proteus mirabilis
atgaaatatttattattattgagctatttattgtgttctcaaatttatgcgaaaggggttgaatttgagttaaatcgtgttgaattgcccgaagcgattaacctgatttataaccatgtttttacgcaaccttttatgttgtctcctgatttagccgaagataaacgggtattgtcgtttaaaattacgcaagacgtggacgaaaaagcgtttattaaacgttattttgagaatatgaatattcgtatcttgaccaaaaacggcgttgattatattacgccagtgaagccggttacggtggcaccaaaacaggaagttttcacttattcgccccgttttcgctcggttgaatatctgaccgatgttttacgcacctttgtcgatgggtcattttctgctactggaggaaaaggattaggcgagggatttacaccgcaacaaattaaaccgaataccgcatctgatgcgtttaatcgttctggtgatattcttgttttttatggaacgaaagaaaacattgcacgtattaagcaggtgttaccgcaattggacacgaaaacagatgaggtttttgtctcggcttacgtgtttgaagtgcaaaccgcagagcataacggctcaggattggcattagctgccaagttgttgagtggtaaagttcagatagccacggggtcaatgacgggctcttttgataattatattcgggtgacgggatcacgtatcgatgcactttatgagatatttagtcaggatagccgttttcatgtggtgagttcgccacggttacgggtgcaatcaggcaataaagcgcagttttcggttggttcagaagtaccgatattaggcggaatacaattagataataatggcggaaagtatcagtctattagctataaaaattcaggcgttatttttgatatacaaccgcaagtacgcggtgacgtgacggatttaacggttaatcagcaattgagtacctttgttaaaaccgatacgggggtgaatgattcaccaacgttattaaaacgggaagtctcaaccacggtgggtgtgcgttctggggatatcatcgttttaggcgggttagcggaaacgaaaaatagcgaggctgaaacggggttaacgtttttaccgaaatcatggcgatcatcgagtgatgaaaaaacgaaaaccgatattcttattttcttacagcttgatgtagagaaagataaatcattttctattagccaatcatattaa

SEQ ID NO: 317485 - DNA, 1485 bp, Proteus mirabilis
atggctctaaattcgccaatgctaattacctttacgatctatatattggggatgctttttatcggctatctagcgtatcgatcaacaaaaaattttgatgattatattttagggggccgaaggcttggtagcgtagtaacggccctttctgcgggcgcttctgatatgagtggctggctattaatgggattaccgggagtggttttttttgcggggatctcagaaagttggattgccattggtttatgtctaggtgcatggcttaactggcgtttagttgcaggacgtttacgtttacaaacagaaaaaaataataatgcactgacgttaccagactatttaacttctcgctttgatgataaaagcaaaatgctacgcattatttctgcattggttattcttattttcttcactatttattgtgcatcaggtgttgtcgcaggtggcatgctttttgagtctacttttggcattccttatcatgaagcgatgatttatggtgcactagcaaccattgcatatactttcctaggtggttttttggcagtaagctggacggatacggtacaagccacattaatgattttcgcacttattctgacaccaattattgttattttctcaattggcggaattgacacctctatagagatcattaaagcgaaagatccggcttatcttgatatgtttaaagggcttgattttattgctattgtttcattattagcttggggattaggttattttggacagcctcatattctcgcgcgttttatggctgcagattcaaatcaaactattcgtaaagcgcgtcgtattggtatgacttggatgatcctctgtttaggaggaacggtggcggtgggcttctttggtattgcttattttgaagttaatccgaccgttgcaggtccggttatggctaaaaatgaacgtatctttatggaattagcctcgttactttttaacccgtgggtcgctggtattttgttatctgcaattttagctgcggtaatgagtacattaagctgccaattattagtctgtgccagtgcattaactgaagatttatataagccttttattcgtaaaaatgccagtcaaaaagagttagtttgggttggtcgtggcatggtgttattagttgcggttattgctatttatttagcccgtgatccagaaaataaagtacttgatttggtgagtaatgcttgggcaggatttggtgctgcatttggcccggtgatccttatctctgtcacttggaaacgaatgactcgtaacggtgcttttgcgggaatgttaattggtgcattaacggtactggtatggatgcaatataaatggttcggtctttatgaaattattccgggctttatttttgcgtctatcgccattgttattgtcagtttaatgggtaaagcaccaacggcagaaaatcaacaacgctttgatgaagcagaagcggaatatcgtaacacttaa

SEQ ID NO: 317486 - DNA, 3969 bp, Proteus mirabilis
atgagtagcacaacaatgggtgttagacttgatgaagaaacccgtaatagattaaaagatgctgcacaaaaattagatagaacatctcattggctaattaaacaagccatcttcaattatcttgaacaaattgaaaatgatcagctccccctaacccctatcacacaggctgagcaagatattgaagaaagcaccgtccccctaacggcacattatcaaccgtttttagaatttgcagagcagatccacccacaatcggtattacgctcggcaattacttctgcttatcgtatacctgaaacacaagcggtgcctatgctactacagcaggcaacgctacctgagcatgaggctcaagccacgcataaactggcttactccattgcagaaaaattacgcaaacaaaaacagggcgttggacgctctggtctggtacaaggcttactgcaagaattttctctctcttcccaagagggggttgctttaatgtgtttagccgaagctttattacgtattcctgataaagcaacccgtgatgccctgatccgagataaaattagtcatggcaattggcgctcacatttagggcaaagccaatctatgtttgtcaatgccgccacttggggtctactgtttacgggcaaactcgtctctacccataacgaagagaaattatctaattctctaaatcgcattttaactaaaagcggtgaacctttagttcgtaaaggcgttgatatggcgatgcgtttaatgggagaacaatttgtcactggtgaaactatctcccaagcgttagctaatgcacgcaaactcgaggaaaaaggctttagatattcctatgatatgctaggagaagcagccttaacagaaaaagatgcacaagactatttagtctcttatcaacaagccatccatgccattggtaaagcatccaatgggcgaggtatttatgaaggaccggggatctccattaagctttctgcgttgcatcctcgttatagccgagctcaatatgatagagtgatgtcggagctttaccctcgcctactctctttaacgctacaagccaagcaatatgatattggtattaatattgatgcagaagaagcagatagactggaaatatcactcgatttattagaaaaactctgctttgagcctgaattagcgggttggaatggtataggatttgtgattcaagcctatcagaaacgttgtcctttagtgattgattatattattgatttagctcgccgcagtcgtcgccgtttaatgatccgtttagtgaaaggggcttattgggatagtgaaattaaacgcgcgcaaatggatggactggaagattatcctgtttatacccgtaaagtgtataccgatgtctcttaccttgcgtgtgcgaaaaaactgctcgcttcaccgaattatatttatccgcaatttgctacgcataatgcccatactttatcagccatttatcatctagcgggtcaaaattactaccctggtcaatatgaattccaatgcttacacggtatgggggaacctctctatgcacaagttgtgggtaaaattgctgatggtaagcttggtcgcccttgtcgtatctatgcgccagtaggtacccatgaaaccctactggcttaccttgtgcgtcgattattggaaaatggtgcaaatacctcatttgtaaatcgtatcgctgacacgactatctccttagatgagttggttgctgatccggttaaagagatcaataaaattgcgcaggctgaaggacaaattggactttcacatcctaaaattccgctcccaatgcagctttatggtgatgagcgtaaaaactccccgggtattgatatgtctaatgagcatcgtttagcctcattatctagtgcattactcacttctgcgatggaaaaaattcacagtcatccccttcttggtgatgagtgtaattgtgcagaagaagtggttgcaccacaatctatacttaatccggcaaatcacactgatgtcgtcggtacagtacgtgaaacaacggctgccgaagctaatcttgctttagatattgcccaagaaaatggtgaaatttggtttgcaaccccaccagcagaaagagcggcattcttaatccgcacagctgaactgatggaacagcaaatgggtccattgatgggtgtcttagtaagagaagcgggtaaaacttatagtaatgctattgcagaagtacgcgaagcgattgattttctgtattactactctgcgcaagtagcaaatgattttgataataatacccatcgtcctttaggcccagtggtctgtattagtccttggaacttcccattagccatctttagtggacaaattgctgcggcgttagcggcaggtaatactgtactggcgaaacctgcagaacaaaccccacttattgcttttaaagccgtagaactgttttatcaagcaggtatacctcgcagtgcattgcaattattaccgggtcaaggcgaaaccattggtgcacaattagtggctgatgaacgcgtgcgtggtgtaatgtttacaggctctaccgaagttgctcatattctgcaaaaaaccttagcgggtagactagatagcgaaggtcgccctgttcctttaattgctgaaacaggcggcttaaacgccatgattgtcgactcttcagctttaacagaacaagtggtcactgatgtgatggcctctgcctatgatagtgcgggtcaacgttgttctgctttgcgtattctctgtattcaagaagaagtggctgatagcacgattgaaatgttaaaaggggcaatggctcaagccataatgggtgacccaagtctcttatcaacagatatcggtcctgtgattgataaagaagcaaaagcgggcattgaaaaacatattcaaactatgcgcacagcgggttttgacgtttatcaagcgacctataatcaacttgctaaacaggctgaaaataatagcacttttgttcctcctactttaattgagttagataaaattagctcacttaaaaaagagatttttggtcctgtactgcacgtcgtacgttattcaagccaagatctacctgctttattagatgaaattaatgcgacgggatatggattaacgatgggggttcatacgcgcattgatgaaactatcgcttatgtcgcgacccatgccaaagtggggaatttatatgtaaatcgcaatatggttggtgctgttgtcggagtacaaccttttggtggtgaaggtttatcgggtacggggccaaaagcgggaggccctgcttatctgtatcgtttattatcaaaacggcctgaaaatgccataacacaaaccttagcacgtcaagatgaaacattaccccttgatgcttctatgcgacaaaagttattacaaacctatcatcactatatgacgtggttagcaaataaaacggaacctgcacattatcaggcgctagaagagtacgctaatgcatcacaagccggaacattgcgcgtattaccggggcctactggcgagcgtaatacctatcaattagtcccttgtggcaaggtgctttgtctctcagataatgagcaagatatatttactcaattagcgggagtctttgcatcaggatgccatgctattgtccataatgctgttttctcacaaaaaacctatcgtgaattgcctgatatgatcagaaactcaatcacactcaccgataactggcaagatgagtcactaagcattaatgccgttatttatcatggtgatagtgatcagttaaaagaaacttgccagcaaattgcacaacgtaaaggcgctatcatttcagtacaaggcttctcacgtggtgagacagcattgttattagaacgtttattgcatgaacgagcattaagcgtcaataccgctgctgccggaggtaatgccagcttaatgacgattagttaa

SEQ ID NO: 317487 - DNA, 339 bp, Proteus mirabilis
atgaaaaatttaactacatctgatcctttagaagaattaaagcgtaaagctaacaactttatttcaattgaagaaaccttgcagattatttgctctaaacttgactgctcaaggaagattgctgctgagattgttttatcgaaactacctgatgaatatgattatgataataatccaattaacccatcattttttggtaaaaaattgggtgttgctaccttttcgtattgtgataatcgtccgtcaatccgcagtatgctactaagtattcttgaggatgataaatatgcctttgaagaagaggtaccgcctatagattttagcgatataccgttttga

SEQ ID NO: 317488 - DNA, 441 bp, Proteus mirabilis
atgagtaattttttagacttatatcaatatcgcgctaattctccagagggcttttctgcaacaaaaaccgcaggcgggcactttgtgcaatctattgctcaaattccaacacctgaagatattgtgaaagcgaaagagaagaatcaaaaagcagaaacaaaatattatcttgtgctcgctcagcctgttgagaataaaaaaatgcaaaccatagatacggttaacgagcgttttaaatgtacagagcaggaatatcgttattttcaagatcctaaattaagacaaaatttatatggtcaacctgtttatctctcgtttaatgatggttcttggggtaacgataaatcgaacggggtttggtatgagtatgtcccgaattcattaattcgttatgacggaaaaccgcttgataccccgttattagactcaaaaactaaataa

SEQ ID NO: 317489 - DNA, 219 bp, Proteus mirabilis
  misc_feature (174)..(183): n is a, c, g, or t
atgatggattttataatacaactagccattatattagtttgtttattttatggagcaaggaaggggggaattgcattaggtttattaggcggagttgggctggttattttagtctttatttttaatttacctccgggtaaaccgcctgtcgatgtaatgttagtgattattgcnnnnnnnnnnatcgggtggattagatgttatgttgcaaatagctga

SEQ ID NO: 317490 - DNA, 1068 bp, Proteus mirabilis; identical to SEQ ID NO: 314831

SEQ ID NO: 317491 - DNA, 1083 bp, Proteus mirabilis
atgtcaacagatgaagcaaataacacaccaaaacctcgtttaatattaggtgagcaagttttaccccattcttctggaatgatgatctcagcagcagaacaacgtgctcgcatacaaagacatgtcgaacttcttgatatgttagaacaaggattgctgaaaacgggtttagtttttacttgccaagtagccggattagctgacgatacttttcaagtcactcaatttgatttaaacgaaggactttctgagttattcacactctctattcaagtcgtgagtactcaaagtgatattgatttttcacattatttgggaggggcatcatcacttacagtgagaagaaacggtaaaaaaattcgtacggtacaaggtctattatccagtgcagagcaaagtaatactgatggtattaaaacttggtatcaattagagatccgtcctgaaatgtgggtgatgacacttaatcaagatagccgcatttttcagcataaaacagtacctgaaatcttaaaacaattacttgatgaagcacatatcaaatatgataacaggttctaccaacctgaacttcatcaagcacgtcattatgttactcaaaaacgtgaatctgcttatgatttttggtgtcgtttagctttcgaagagggaattaacttttggtttgaggaaggcccgaagcttttttacagcgataatcatttaggaatgactgcggggatcactttaacttataacccacagtctgaaacagatattaccgacagcactgcaacgaaatggcgttatacagaacgtttatgcagtgatgtccgtatagataaagactataaccaaatacgtccttcctaccccttatcgcaacaaacaacggggaaaaatcatcaacagcaccctatattcgaaagttatggtcggtttcaagaagatgcacaaggccagccatttaatcaactgcgttatgaacaatctcaaaaccatcgtcaaacgggttatgcacaaactaattgttttgctctgatgcctggtaagatatttaccttaactaatcatccgtgtacaagaatgaatgttggcaagtag

SEQ ID NO: 317492 - DNA, 477 bp, Proteus mirabilis
  misc_feature (26)..(35): n is a, c, g, or t
atgagcacttcagttctatttcactnnnnnnnnnntcaagcgatgagtaagaaagttaatttgaccaggaatgcgacagattatcaggtttattctaatgcaagtgccggctatatccctggagaaggggcagggatgttatttcttgaagataaagagtatgccaagcaacgaggcgctaaaatttatgctgaaattattggctacggtaaagcgaatgataatacttttttagaagacgaaaatattactgatagagtgaccgccttatgtaaggctatccaacaagcattatctgaggcgcaactcagttgccaagatattgatctgatttgtggtaccagtgatggtaataaagagaatgatgaagttgaaatccgtgctattcggcaactattttatcaagctgcaaatcatgtaccggtagttaattacaatgccttttttggtttaagttatccatatgatggaaagtaa

SEQ ID NO: 317493 - DNA, 1950 bp, Proteus mirabilis
  misc_feature (1926)..(1935): n is a, c, g, or t
atgaatagtagacgccgtcgggttgtaataaccggaatgggggttttatcatctttagctaaagatgtacctcaatttaaacaggttctttttaatagacaatgtaatattaagccaagccaacgttatttaaaatggtttaaaaatgccaatgcatctgagattgagatggcattagattattcagatataccgcagcatatcgctcgatcattagataatgcagcattatgggcatatcgcgtctgcaatgaggcattacaacaagcaaacttaatagataatcagtctattttagaccataccgcgatgatcgtgggcgtctcttcagcaggaacggaagcctttctgccattatttgaacagcatattgatgatttttcgattaaaaaagccattttatccggtggattttcgtcatgctgttcgagtgtatcaagtctacttggcttacgtggcggtcttgaattagtggcgacggcctgtaccgcaagccctaacgctataggtatggggtatgattatatccaaaatggcaaaaatcccgttgtgttagctgtcggaacagaacccatttatcttcctacctttgcgggtttttatgctcttaatgtgatgaaaacaacaccaacttccccattttcaggtactccgggtatgtctattggtgaaggcgctggggcgttagtattggaagatcatcaacatgctgttgaacgtggcgcgacaatatatggtgaaattgtctcttacgcgacatcttgcgatgcttaccatgaaactagccctgatcctcgaggaaatggtgcggtgcaagtgatgtataaagcactagataatgcgggtattactcctaatgatattgattatatcaatgtacatggtacaggtactgaagcaaatgatcgcattgaaaccatgtcgatgaaaaaagtgtttcctaatatttatcatatcccattaagttcaacaaaatcttatgttggccataatattggtgctgcgggtattgttgaaatcatcgcgtgttttatttgtctagctgaagacaaacttccccccacattaaatttcactcagccaaggcatagctgtgatttaaattatgtaccgaatttctttcaaaataaaaaagtaaaattgtttatgaaaaataattatgcttttggaggaaataactgctctattatcgcaagtccttatattacagataaaacaccgacggaatataaagctaaaaaagtcgttatcacgggagtaggggcaatcacatctattggtaataatgtaatggaaataatcacagcgatttcggcaggagataaaacaggtacattaaaacctatcgtatttgcgagtgatgtgcagaaagatatcgacaacttgatgtcagttgtcataaaagataatgattttgagcaatcgttaggacatccttattttgaccgcgccattgatcatcgcttaaagaataacgcctattatcatgctatcactgacgttaatccgaaaaaaacattacgttattatgatccaagaaaagccattcctagtgggacttatgccttattcgctttaaatgaagctcttgctaatgctggacgcaaaattaaacgcgatggtgataacttaggttttattgttggaatgtcaaaagggccacaaagtaccgttaatcgttatttacaaagtttaattcctgatccgcaaaaagtaagaacgtcagaatttcctggtactttaatgaatgcggtaccgacattttgtgccatcacagagggaataaaaggttacaccacgacattggcgacaggggttaatgctgcattaggggcgttaacttatggttatgaaattatcaggcaagatctacaacctcaggtaattgtcggaggggcagatgagcacttcagttctatttcactnnnnnnnnnntcaagcgatgagtaa

SEQ ID NO: 317494 - DNA, 150 bp, Proteus mirabilis
atgaaaaaagtccgttttactgaaactcaaatcgttaatattttgaagctcgctgattctggtatgaaagtggacgatatttgtcgccaaaatgggattagtaatgccacctattatatctatggactacctccgttttgcaagtattga

SEQ ID NO: 317495 - DNA, 1455 bp, Proteus mirabilis
  misc_feature (1410)..(1419): n is a, c, g, or t
atgctaagagatgtgggtaaaacgcttcttcaaacagcgatttacttgcgtagtaattccttatcagtaatcgatagaaaaaaattggaaacgctctatttattaggcactcgttatatccttgagcaaggtttcacacgggggagtggttatcaagttattactcacgtaggttatcaaacaagagagctttttgatgcatggtttattggtcgccatattctagcaaaacacaatctgttagcgccgacacaacaagccatgatgtggtataacgcaacaggacgaatttttgaaaaagatcatgaaatcgttgatgcaaatgtcgatattctcaatacccaattacaatggatgataaaaagtttattgatgttgccagattatcaacagcgccaacaagccttaacacaattgcaaggttggctaaataaaaccattcttagctctaaaggtgtcgctggtggctttaaatctgatggcgctatttttcaccattcacaacattatccggcttatgccaaagatgcatttggtggcttagcacctagtgtttatgccttaagtcattcgcctttccgcctttcttctccagcacatcagcgtttaaaagatgtattgctaaaaatgcgtatctatagcaaagaaacacaaattcctctggtattaagtggtagacatcctacaggatcacataaaataagtattgctccctttaaatggatggcacttgcaggtacgcctgatggcaaacaagatctagatacgacattagcagccgcttatgcaaaattagcaaacaaagatagctttgaaggtattaaagcagaaaatgaaccgataggtgcatgggcaatgaattatgcttcaatggcaatccaacgtagagcttcaataacagcgccacagcaaagctggcttgctatcgctcgcggttttagtcgttatttagtgggtaatgaaagttatgagaataacaatctttatggtcgttacttgcaatatgggcaacttgaaattatccctgctgatttaactaaatctggttttagtcatgctggttgggattggaatcgatacccaggtacgactacgatccaccttccttatgatgaactagaagcaaaactaagccaattgccaagtgcaggtatagaagaaatgttgctttcaacggaacgttattctggtgctaatacactaaataataacagtatgtttgccatgaaattacatggtcacagtaaatatcaacaacaaagtttaacagcgaataaatcctatttcttatttgataatagagtgatcgcattaggctctggtattgaaaataacgataaacaacatacaacagaaacgacgctgttccagtttgctgttcctaagttacaatcagtaataattaatggnnnnnnnnnnagtgaaccaactcggtactcaattaaccttaaataa

SEQ ID NO: 317496 - DNA, 711 bp, Proteus mirabilis
  misc_feature (5)..(14): n is a, c, g, or t
atggnnnnnnnnnnagtgaaccaactcggtactcaattaaccttaaataatgccgatacattaattgatcccgcgggtaatttgtataaactagctaaagggcaaacggtagaatttagttatcaaaaacaatactctgttgatgatagaaattcacagcaaacagaacaattgtttgcaacagccgttatctctcacggtaaagcccctaaaaatgcaagttatgaatatgcaatagccatagaaacacaagataataaagcgcctgaatacaccgtattgcaacataataatcaacttcatgcagtaaaagataaaatcacgcaagaagagggatacgctttttttaatgccactgaagtcaattcacctcaagccttattattatcaagtgattcacccactatggtaatggctaaaaaacaaaaacaacaattaacgctaagtattgttaatcctgatttaaatttatatcagggtattgaagctgaccaaattgataataagggtaaccaggttgaagtgagtgtttattctcgccaatggcttacagccgatcctcaaccaataagtagtacagttaccataaaagggatttggaaattagccacaccacaattaggtgttaatattagatatcaaaataataatacgttaattacaacaacgactatacaagcaacaccaacaaaggttgatttaattaagtag

SEQ ID NO: 317497 - DNA, 576 bp, Proteus mirabilis
atgtcaacaattatgtttccaaccccacccccgataattagacagcatctgaacaatgcaatcttttattataagactttgtatgaaagtcgttattcgtcattaattaatgtggataaatttaattattttaatgcattattaaatgctaatgttgatggcttatgttatgcaaaagaaaaaggtttagatgaagctcgaatcgcactattacgttggaaaggacatgaggaagcttttatctatactttactttttaatgagttagatagtgaaaaagagtttgatagtttttggttgatgataaaagaactaggatttaatgctgttattggttcgttggaggcactgctccgtgttgagataaacgctagaactgcacaattagcgctgctgaaagaacgagagcctgagatgttcattgtcgctttattaaaaataaaagcacatcatcaggagctaatccatcatgataaattattatattatttaaatcttccctcaaaagaaattaaaatcgcattatgttattatgtaaaaaaaaatgaagctaataagcttttccgaaaatattag

SEQ ID NO: 317498 - DNA, 618 bp, Proteus mirabilis
atgaagaactacttgtctgatatatttaagaagtataatggtaaatgttcggagctgaatatctggttagaaaataatacagcagatcaattatggggaatgggagtgatgcctgcttattcgttagaaccatatagctgtgaattacaaggaaatcaaccgggtagaatgctttcaggaaaatttttatccccatcagttaataagcaaaagtattttttagatgttaatggcgatattattggggaggtacgttatgctaagtatcttgacaagaaaaaggaatggatagtatataggaagttctatttaaaaagagaaaatgagatcattggattgatttttggaagttctttagagaagcatgatgatgctagtttaagtaatgtagtgttggtaaaattagaaagtggaaaggtggttagttcatttttttattcgtatgacgacaagttttcagaaaaaaaatatctttataaagataataaaatcataaatatagaacagcgtatgtggctagatacttatatcgaacattattttaccatcgaaacttcccctatactgataattaatgagaagatagataatggaatcattaggatatatcccaattaa

SEQ ID NO: 317499 - DNA, 177 bp, Proteus mirabilis
atggatatacgaatttcatttttttatcttttattttttattattccaattatagtttataacataaaatgcttgattttttttaataaagaggaatggttaatagtttggttaattattccctttattgctgtctttattccttttttcttaattcgtcaaaaatctaaatattga

SEQ ID NO: 317500 - DNA, 333 bp, Proteus mirabilis; identical to SEQ ID NO: 314869

SEQ ID NO: 317501 - DNA, 555 bp, Proteus mirabilis
  misc_feature (530)..(539): n is a, c, g, or t
ttgagacaaatcctatctcgcctgtctttataccggttggattatttagaaaaaacaagagacatattaagagatttatatcaaggattagttccaggaaaacttcgtcaaagcttgggggagttttatactccagattggttggtcgactttacagtagataaaatatctaatgaaggaatagtcagtaaaaaaatattagacccaacttgtggttcaggatcattccttcttgccattttacgaaaaaaaagagcactggctgaggagcaaagtctaaactataaagatacactaaaaatgctttgtgatactgtttggggattcgatttaaatcctcttgcggttcagactgctagagtaaactttttgattgaaatagcagacttgttagaaaaatgcccaggcactgaagtcgaagtgccaatattattagctgatgccatatattcaccagcatcctcaccagaaaacgatgatgatattgtcgaatataatattggaagtcaagtagcaaaacttaatattcnnnnnnnnnnttctattaccatctaa

SEQ ID NO: 317502 - DNA, 177 bp, Proteus mirabilis
atgatcggtgcgaaggcatgttatttaaaactgattgcgcaacctaaacaaggaaatagtgacttattgctcgcgttagcgggtgctattgttggctgtcatcgctctgtgttaccgagtcaattaaaaatggaattgttaaattggtataaagagttatctgttaaatcctattaa

SEQ ID NO: 317503 - DNA, 1047 bp, Proteus mirabilis
atgaaagacgaatatcaaaagttatatgatgaatataattgggtttttttttcctctaaaaaatatcctgctcaatattgtgtagagcctaaagataggggatctgataaatattatccgttaacgttagatccgttaattacgccaccgatacaattatcaataacacactctcaaacgtcattacctgttaaggttggaaaaaatataaaacctttaccagcttattctcaaggtatttattttattccatcagtaacatataactgcacttatttacatgagcaatataatttagacaaagaactcattgtctcggaaattttgaattatgtttatcattcaccagaactatcccaagttattaaattatatcccgaaaaaaattacgttgattataatgcggtacaacctgacaaaaaagaaaaacgcttagaatggttaccgccgattcaggcatcacctgagttaatggatatttataaacagcgtgatttatcacctgcaaaattagcagaactttataaccaactctggcaacaagctgcttctcgtcctagttataaagggataccgtataatccttctcgtgttgctacggcgcaaatggttagcgatattcgtgacgttcgtaacctagatttgacggtggcgggtattttagcacaacctatcaatagcgcagggacaaaagaatgggatattccgatctataatgcgattacaaatacctatgtttctatggtgaccgtgcaacagaatgcagaaattgattggggcgaatatcctgatttacctttgccaccgttagatgcaatacttgatttatcgcctattttaaattcctttaaatggttatttgctattgatattaaatcgcgtaaagctgattgtcctatatttcctattaatattgattatcttgattaccatgatgtttattcatctcattgtgttgttttggacgataaccaagaaactattaatttattctttacattaatgtggggaatgttggggatatttattacatttaggcgtaaatag

SEQ ID NO: 317504 - DNA, 939 bp, Proteus mirabilis
atgaaaccattgaagccatttgaagatgcttcaaatcatacatctattgccatatttgaaaaaatctctacttctcctaaataccctataccatattttgtttggaccccaaaaaagggatataaaaagacaattcctgcaactaattcaattcaaaacattatggcaacactaaattctagtagaaatgaggcatttcctgttgctgatgaaggctcaccatgggcaattctcccacctgggcgattctccgctataaagcacctctccaagacatgtgagtggactaaaggccgtaaagggattactactgatttaaatggtgtttactttatatctgtaatacagagtaacggtgagctagtccaaattgaaagtagacctgaagcaggtaaaaaggatatagggcccaaacgagctttatgggttgaacctgatttactataccccttaattaaaggtgctggcgacttcgaagcctgttatctaaagataacaggaccaacatacaacaaagataaactttacacatttgttcctaatacaggtatatcgaataatgactaccaacttgctgagaataatcttttttctccaagattaaagagaactctgtcttggtttagaaattttgaaaatgtgttacttaagagatcaacatatagacgtcaaatgaaaggagcgcctttccatgctatatataatattggagattatacgtttaagccttggaaagttatctggcctgaaatgtcatcatcattttatgcagctgtagcaggttcagctgatgttccaattattggtgaaagagtctttatacctgaccataaagtttattatgcttcttttgacgacaaaaacactgcgtattatttatactgtcaaagaatggatagaaagccacaacatatctattcaggtcgcggatgtatttaa

SEQ ID NO: 317505 - DNA, 468 bp, Proteus mirabilis
  misc_feature (434)..(443): n is a, c, g, or t
atgtattatggttttgatatgggcggcacaaaaattgagctcgccgtttttgataaaaatcttactcaaatatggcaaaaacgtgtaccaacgccaaagaatgattatcaagctctattaaatgtttttaaaacactcactttagaagctgatagtgatttaggctgtaaaggaaaaataggtatcggtattccaggcatagtcaacgcaaaagaaggaactgtatttaccactaacgtgcctgttgccaaatataaaccgatgatccacgatctggctaatattcttgaacgtcctgtcaaggttgagaatgatgctaactgttttgccttatcagaagcatgggatcctgaatttcgtcattatccttcagtactgggtttgatattaggtacaggtgttggcggtggttttgtcattgatggcaaagtacnnnnnnnnnnagcaagtactaatatgcggaaataa

SEQ ID NO: 317506 - DNA, 543 bp, Proteus mirabilis
atgaactatgagttttgtttttcttcagttgctagaaaatttattaatggagacaaaggattcggagatgtagaaaaaagattaagttgtagaaaatattatttacaaacagatcgtaatgatagagatttcgatattaagtatggagcctattctttttctggttatgttaatgtagaaacagtgggggtttttggtttatatgatggttattttgcccatgctaaactaaaagggcctaattgtttgaaaaagactaagtcgagattaggtgcatcaatatatggatattcagggatacaactagaggatgggtattatgcaatgtttgaaggttgtcctttttttagttattgtccaaaagactcaaaaggttgtataacgaatagtgtcggttattatcagggggatttttatgctttacctttttcagatgaaactctatcattatttaaagataaaaatgatgcactagtgtatttgccaggaaaaactatagattataataaaagatacgatagtttcaggccaaaaattatatga

SEQ ID NO: 317507 - DNA, 555 bp, Proteus mirabilis
atgaaaaaatcattattttcactattaattctatctacactttctttatcaacacaagctattgcacaagaggttaaaattggtggtacgcacaatataaatgtcacaggcagggtcattcaagaggctctaacttgtaacgttcaacctgttgcgccaattcaattacctgatgcttatgttagttctattgatagggcttctgcgacaacttttagtataggtttttctggctgtactaatcaaaatgtacctagagaagtctcagtagttattgcaccaaaaaccactccttatttagtgaatgctagttcgacagtaaatgataccaatgctcaagtagcattattagataataatggttactttattccacttgatgatgatgatagcgatttctatcgtacatattattcgacagttgtcggtgatagaactagcataagtttttcattagcatatgtggaaccagaatcgcttgatgatgctattaccccaggtgttttctcttctaccttatcttttgatgctttcgtcactgatgaagtctactaa

SEQ ID NO: 317508 - DNA, 171 bp, Proteus mirabilis
atgatagaggcaggaaatacaaaaacaaaaagcttagaaagtattctcgttcatttaagggaaaatcgcagttggcaggtacttaaaatgaacgcacaagttgatgagctgattaagtttgcaataaatcataacattcctttagtcaatgataatattgaaataaaataa

SEQ ID NO: 317509 - DNA, 273 bp, Proteus mirabilis
  misc_feature (254)..(263): n is a, c, g, or t
atgcagaattctcaaggggttaactctgttgatatcgcagtgactattttagagtttttagcatctcaaggaggtgctgcacgctcttctgagatagctaaggcatgctcactatcaaaaagtcgtctacataaatatttagtgtctctttgccgtagtgacatgctctatcaagagagtgaaggagggcagtattgtttaggtagcaaaattataatgctggctgaggcaacacacacaaacctctctttagnnnnnnnnnnctttagttga

SEQ ID NO: 317510 - DNA, 201 bp, Proteus mirabilis
atgaagaataattatgcttttggaggaaataactgctctattatcgcaagcccttatattacagataaaacaccgacggaatataaagctaaaaaagtggttattaccggagtgggggcgattacatctattggcaataatgtaatggagataataacagcgatttcggcaggagataaaacctatcgtatttgcgagtga

SEQ ID NO: 317511 - DNA, 1176 bp, Proteus mirabilis
atgtctgttgtcataaaagataatgattttgagcaatcgttaggacatccttattttgatctcgacattgatcatcgcttaaaaaataacgcctgttatcatgctatcactgacgttaatccgaaaaaaacattacgttattatgatccaagaaaagctattcctagcgggacttatgccttattcgctttaaatgaagcacttgctaatgctggacgcaaaattaaacgtgatggtgataacttaggttttattgttggaatgtcaaaagggccacaaagtaccgttaatcgttatttacaaagtttaattcctgatccgcaaaaagtaagaacatcagaatttcctggtactttaatgaatgcagtaccgacattttgtgccatcacagagggaataaaaggttataccacgacattggcaacaggggttaatgctgcattaggagcgttaacttatggttatgaaattatcaggcaagatctacaacctcaggtaattgtcggaggggcagatgagcacttcagttctatttcactctattttcaagcgatgagtaagaaagttaatctgaccaagaatgcgacagattatcaggtttattctaatgcaagtgccggctatatccccggagaaggggcagggatgttatttcttgaagataaagagtatgccaagcaacgaggcgctaaaatttatgctgaaattattggctacggtaaagcgaatgataatacttttttagtagacgaaaatattactgatagagtggccgccttatgtaaggctatccaacaagcattatctgaggcgcaactcagttgccaagatattgatattatctgtggtaccagtgatggtaataaagagaatgatgaagttgaaatccgtgcgattcggcaactattttatcaagcggcaaatcatgtaccagtagttaattacaatgccttttttggtttagttgaatcatgcgctgggatattggcgatctctttagtgattcatatgatgcaaagcaacacgataatacctattccttatacaaaaagttttatagctgatgatattcattttgttacccaaccgattaataagcagatagaaactgctttagttcttggttcatcagaaggatgtaaccactatgcaattatcatcaggaaaccgttatga

SEQ ID NO: 317512 - DNA, 711 bp, Proteus mirabilis
gtgccggttgataacacattggcttttgatttaaccgccatgcagaaaaaagcacaagcatttgatggtattagcatggtatatctgtgcaatcctaataacccaaccgcaatgctgacaccaacagcggcattaacaaattggatcacctcagcaaaagaaaatgtcttttttattattgatgaagcttacgctgaatttgtgacaacacctgaatttaccagtgcgatagcattagttgctcaaggttataaaaacttgattgttacccgtacattttcaaaaatttatgcattagctggattaagggtaggctatggtgtggcagcccctgaggtaattagtgaagtagatagtttcgtttctattgataataccaatactgccggtgctgttagcgcattagcctcgttaaaagatcacgcttttgtggcatatagtcgcaagtcaattgatgtatcacgacaaatggtggttgatactttaaacgccttaaatatcgagtatgcaccttctcacgccaactttatttttcataaagtcaaaggtgatgtgaaaacttatcaagagagaatgaaagcggcaaatattatggtaggacgtgagtttcctcccgcattaggttggagccgtttgaccttaggaacccctgaggagatgagttattttgtcgcgacattaaaagaatttagaactaaaggatggatataa

SEQ ID NO: 317513 - DNA, 462 bp, Proteus mirabilis
  misc_feature (441)..(450): n is a, c, g, or t
atgaatcgtcgttcatttttaacatcatcaagcttagtgatcgggggactttcattaagttcgtttgttagcgctgcctatgccgcagaaacttcaaaccctaaacagctatttaatgcagaaaatcctttactgttaaactttaatgaaaactcgctaggcatgtcatccaatgccaaacaggcgattattgatgcacttccccatgcttttcgctatccagatgatgcgcgaagcgcactgatcagtgcattaggtgaagaatttaagctatcagacaaacacatcactctaggtaatggctcctctgaaaccatacaagcagccgtacaatatgtggctaataaagcgcaaaaagcaggtaaaacagtacaactgattgtgcctgatccaacgtttaattatgccgaactttatgctgaacctttaggtgttaatatnnnnnnnnnnacagacctttag

SEQ ID NO: 317514 - DNA, 213 bp, Proteus mirabilis
atgttttttacttttgaagaaaaatttgaaagatatgccagtgatataaagaaattatcagaagtatcagctaaatatcttcttaaagatgattattgtaaacaaggctataggagtgaaatagcagaagtagtgaggttaattcgagctgatttctatcgggccatatataatcacagagaaagatataatctgtctcttatacacatctga

SEQ ID NO: 317515 - DNA, 744 bp, Proteus mirabilis
  misc_feature (714)..(723): n is a, c, g, or t
ttggcgcataataatctagatcgcgaatttgctcagtggtttattgtagatggcccaggtagcggtaatttgcaagaagatgatttatgggttgaaagccctaattattcagatttaaaaggctctttatttggcagtggatgggaagaaaatgttgaacatgcactgtgcttaatgaaaggcaactttgactggcaacgtgaaaagttaacagaacaacaatataatcaactgaaaaaagcgggtattcccattgaagatgttgaagtgaccggctcttttttatggcgtaaatataattatggtgaccgctatgtcactcaacaacaacttcagcaacaaattattcgtacctttcgcaaagatggcatcattcccacccaagtgaatttaattggttggagccgtggtggcatcacctgtcatatgcttgccaatgccatgttaaaagatcccctattaaaagatattccagtcaatatttttgctattgacccagttccagggccacttaatttccaaccagaaaaggtgacactaggtagcaatgttaaggaatatgtcggattttatgccattgatgaacgctcaaaaggatttgcttgcgttattccaacagtgactgctgagacgaaaatgcatattttcccgctttctggacgccatgcgaccttagtaggcaatgccgcgattgatggtagtgaaggtaaaaannnnnnnnnncactattttcaccggggttaa

SEQ ID NO: 317516 - DNA, 303 bp, Proteus mirabilis; identical to SEQ ID NO: 317365

SEQ ID NO: 317517 - DNA, 399 bp, Proteus mirabilis
atgaaacaacccaactggacgcttaaattacctgaaactataagggcggccatgagtcgccctttttcatggggtgaatttgattgttgtatttttgcctctgaatgtattgacgcacaatgcggtttctctccaataaagccttatctcaatcactataaaaccaaaggcgaagccttcaacctgctcaaatctaaatttggcacattagagaaagccgtatcacgctatttcaaatccattgagattgagcgcgttcagcgtggcgacctcgtactgtttaaaggtgaggacggtgacagtttagccgtggtctgggtggggcattattggggcgtaaccccacaaggcgtgaagccggtgcagattaacccaatcaaagcgtggagagtggaataa

SEQ ID NO: 317518 - DNA, 411 bp, Proteus mirabilis
atgttgtatgatgcgcttgagtcaacacctaaacgttcggtacttatcaatctttcatcaaaaaaagtttatgtagggctcattaatggtttaactgaaccaaatgaaaaagaaggccctaataagtttatttccatattccccataatgtcaggatatagaaacaaagataccttgttagttgaatttactaatatttacccttcaactaaagaggttcgttctggaagaacagtgaaaaccaaaagaattattaaaaataaacttgatataatcttgtcaacagaagatataacacatatttcttggtttgattttgatgtttttaaagaagttaatgattcaattaataatgataaaaaagattctatgcccaaaatgctacctcgtaggggtagaaacaaaaaatag

SEQ ID NO: 317519 - DNA, 1155 bp, Proteus mirabilis
atgaacaactggctggtgaagactgggcaaacctccagaagctatgacgccaatggcaacctgacgaagcagggggcggataccttcacctatgacagccagaaccggctggtggccgcaacggtcgctggagtgacagcagcttacacctacaaccatctggatcagcgtgtaactaagaccctaaacggccagacccgcctactgatttacggcttggcaggaaacctcatcgaggagctggacgcagccactggagacgtgctggcggagtatatctggctcgatggcacccccttgagctttgctcagtcaggacagacctatcaagtccacgtcgatcatctgggcaccccgaaggcgctaaccgacgccagcggccaagtggtttggaaggcgagctacagcccgttcggtaaggccagcatcaccactcaggggccgaccttcaatttgcggttcccaggacagtattacgacgcggagaccgggctccactacaactggcggcgttactacgacccgaataccgggcgttacatcaccagtgacccgattgggctggctggtgggattaacacctatgcctatgcgctgagcaacccgataggcaatgcagatccaacaggggagtttgtgccgcttcttctgggggcttatgttgccatagactttgccttgagcgcttgggacgcctatgacaccttcaagaccatcaccagtgattgtgcgacctcaagagaaaagtggatttccggggggctttttgctgctgggattatcctgcctggcaactataaggcgctagggaatgttgcggaacgcgcttttaaaaatacggctgatgattttgtagacctagccagttcccagagacgtaagcatattcttgatggtgacgccactggtggagggcatcgagcaggaacaggcaagcctggaaaaagtgagtttcctcaaagttggtctgatgaaaaaattatgcacgtcatttccgatatagctaccgatccaaatgtttctcgaaaggctgggcgcggtggtaggactattgcagaggcagttaaagaaggtattaatgttcgtgtaatacaagaatctaatggtgatattgtttcaggttttccaacaaacgtaccaaggaatccaaaatga

SEQ ID NO: 317520 - DNA, 156 bp, Proteus mirabilis
atggttggggcagaggtgctatcagaagccattcagtcatctccaaatgacttggagcttggcgttggccgctatcacgcctgggaagacgaaatccgagccagaaactatggtagccgagtcttggctatctatcgcaaccttcgtgatttgtga

SEQ ID NO: 317521 - DNA, 213 bp, Proteus mirabilis; identical to SEQ ID NO: 56089

SEQ ID NO: 317522 - DNA, 429 bp, Proteus mirabilis; identical to SEQ ID NO: 34939

SEQ ID NO: 317523 - DNA, 564 bp, Proteus mirabilis; identical to SEQ ID NO: 56091

SEQ ID NO: 317524 - DNA, 570 bp, Proteus mirabilis; identical to SEQ ID NO: 34936

SEQ ID NO: 317525 - DNA, 546 bp, Proteus mirabilis; identical to SEQ ID NO: 34935

SEQ ID NO: 317526 - DNA, 939 bp, Proteus mirabilis; identical to SEQ ID NO: 34934

SEQ ID NO: 317527 - DNA, 198 bp, Proteus mirabilis; identical to SEQ ID NO: 34933

SEQ ID NO: 317528 - DNA, 363 bp, Proteus mirabilis; identical to SEQ ID NO: 34930

SEQ ID NO: 317529 - DNA, 1245 bp, Proteus mirabilis; identical to SEQ ID NO: 56095

SEQ ID NO: 317530 - DNA, 450 bp, Proteus mirabilis; identical to SEQ ID NO: 34925

SEQ ID NO: 317531 - DNA, 558 bp, Proteus mirabilis
atgaattatcaaattgtgaatattgcggaatgcagcaattatcagttagaagcagcaaatatactaacagaagcgttcaatgatcttggtaacaattcatggccagatatgacgagtgcaacaaaagaagtaaaagaatgtattgagagtccaaacctttgtttcggtctgctaataaataactccttagttggctggataggcttaaggccaatgtacaaggaaacctgggaattgcatccattggttgtcagaccagattatcaaaataaaggtattggcaagatcctgcttaaggaattagaaaacagagctagagagcaaggtattattggaatcgctttaggaacagatgatgaatactatagaacaagtctctctttaataactataacagaagataatatatttgattcaataaaaaatattaaaaatattaataaacatccatatgagttttatcagaagaatggttattatattgttggaataattccaaatgccaatggtaaaaacaaaccagatatttggatgtggaaaagtttaatcaaagagtaa

SEQ ID NO: 317532 - DNA, 426 bp, Proteus mirabilis; identical to SEQ ID NO: 167603

SEQ ID NO: 317533 - DNA, 912 bp, Proteus mirabilis
atgtgtataagagacagacattatggggtaaatgactttcctattattcttcaagataaacgccttgataactttggaactccacaatacgacaaagaagccgcgacagagggcttttatggtgacacattattagtgaatggctgtgaagatccctatattgaagtatcaagaggttggattcgtttacgcttagttaatgcctcgaatgctcgacgttatgagttatcggcgaatgatggtcgctcactctatctgatagcctctgatcaaggtttgttaacatcaccggtagaattgaaatctattcctatggcaccgggtgagcgacgtgaaattcttattgatctatcagaaggcgaagaagtgactatcactgctgggcaaagtgccgggtttatggatagattacgtggtatttttgaaccttctaacttattgcgcaataccaatgtgctaaccatcaagcctactggactgatgtcactggttaccgataaagttccacaacagttggtggtggatgacacacaaattaccacctcaattcaaccgagaacgatccaattacaaaacagtcctcctggtattaataatgctcgttgggagttatcaaggatcgatcttgtcggtaaacaaaatggctgggaacgttggttagtgacagtggaaacaccacaaccttttcatattgaaggtgcacgttttaaagtgattaatcatgatgggcaaaaaccagcgcctgctgattttggttggaaagatacagtgtggatcgaaaaacagagtgaattattagttgagctaaaacagccttcttattcccatttcccttttgtttattatagccaaatactcgaaaatgctgataaagggattgcggggcaaatggaaatcacgccatcagaataa

SEQ ID NO: 317534 - DNA, 261 bp, Proteus mirabilis; identical to SEQ ID NO: 299232

SEQ ID NO: 317535 - DNA, 390 bp, Proteus mirabilis
atgcgctttataaagctattacctgctattttagctgttattttagcgggttgtgtgacacaagcacctgaagttaaacaaccattaaaaccgcaagcaaaattagttgaaggcgtatcttgtattttacctgatgcacctactgccaattatgactatattgcgacaaatgatcgttatggtcaaaatagtaaagcatcaacagattactttaaattagccattaattactcaccggctttttgtgattataaaaaaaataatattaagcgtttaaataacgataacgaaaaagagcgtgctaaacgcgaattcgataaatttgaaatccagtgtttctcagataataaatttggctggattgttcatgggctatgggctgaaacctga

SEQ ID NO: 317536 - DNA, 282 bp, Proteus mirabilis
atgctgtggtttaaaaatattttggtctatcgcttaaataaagagatagcgctgtcaatggatgagttagaacaacagctggcttcattagcattcaccccttgtagtagccaagatatgaccaaaacgggttgggtttcacctatgggtgatcgtggcgaagcacttatccatgttgcaggtaaacaagtcatgatgtgcgcacggaaagaagataagctcctccccgccaccgtcattaagcaagcgctacaagataaagtgaacaaggtcgtaaattaa

SEQ ID NO: 317537 - DNA, 294 bp, Proteus mirabilis
atgaaagtctatctcgacgacgagcgcataacgccagatggatttgtgcgtgtttactggcccgatgaagccattaaattacttgaaactgacgaggttgagttaattagcctagaccatgatttaggtgatgatgagcgcggcacaggatacgatgttttattatggatagaggaacaggtttatttaaatggatttaaagcacctgaaattattgttcactcttctaattcatcagcgcgtcataaaatggaattagcaattgcaaatattaaaaggtggagtgatggataa

SEQ ID NO: 317538 - DNA, 2973 bp, Proteus mirabilis
atgtcggggaggcgtttagcgttaggaaaaattgcccttggacagaaagtgttctatcaagatgaaggctttaccgtctatcgcacgacaaacaatcttttccttgttgaatcggcggaaggtgattatcaacttttcgaagccaacccacataaaatcaatacactgcgtttaatgaaaagtgctgatcgtcataataacgctttacactaccgctatgctaatgacggtgaattggtacaaattcatgatgatgcgtatctgaccgatatccggttacattatgatgaaatcacccaacgcttacagtcggtgacccgccaccaaggacaagaagaaaaaacgctggtcacttatacttatgatgcacaacagcgtttagtgcaagtcactaatgcggataagcgagtgactcgtcgttttggctgggatgatgaatcgggtttaatggccatgcaccaatatgccacaggggtcagtagtcattatcgttggcaacgttttgatgcctttaccattgaagacaatgaacctgagtggcgagtggttgagcactggcttaaagacggtaaacgctgtttagagcataccgaactgacctatgatttagctcaacgaaccctcaccaccgtggaaacggggggcgaaaccaccttccgtcgctggaatgaacaacagcaaattatcgaatacaccaatgcattgaatgaaacgtggtggtttgaatgggataccagccgcttattaacgaaagcaatagccccagatggcagtgaatgggggtatacctatgatgagcgcggtaatttaacccaatcgaccgatccggaacaacaatcgacttgctatgattgggacaaagattttgcgtttccctcggcacaaactttgccaaatggggcggcttggcattgggagtacaatgagcacggcgatattcgtcgtgtgattgacccgcttggccatatcacgcgcttggcgtgggatgaccaaggcttgtgtctggggcaagtggatgctaagggtaatgaaacccactatcgctataatgcccgcggtcagttaatcgagcaacgggactgttcgggttatcccaccaccttgacctacgatgattggggacaactgcgctcgttgaccaatgcacagaatgaaaccacgacttacacctttagtgaagcggggttgttgttaacagagtgcttaccggatgggacagaaaaccgttatgactatgatgccaccgggcaattagtgggaataacggatgccggagagcgccatattctgttgcgccgtaaccgtcgtggacaagtaatagcccgatgcgatccggcagggcattggttgcattttcactatgatactttcgggcgtatgcaggcgctggagaatgaacagggcgagcagtaccgctttgagtatgatgccttgcatcgtttaaccgatgaacatgatcttatcggacaacaaaagcactatcagtacgatgtgatggggaatgtcacccaaataaaaactaccccggggccttgcgttgatacgccgatacccttatccccgctggtgaccaccttcggttacgataaagtgggacggttgctgtttcgagaaaacgccgattatcgcacggaatacctttatcaacctttgagtgtgacgttacgccgagtccccatggcgatatggcatgaagccgaacgcaccggcaccaccgcccgcgtagagtatcaagacgccctgacctttacctacgataaagtggggcagttggttcgagaagccagcgcccgcggtgattatcagcatcactatgatgtgctgggtaatatcactcgcaccgagttgccccatcaacgggcatttgaatacctgtattacggctctgggcatttacaacaaacgcaatggcgagataatgcgcaactgacggtattggcggaatatcaacgagaccgtttacaccgagaaacgttacgcaccagtggcgccttagacaatgaaacgggctatgattgtcggggacgtattacgcaccaagtggcgcgccaaatgaatgcctcacagtttgtgaccccggtgattgaccgtcgttatcgttgggataaacgcaatcaacttatcgagcgcagtgtcagttatggtcaaacgggcgaggtttttaccgccggacattggtactaccacagttatcagtacgacccactggggcagttgacggcgcatttagggtcggtgcaaaccgaacactttctgtatgatgcagcagccaatttactgactcgtccgcacaccgaagcaccgcataaccaagtacaaggcagtgataaatttgattatcgctacgacggttttggtcgcatggtctcccgctatgaaaaaggcagtagctcgggacaacgttatcactatgacagtgaccaccgcattatcgcggtggatatcgaccaagggcccttagggtatcagcgagcggaataccgctacgatatcttagggcgccggattgaaaaacggttatggaaagccagtgcgattgccaatacggtgacctatcaccaacatgagccggatgaagtgtacacctttggctgggtagggatgcgactggtgtctgagcacagcagcgcagcgccccataccacggtttatcatgcttacaatgaccaaagttatacccctctagcccgcattgaatgcacggataacccgcttaatccgcaacgggcgatttattatacgcacagtagtttaagtggcttaccggaagcgttgaccaacagtgagggtgaaatagtttggcaagggcaatacagtgtttggggacatttacagcgtcaaacccgccccacaagcacgtttaatcgtgaacagaacctgcgttttcaagggcagtatttcgacaaagacaaatttgtcgggaacaaatttgaacagcgcttgcgctggcccgtagggcgagtatcaggatga

SEQ ID NO: 317539 - DNA, 2241 bp, Proteus mirabilis
atggttgcagttagaagtgctcacttaacacctgcaggggagtttgccgttgataaatgggttaatagcttgaatttaactcatgcgaatgcggggagtgaaatcatgcaaacctgggaatactgtcatcgtactgttcagggccgtgaagatgcgcaactgttgctatggcgcggtgttgagatggttgaacttctttcgacactcagtatggataaagatagcatgagggcagcacttctcttcccacttgctgaagaagatcttattaaccaggaagttatcactgaacattttggtgaggcgatatggaatttagtgcgtggcgtaatggagatggatgctattcgccagcttaaagcgacacataccaacgaaactagctcagtacaagtcgataatgtacgccgtatgttattgtctatggtggaagattttcgttgtgtagttatcaaactcgcagagcgaattgcccatttacgtgaagtgaaagatgccactgaggatgaacgagtcttagcggcaaaagagtgttttaatatctatgcaccattagccaatcgattggggattggacaattaaaatgggagcttgaagatttctgtttccgttatcttcatcctgatgaatataagcaaattgcaaatttactgcatgaacgccgtattgatcgcgaacagtatattgataatttcgtcagtacggtgcgtggttatatgcagcaagagaatattgaagtcgatatctacggacgtcccaagcacatctatagtatttggcgaaaaatgaagaaaaaaaatctcgcctttgatgagctatttgatgttcgtgcggtacgtattgttgtcgaacgcctacaagattgttatgccgctttaggtattgtacatactcattttcgtcatttacccgatgaatttgatgattatgttgccaatccaaaaccaaatggttaccaatctattcatacggtagtacttggccctgaaggtaaaaccgttgagatccaaatacgtactcgtcagatgcatgaagatgctgaattaggtgttgcagcgcattggaaatataaagaaggtgctactggtgcaacaaccaaaggcgggacgggaagttatgaaaatcgtattgcgtggttacgtaaattaattgcatggcaagaagagatggctgattctggtgaaatgctagatgaagtacgtagtcaagtatttgatgatcgcgtctatgtctttacgccaaaaggggatgtgattgatttacctgcaggctcgacaccattagattttgcttatcatatacatagtgatgttggtcatcgctgtattggtgctaaaatcggcgggcgcatcgttccatttagctatcagctacaaatgggcgatcaaattgaaattattactcaaaaacaccctaatccaagtcgagattggctaaatcctaatcttggttatgtgacaaccagtcgtggaagagcgaagatccacaattggttccgtaaacaagatcgcgataaaaatattattgcaggccgccaaatcttagataatgaattagcgccgcttgatatcaatatgaaagaagcagaaaagctgctgattgctcgttataacgtccatagtcttgatgaagtgctggcaggcataggcgttggtgatatccgtatcaatcaattagtcaatttcttacaaagtaagctgaataaagccacagcggaagatgaagacaaagaggcgttacgctcattagaaaataaaacggctgcaccaaaaacaaccacgtcaggtggtggcagtattgtggtcgagggtgtcgggaacttaatgcatcatatcgcacgttgttgccaacctattccaggcgataatatcgttggatttattaccaaaggacgtggtatttcaattcaccgtgcagattgtgatcaattagctgagttactttctcacgcaccagagcgtattgtcgatgcggtgtggggtgagaattactcaagtggttattcattagtggtgcgggttgtggctaatgatcgcagtggtttattacgcgatatcaccactattttagctaatgaaaaagtgaatgtgctgggagttagtagccgcagtgatgtgaagcaacaaatagcgaccattgatatgaatattgagatttataatctccaagtattagggcgtattttagcgaaactcaatcaattacctgatgtcatagaagccaaacgcttttctcattaa

SEQ ID NO: 317540 - DNA, 558 bp, Proteus mirabilis
  misc_feature (498)..(507): n is a, c, g, or t
atgtctgtaactaacgttactgaactcaatgatctggttgctcgtgtaaaaaaagctcagcttgaatttgctaacttttctcaagaaaaagttgacgcaatttttcgtgctgctgcattagctgccgctgacgcccgtattcctcttgcaaaattagctgttgaagagtctggcatgggtatcgttgaagataaagtgatcaaaaaccactttgcttcagaatatatctacaatgcgtataaggacgaaaaaacctgcggtattttgtctgaagatttaacctacggtactatcactattgctgaacctatcggtattatctgtggtatcgtgccaaccactaaccctacttctaccgctatttttaaagcattaatcagcttaaaaacacgcaacggtattattttctctccacatccacgggcgaaattagccacaaaccgtgcggctgaaatggatggggaacgggatcacgttcatttactgattaattacccnnnnnnnnnncgctgcaatcgccgcgggtgcaccaaaagatattatcggctggatcgatga

SEQ ID NO: 317541 - DNA, 393 bp, Proteus mirabilis
gtgcggggctatgctatcccggaaaagatagaaagtagaagtacaccagaaaatattatccaacgttattatgagcctttaagtaataaatcgtatcttttaacggacgaagttggtattggtacatcacttgcttggggactaaaacggactgatattcgtttaacagagacgaaaggtgagttggcttatggtttaaattacccagatgtaaaaaataaatacgatagccttgaacagctattagcattaatcgaagcaaaccaatataaaggggtagcgattgttttagtcagacctgatagaaagcagattttgactaaattgactacattaaaggaaaaaccgatagtagaaaaagagggtgatttaacgctggtgttctttaattag

SEQ ID NO: 317542 - DNA, 432 bp, Proteus mirabilis
  misc_feature (383)..(392): n is a, c, g, or t
atgacagatactaataaaaaaaagttaacaatcaatgatatagccaaactttgtggtgtgggcaaatcgactgtttcaagagtacttaatcaagatcctatggttaatgaagaaacaaggaaaaaagttaactcaattattgagaaatataaattcacgccgtcaaaatctgcacgagcaatgcgggggtactctaatcgttcttttggtattatcgtcactcgccttgattcttatgcggaaaatcaagcggttagtgccatattaccgatcctttatcaaaacaacattgaccctattattttagaaagccaatttagccaagccaaagtagaagaaaacttaaaaatgctcgcccaccagaaaatcgatggcgtaatatnnnnnnnnnngcgtaatattatttgcattttcagggatcaatgtggctaa

SEQ ID NO: 317543 - DNA, 831 bp, Proteus mirabilis
  misc_feature (805)..(814): n is a, c, g, or t
atgacatcacaatcacactccactcagccgttgagtcaacctacggcaagacctttaaaccgcaacgactataaaacgttgggtttatcctcactaggaggaacattggagttctatgatttcgtgatcttcgtgttctttacgaaaacattgagccatttattctttcctggtgataacgcttttatcgctcagatgcagacattaggtatttttgctgccggttatcttgctcgtcctttaggtggcatcattatggctcactatggcgatattatcggccgtaaacgtatgtttaccttaagtatctttttaatggctgtacctactttggtgattggcttattacctacctatgccagcatcggtgtggctgcaccgttattactgttattgatgcgtattatgcaaggggcggctatcggtggtgaaatgcccggggcttgggtatttattgccgaacacacaccgaaacagcgttatggcttaggggtgggtaccttaacatccggtattactggtggcatcttattaggctctatcgtcgctattattgtacaacgcagctatagcgctcaagaagtgaatgattttgcatggcgaattccctttattttaggtggtatatttggcttgatctcggtttatttacgtcgttttttacaagaaacacctatctttaaagagatggcggctaaaaaagccttagcacaagaaatgccggtggtttcggttatcaaaaaccataaacaagcctgcttaattactgcagcattaacatggtctttatctacagctattgtannnnnnnnnntgttgttactattttga

SEQ ID NO: 317544 - DNA, 558 bp, Proteus mirabilis
atgacacccagtgtcattgttgaagggatctacaaaatagacagaacaacatcgttagaagctaactgtgttgccaccttaacgctgaccttaggatgtatcttctggggctggttgggtgataaattaggaacccgtgcatccatgaccttatcatggggtggattaattgttactgcattccatttttatggaagcttagatgccaatatgtctggtatccaattagcatttaactatggtttgatgggcttttttgtcggtgcaattgccacaacgccaattgtgagtactagagcatttcctccttcaattcgtttttctggcctctcttttgcttataatatggcctatgccgtatttggtggcttaacgccaatgttaacgggtgcttggttggaaaaaacggcaatggcaggagcttattatgttgcagctgtttctgcattagccattgttatcgcattcttacctttagcttataaaggctggatcgcggtaaacaccagctcacgggaaaaagagatagcattgcaagttgataaagtcgctagttaa

SEQ ID NO: 317545 - DNA, 408 bp, Proteus mirabilis
  misc_feature (379)..(388): n is a, c, g, or t
atgatcacttggttacttcttgctttatctttattgttattagggttccatcgcaaacttgcacttactactttagctataaccaccattagcgcatttataacaggtgttatcacttggtatgtacttccggttatattgagcttgattttactctcttgtgcatatcgccattacaaaacaaatcgtcttattgctactattgttattcttgcatttatcgccattattgttgggttaacttttcattttattcctggttttaataacttacgctacattaaacatgttccattagggcaatatagccctcctttctctttttatttcaatgccgataaagcagtaatcccttttattttaatgatttttattcctnnnnnnnnnnatttaaaacagaaccagtaa

SEQ ID NO: 317546 - DNA, 384 bp, Proteus mirabilis
atggcgatccccgcactgttattattcgcaatggcattgggtggactcgctattgaattacatttgccacaatggctacccgcctttatgttagcaaatattttctttgtctctcttgctgaagaagcactatttagaggagctatacagcaaagtctatctcgctatttatctccctatcttgcgctatttattaccgctattttatttgggttagtccattttgccggaggaatattactcattatcttcgcctcattggcaggtattatttacggcttagcgtggatgtggagcggtaggctttgggttgctacactctttcattttgcattgaatctcactcacctgctctttttcacttacccttttaaaatcgcgtaa

SEQ ID NO: 317547 - DNA, 321 bp, Proteus mirabilis
atgattgaacaatttgataaccaaatattagatatttttggaatagagcaagatagttttgatgtggattttttgcaatggaattatacttttagtaaagaaggcatcaaattattttttgtatactctatggataaaacagtatctatttcactgtatttaaatgatatttcaattgctttttgttttggttatggattggaaacattgagtataaaagataataaaatttatggtgactttgattctaattgcggtaaaagaacgttagaactagatcctataaatattacatttaaatggatagataagctttcataa

SEQ ID NO: 317548 - DNA, 153 bp, Proteus mirabilis
atgcaacaaggccgagatgctgtttcgcctgttgattaccaagcccgtaagctctttttatcttttggtaaaaaccctcttcctgctgattttgagcaacaggtcgaacagattttagcaaagcttgatcaggagaaaaaacaccatgcgtag

SEQ ID NO: 317549 - DNA, 498 bp, Proteus mirabilis
atgaacgaaagagattgggttgactggattgttattgcagcaagcatcctgtcttcctgtagtatcataatgactattatagtttacgtttggcaaaaaaaagacaatagaaagcttgaagcccagaaagaggtaaccgaattaaactcactaaaaatgaaactaaaaatatcagttgatgactttgagctataccttattaaggctaaaggctttctgtgtattaatgatgcaaataaaagcatagagcaactcggaaatataaatttcgacttaatgaaagtttgcttacatgaatcatcaaaaattgatgtgatgttatttgatttgatattaaatttaacaaaaacagctattggagaggttaaactgattgaaaaaataattactaaaaaattagagaataataactcctcatatagccagactatagaatattgcgaaacatccatcaacaaaataaaatctatgtatgagttgatagatgaataccaataa

SEQ ID NO: 317550 - DNA, 144 bp, Proteus mirabilis
atgacaactgaaccagcaatcttacttcaagataatttaacgagtacccatgcagttaaatgggtgagagaaaaattacagtctattgagcacttatctgaattgtatgtaagacgcgatgtgctggtggaacaattagaataa

SEQ ID NO: 317551 - DNA, 633 bp, Proteus mirabilis
atgaatgaggtattacacttagctaccgataaagatattgtaggtatatggtctgtaataattaatattttttatttgcttatcgctggagtgataggtggttttcttactaattggtggaagagaaaaaaatatcttttagataaacaaagattagagtatgaaattgaattatcaaggaataaaattgaaactgataaaaaatctcttcgtcagcaaatgataacaaacaatattgctccgatgagacaagcttggattaatgatttaaggaaaacatcatcagaaataatcagtcatctaaacttcattgttcaaataaaactattaataaaagctggagatattactgctggttctttttatgtagaacataaagcaaaatattacgaactactgcgtcaaattaattacttggaattactcttgccagtgaaagaagatggaaccgtgcctattgaatcagattcaataaaaaataatttagaaaacattctaaaaaagctcagtaatgaaagtcaaaataataatataaagaaaatcgaacgtgagatagagcaactttctattaccataagaattcttttaaaaaaagagtgggaagtaacaaaatcattaaaagaaatagaatag

SEQ ID NO: 317552 - DNA, 150 bp, Proteus mirabilis
atgtatgaagttcaagtttttgcgtatggacagcactataactttatttttgtagaagctagcgataaagaaaccgctaatgagcaagttaatgcgttaaatgcaattgatggtgatttaagctttttattgactggaaattcaaagtaa

SEQ ID NO: 317553 - DNA, 495 bp, Proteus mirabilis
atgaatcaaataactactttagtaaacagtggtgaattaaccatgagtagtcgtgaaattgcagaccttacaggcaagagacacgacaatgtgatgagagacattagaaacatgctatctgatctcggagctcccctcaaaactgaggagaccgaagaaatcaataacttaggaatgagcgtaaagcaaaaatattacttgctcaacaaagaagaatgtttatgtctgatttctggttacagcatcaagttaagaatggcaatcattaaacgctggcaagagcttgaatctcaaaaatccctcatacctcaaacgctgccagaagccttacgtctcgctgctgacttagcagagcaaaagcaaatcgcagaacagaaattagcaattgcagcgcctaaagctgaatttgttgatcggtatgttcaagcaactggcttactgggctttagagagacaagcaaattactaaaagtgaaagagaacttctttagatag

SEQ ID NO: 317554 - DNA, 153 bp, Proteus mirabilis
atgagtagtgagtcattacgaaaagcacttaaagaaaatcctgaatgggtaaggcgatacttgcagttagatgatccatcaaaaatacgaacccgccacgtaattctattcttttcgattatcacattgttaatgggggtcgtgtatggctaa

SEQ ID NO: 317555 - DNA, 1617 bp, Proteus mirabilis
atggaaaaaaaagcatatatgagattaaatgcctttcttgcaaaggaagatatagtgtatgaagatttagaccactttataaatgagccaagctgtacagtatatgatctaaaagatgattgtagtatcactggccgtttgtttgtaaaagctcctgaagaaaaatcaccaatatggaaagattttttagaactaggaattaatgatagtctagattacttaatcaataaatctagttcagctgcattattagtagaaacatctaatagagtattggcttatacgtttggttatggacggtttttgcttgatcaagatttatttatatctgattttggtataaagacagctttaaataccttagagcacgatagtttaaaaagtattgatttatttagtatagaacgagcaccaatacagaaaaaaacacaagctacagaaaattcatctatggatatgtttggagttgatatatctagggatattttgcggtctgtaacaggtgtgcccaaagatgatgttggatttaagttaataacggggggagattcaatatattctttcaatatagaactgaattttaatgagttaaatgatatttcaaataaattacttgattattatgcaaatgactcatataagttacaattttcatgggtggataatattaaaaggataaaagatgatgaacttaaatccatattagatgaaaaattaaaatctttactatccaatcaccaaatagataatatttcagttactatacctgaagttatttcatgggataatatctcaggtttcagttttaccaaaagtaaaaataacaaaaaaccaatattagatatagctaattatattccaaatttagatgatgactttacaattgaaactctcaagaaacataaggtttttgtttttgatcagaatggtgatagtacaagttattcattatataaaagtttatgctgtgaaataagtgaaaataatcaagttaatgtattgttttctggggaatggtatgctgttaatggtgacttcatggaagatttaaatcgttctcttgatagaataagtatatctggtttagattttccaaaagttaatgaatatcttgaaggcacagaattaaaaatagaaacagaaggtgattacaatacacgtgtatcaaaaaattatccctactatttattagataaaaaaactatcaaaagtcgtatttcaacaacagcaatcgaattatgtgatttattaacaagtgataaaaaatttattcatgtaaagcataaaaaaggtggctcagctggattaagtcatttatttgctcaaggatatgtatctgctgaggctatgttatcagatagagagtttaggaaaaaaacacgagaagtattacgaagggtatctaataatctttctgatgtagttccgctagataattttaactcaagaaactatgagattgtttatttgattttaggtgatgaaaataatgttgttaaaggtaaattaccatttttcagtaaaattaacttatgtaaggcatatgataatttaactcaaagaggttttactgttacaatttgtggcgtaggtaaagaaagattaaatgaaaattaa

SEQ ID NO: 317556 - DNA, 228 bp, Proteus mirabilis; identical to SEQ ID NO: 307705

SEQ ID NO: 317557 - DNA, 171 bp, Proteus mirabilis
atggtaataaataaaagtggtcaagtcacaggctctacccgtacaaatagtaacggtgagaccatctatctcaataaaagtggtcaagtcacaggttcagctcgtacagacagtaatggtactaccatctacagagataaaagtggtcaggttattggttcaaaaaaatga

SEQ ID NO: 317558 - DNA, 1014 bp, Proteus mirabilis
atgggtactattttatttaaaaaacatacttttgctaaccatttacatgaaatcattggatataaatcaggagttgccacatcaattgaacaaatgtgcgatttacttagtggtagtggttttgaggataatataatttcatctgaaacatatggtattcgtatcagatcagaagattatgaccgtctttattatactcttctacataagattggtgttacagataaacccttctggggtatatttgaaatatttgatttcaataaaaagatagaaaataagtatggatttgattttggaaagtctatcactgatatctattatagaaatataaaaatcgaaactgaaaatgcgattaaagaaggtcgaaatcttctaaatcctgaaaaaatgatgaaagaagcatttataactcatggaaaaattggtcttaatgtaataattcaattgatagaaatcaatgataacgtaatgaaacatagcccacatactatgatgaaatttcatcaatattctaatattgtaaatttatctgatttatttgaccaatataacccaatagcagaggaaggaacttttcttgatcaacgattcattgattatctttcaaataatactgaaaagttaggtgatattcactggagaaagtttgaagaactaactgcagaatgttttaagcgatttggttataaagtttctctagggcctggtagcaatgatgatggcgttgatttaagagtgtggcatgaaacaaaggaaggtgctccgaattatattattcaatgtaaaagagtaaaatctaaaatagataaagtagtaattaaaggattatacactgatataattcatgaagggtgtgaattaggatttcttgttacttcatcagagttaagtctaggggctcgttctactatagatgctagaagctatccaatagaagaagtaaacaaaagtaagataattcagtggttaaaagaactgagaacgccaggaacaggtatcattcgtctataa

SEQ ID NO: 317559 - DNA, 486 bp, Proteus mirabilis
gtgctaatatggctaaataaaatgaaaaatttattgggtgtagctttattatttatttctctagtatgtaatgcacgtagtgaaaatggtagtgctccattaaaaattggttttgatacattgacgatatcttcactgactaaatctcctgtggtaaaagatttttcactttatatatcagactgtaattttaataatacattagccattgttttaaacccaaaaggaggaagtacgcttttatataaaggaaaaaatatattagcaacaagtactgatgggttaggtatagatattaatgaagtgactggtggaactattcgctcactggaaacaagtaaaaagcataaaatcaatccagaacgaattaattcaactctttatcgtgttgacttacaagctcagttagtaaatacagtgcctattaatcaattaaaactagggacgttcaattcaatagttactatttcagtgacttataactaa

SEQ ID NO: 317560 - DNA, 405 bp, Proteus mirabilis
gtgaataaatttatctttagccagcgcagtaaaaataatcttagtggcgttaatccgctattagtgaaaattgcttatcgtgcgttagacatttctacggcggactttgcagtgattgaaggtgttcgcacacttaaaaagcaaaaagaaaatgtgaaaaaaggcgtttcaaaaacattagacagccgtcatttaacaggcgatgccattgatattttgccttctgcgattaaaccagggatggaatggcacccgcatttttttgagccggttttaatggcatttaagcaagcggcagatgaagaaggggtaacattacgttttggtaaaaactggaaaagtgatccctgtttacccgttgaaacccgctttcctgattatcctcatattgagatcccacgatga

SEQ ID NO: 317561 - DNA, 456 bp, Proteus mirabilis
atggattatgtttctgctaaccctgtgccacaaaaagacgaaaccattaaaaacaatggttttttccctgatattcaaactcgtgattttcaattgcaaactcgcgtcgatggcactgtgacaccggaacggctgaaaagtacgttattgaacgccatgattgaagtaaatcgtgaattgtatcagtggcgtattggtcaagctgcgaaaacattaaaagaggtgcctgccgaacagattaacggtgaaagtgaattgatgattttatatcagcgagcggtgttctgttttgcaaaggccagtttaatcgaacgttatcgcgatattgatactaccgcacaaggtaataaaaaagccgacaccatgacgccggctattgatgaagtgtggcgtgatggcaagtgggcgttacaacgtatcaaaggggaaacccataacacggtggagcttatctga

SEQ ID NO: 317562 - DNA, 423 bp, Proteus mirabilis
  misc_feature (356)..(365): n is a, c, g, or t
atgcacccatcaaaagtaagagtttatgtatttaattggagtacttttgtgatggtattaggaatattagcatcattatattttcatatttctactcaaaataacatagcagatagagacaaagaaaatagagaaaatgaaagaaataatataagaacaatgttcgcctatgagatttcatataatcaatcaaatctaagacttttagaaggaactaaaaatgcaggttttgataaagaaaagtgccaagcagaaatctgcactgctagtcctgttgaactcaatgtatttgctggcataagattgatgattctaaactcgctaagagatgatgtatatactatttatcctgtctnnnnnnnnnngtatatactatttatctacctcagatatatcttcttgaacctaaagaagtctcgttaa

SEQ ID NO: 317563 - DNA, 231 bp, Proteus mirabilis; identical to SEQ ID NO: 316007

SEQ ID NO: 317564 - DNA, 444 bp, Proteus mirabilis
atgaatgttatctatctcagtattgatctggctaaaaatgtttttcagctttgtggattaaatcaggcgggtaaaccggtttataaaaaacgcactgatcgtaaaacgttactacagaccgtcgcgaatattccggcctgcctgattggtgtggaagcctccacgggtgcattttactggcagcgtgggttcgaaaaacagggacacaggataaaagtgatcagtccccagtatgtaaaaccctttgtccgcgggcaaaaaaatgacagtaatgatgcacaggctatcgcaattgctctgatgcagccaacaatgcagttcgtacccccaaaaagccctgaacagcaagatattcaggctctgcaccgtgcaagacagagtattgttaatcaccgcactgcgacagtctgtcaaatccggggactgctgcttgatcgggaataa

SEQ ID NO: 317565 - DNA, 558 bp, Proteus mirabilis
atgaaaacaagccgttctgcctattatgcttggctcaaacgtcctgcaaaacagatcactgcagaacaacttagcctgtaccgcagagccaaagttatctttgaacagagtcgaaatagcttaggttatagaacgttacgtaaacggttatgcaaagagggctttagcgtgagtgcttatggtgttcaaaagctaatggctcagcttggcctagttatcactcagcgcgttgcttacaaagtcaccaaaaaatgcaaatacagtgatgtcgtagccgataatttgctcaatcaaaattttaatcctcacgcacctaacgaagtgtgggcgggtgatgtgacctatttaaaaacaggggaaggctggatgtatttagccatcgtgatggacttatactcacgccgtattgtgggttggcacatcgataaacgaatgacggcagatttagtcagtaaagccttgatgaaagcgtataacttacgccatcccgaaaaaggcttagtctttcatagtgatagaggctctcaatatacgagtaagcgatatgccacttactaa

SEQ ID NO: 317566 - DNA, 1740 bp, Proteus mirabilis
atgccacaaataaaatataataacgagataacaagtatcataaaagagagacgaaaagtttttctctctattgggctatttaccgctttaattaatatattaatgttagtcccttctatttatatgttacaagtttacgatcgactattaccatcaggtaatgaaatgacactattgatgctaacaatcattatgttagctctttttatctttatgggaggattagaatatttaagaagcattattgttatacgtatgagtaataaattagatttatcacttaattcacgcatttatactgcagcttaccgagaaaaattaaacaaaatagcgaatattaatccaacgttagcattaacagatctaattactttacgacaattcattactagtcatgccatattcactttctttgatctaccttggttccctatttaccttttagttattactttatttaatccttggttaggattatttgcactttgtggtgcccttatcttatttgctttggctattcttaatgaatatctatctaaaaatcatttaaaaaaagcgaacaattttgccaatcaagcacaactaatacaaagtcatcatttagaacatccacagactatcgaagcgatgggaatgcttagtcaattacgtaaacaatggcaaacctctcatttcaaatatttacaagcacaaacacaagccagtgataatgcagctggtattaacgctatcacaaaagtaacacgtatggcattacaatctttaatgctaggtttagggggatggcttgctattgataatactatcagtcctggaatgatgattgccggttcaatacttttaggtcgagcattagcccctattgagcaagtgatcaatgtatggaaaagttgggatagtagtaaagcagcctacaatcgattgacaactttattaaaaacataccctcaagaaaataaaaaaatggccttacctaagcctcaaggccaattacttgttaatatcgatgaagccgtgtatccacacagtgacagaatattactaaataatatcaattttgctctattaccgggagatatactaggtattattggcccgagtgcttctggtaagtcttctttagcaaaatttattgtcggtatatggcaggtcaaaaaaggcattgtacgattagataatgcggatatctttcagtggagtaaagaagaaattggtccacatattggttatttacctcaagaaatcgcccttttccccggcactatcgctgaaaatattgcacgctttactgaggttgatcctcaaaaagtgatccaagccgccaaaatggcacatgtacacgagatgattttacgctttcctcaaggatatgaaacccaaattggtgctcacggtgaaggattatccggcggacaaaaacaacgtattgcattagccagagcattatatggcgatcccacgttagttgtcttagatgagccaaattctaatttagatgatttaggtattagagcgttaacacaggcgatcgaaacattaaaacagcataaaaaaaccgttattttaattacccaccaaaaacagctactttctgtcactaataaattattagtgatatttgatggaaacaccaaattattcggtccaacggcgtctgttattgctgaattaaataatccaactatcacaaaaacggcaaacactatttcttcaacaccagcaacctcaaataacgcttaa

SEQ ID NO: 317567 - DNA, 132 bp, Proteus mirabilis
atgatgtatcacattatacctgtgacaaattatatgcaaaattgcacccttatctggtgtgatgataccaaagaagcggccattgttgatcccggtggtgatgtcgaaacattaattgcagaaattgactaa

SEQ ID NO: 317568 - DNA, 507 bp, Proteus mirabilis
atgaatgaggtatcacacttagctaccgataaagatattgttacaatgctgacagcgataattggtgctatttgtttagtaattggtggtgctataggatttttcactaagtatttttatgagagcaaaaaacttaaggaaaataaaaaagcacttcgccagcaaatgataacaaataatatagccccaatgcgtcaagaatggattaatgatttaagaaaatcctgtgcagattacttttctgatatcaatcttataattgtatatacaaattcaaaaaacgatgagtttaagttggaaatgagagaggaatacaaaagcaggatggtttccttaagtaaaaaattcgtatatatagatttattattgccatttaaaagggataacaatgaagaggttgaggctgaggaattcagggattcactaaaaaaggaatgggaagaaacaaagtcgctaagagaaatagatgataaacccaataaaaagaagaaatggcatttattgtag

SEQ ID NO: 317569 - DNA, 1554 bp, Proteus mirabilis
atgaatcatcatcatgtgaattttgattttgacaacgaaagcaaagtaacaacatgtatctcatacaatggctttgagtttaattacctttcagaccgatggactctcaatcgggatgtcacggtattggtggatttcttagattcatttatacagccgttacaagaggatattcgagaagtactggtgttttatgctgaaacttcatctgctaaacacacccaaaatatatccgtgcagcttaaactttaccaaacgataacaggtcaaaatgacttaactgaacaggggtttgcatcctttaaaaatgcattacctaagaaggagtggtacaaggtctcagttgttcggggaatgctgcgacaaatgcgctatttggggctagataaacatattgatgatgcagtgtttaagctgactgatcaatggagtttaggtggcaatgataaaggggtagctgtacttactcttgaccctgaaacagggccattcagtgatttagagtttcaagcaattggtttacatgctgctcatcgatatgctgaaggaacgcttagaacagatgagtatgcttgtctctcgatgtttaaggcgtccggtcgtcgtcctgttcagattgcatctatcaagtgtaaagacttttcttattcgactaaatataccggatctccaacgtatgtggtgctgatccctagggcaaaagtacgtggaggaaagttccgtagtatcctaaagccttatgctttagttaattcggttgcacaggttgttgaactacacatcaaagaacagacagctaaggtggaagcagctttagggcggaaaatgacgtttgaagaaaaaggtgaactacctttgtttatcgatgttggtaccactgtagaaattcaatcaatacctccagattcattaatgaactatctcaaatccgaactaccgcatattaaaacaaacaacctaacgagtaagttaaacagtgcggtcaaaaagctgaaagtcatcagtgagcgaactggcgaatctttaaaatcaacaagctaccgttttcgctataccttgggtaccagagctgctagagagggagctggtatacttactattgccaatttgcttgaccagtctgatacgcaaaatgtaaaagtgtatgttgctaacgcccctgagcatgctgtccatatttcaaaaatcatgaaccaaccgctggctcggtatgcttctgctttcgcaggcaaactggttgaagacgaggctgaagccaatacagaaaatgcaggtgcggcacgcattccttgtcgagaaaaagactgtgaggtcggttcatgtggctcaagcagtttttgccaagattatgcccctatcgcttgctatttatgccctaaattccgtccgtgggcacatgctccgcatcacctaatcctcgaatggttggttgaagagcgagagcgattaaaagtaaatgccaatggcgacatgcaaatcgttgcaatcaatgacaatgccattctagcggtatgccaagtaatccagctatgtagggagcataacaatggctga

SEQ ID NO: 317570 - DNA, 2175 bp, Proteus mirabilis
atggctgatgtattcatttttaagcctaagcacgagcttgagcatacgaaaaaccaagccgatttcatcgaattaggacgtcagatagcgccattaagcaagaagtatgtctacgatgaaaattactggcctgatgtaggtaacttcaccatttttggtgccaatagccgacaaaaaaatccagatgagttactggataaatctttaattccctttgcaaaagcttacgttacctatggcggcggaaccaaagcaggcatcaacgttaaattccaagccttacgcgcaatcaatgtagcttggcagcagttacacaagggcgaagattttgaaaccaccaagcttacgggaaaggccttcgatgcagctcaacgcacagctaaggaatcattaagtgcaggagctgcttatcagactggtcgtggtttaaataatcttctcaacttcttgattgagtacaaattactgaagccatttaagtggaaaagcggactaaaaaagccggctgaaaatgcaacaggggatgatgctgacaagagaaggcaagacaaaatgcctgacgaaaatgcgttaatggctctcgcctccgttaatgctcaaaaaacagaagacttaagtcctcgggatattttcacgacatctacgatgaccttgttgctggctgccccaaaccgtggttcagagcctctgtacttgctttccgatcctattcataccgatgagctgaaagtttgggaagtgctaaaaatggatggttttactaaggaggatgttaaggaaatccttaaataccaaaaagagaacgatattgtatttgagggtgacaatggtgccgtatttgacagtgcggggaatgaaaccgaagaccctcaggatgccgacgatgaagagctagaccttaccgcaaccatccaaattaaaggcataaaatggtactcgggtaaagactttgggcatgcgcacaagtggatccctacgtgcatgtacggtgttgtggaaactgctgtagagcgtttgagagcaaagtcaaagcctgcacgaaagtttgcaaagatgctagaagagaatttgtgctttcctcggcacgaactttgtcctgacgtccctgaagaccaacgcctaacgatggatgaagctgcaatggcacttgggttggattcgtcaaggtatggtgacctttctgatgcaaaaaatcgcaggaaatggcgaacatctagaaaccacttcctaaagcgtaagggtatcttaactgaagattaccaagttacgctccaagatttaaatgtaatccttcgaaaaggtcttccagagggcttcccttacataccatttgataacggtaatggacatgtaaaggttaaatggtcagaggctttgtatgctggttttgccaattgcttggacactgcaaaatcaaccatttctaccgagttgtacattccaaccattaatacgttgaatgaagaccttgctccaacgaaaaaaaagaacagaaccacaggagagctagcgacaggtgtgcgttcagtttttcagcgttgggggcatggtgatttgatcataacttcgcatcagattcgtcatatgttagacaccatggcggcagtcaatggtatggatggagagcaacgtgctaattgggcgatgcgaagcgatcctaggcacaatcgttattacgaccatacaacgcctgaggagtatggttctgactttatcgaagaccgtgaggctgagcttgtatcacagggtttgaaggagaattcaaaaataggaactgcccaaattcaggtgcaggttgcgaccccaagaacactgcaagaattgaacaccaaggcggctttaactgcacatacaagtgaatttggcatgtgtgtgacgtcctacatggcagagccttgcactaaatatcgcgactgtattaactgcgaccagcaagtttgtgtaaaaggcgatgacggcaaatgtgagcgcattcgtaagcgtctaaaagaggagaaaaaacttctcaaaatggacaaaaaagcggttgataatggtgttcaaggagctaggcagttctatgagcgcaggaaactgaccacagagcgctatgaacaactgcttgccatgatggaagatccaaatatcgaggatggctctcttattaggttggttaacgtagaggatgttacctag

SEQ ID NO: 317571 - DNA, 183 bp, Proteus mirabilis
atggatgcgaatggtaaaaagcgtttacctaagattgaaaactttcagcgcatcaatgagagccagaaaactatcgtcactgttgatgaaataattggtattgagaacaatccgtcatcatttgatgatgaactatttgatgctttagatgaaatggatgcaatagatttttttgaggattga

SEQ ID NO: 317572 - DNA, 420 bp, Proteus mirabilis
gtggctaaacacttaacagactcggatattagcaatgtttgtgagcttctagatgattggcccacggactctaagctgacatgggatagattggtagatgcagtagcacacgattacaagctttctaccacgaggcaaacactgcaaaagcaggtacgtatcaagcgcgcatttactgaggttaaagcgcttgtatcgggtaattctcctaaagctgttgctgcacgtaatagacaccgtccatccagtttgaaggttgcggctgatcaactagaaaagcgggaacgaaccattgcgcgacttgaagccgagaacaacagactacttgagcaattccatacttggttgtacaacgctacccagcatggaattacgattgagcaactaaacgaaccattggaaactaaacaagaaaaatga

SEQ ID NO: 317573 - DNA, 153 bp, Proteus mirabilis
atgagcaaaatagctacggaactccatggctcgcaaaccgatgaaagtttagctaaaaaagaaatacagtctaccactgatgtagcagcaatcagccgtagtgcaaaactaaatagtacagccatttctaattctaagcgtgtagtgaattaa

SEQ ID NO: 317574 - DNA, 2217 bp, Proteus mirabilis
atgattaacaccataacattaaaaggtgtagctagttactcaccaacttcgccagtggttattcaaactgacaacaagaagataaacctattctatggtttaaatggttctggtaagtccacaataggtaaatttttacattctcctgaattacccgaatatcgaaactgttccattcaacctagtgagttggttgaagatatctttgtttacaatcaagagtttatacgtagaaacttctatgaaattcctgactttcagggggtgttcactctgagcgaagaaaacaaagaagccgaacaagcaatcgaagaagcaacagaaaaaatagctcgcctacaccaaagtatcgaggttttcaaaacaaagataagtcgcaagcaaagtgacatagaaaatgaagagacttcactaaaggaatctgtctggaaagcaaaaaccacatatgaaaatggcgcactagatttttgtctagaaggattacggagaaacaaagttggctttctgaacaaggtcagatcaagtagtggaggtgtcacatctacaattgaatctctgcaaaaagaggctcgtgagttaacaggacaagacggtagtctacgtccaagcgtacccaagattagccttgatgtcagtaactttgaaaatgctccgattttaactcaaattattgtgggatctaaggattcatatctatccgacttagtcgaaaaactaggcaattctgactgggtaaaatcaggtctgggatatatgaaacccgataatccgtgtcctttttgccagcaagagttaagctcatcgattactgaagcgatcaatcaactatttgacgagacatattcccaaaaagtcagccagatagaagggttatctagcagctacagagctttagttgacgatattaagagcaaattatcggctccagtatacgcttttgaagatggtgtagttacatatggcttcgtagacaagagagatctactgcttgaaaagttatcagctaacttgtctcaaattgatcttaaaatcagcaacccgagtacggtggttacgcttaccgatacgagcactctagtggcagatgttaatactgcgatagccaaaatacaaagagatatagatctattcaatgatagggtcagaaataagaaaagccatttgaatagaatagattcggagttttgggtgatcctgaatgagcagtttagcgctctcatcgtagctgcagatgaaaaggttaacgaccttcaagctgaaatagaaaaactatccgatgaaatcgggcggtttcgtagccaagagattgctcaaagaaatttcattactgaaaaccagaaaaaaataactaacattgattcgtcgataaacaatatcaatcaacaactggttgagctaggtatacacagttttaaaattgttaaagcagcaaacgatcagcaacgttacaaaattgcccgcccaacaggtgaaagtgctgacgtatataacacccttagtgaaggagaaaaaacactcattagctttctttacttcctagagtgtgcttcaggttcaacaaacgaatcctctcctgttttgctgaacaaccgaattgttgtaattgatgatcctatttctagcttatcacacaactacgtctatgatattgcagccctgatacatcacaaagtctttagcgaaaacttcaaacaagtcttcctactgacgcataacctattctttttccacgagttattaatgctcaagaacgcatctaacaaatgccctgctggatataaactgtatagagttgccaaatcgcagtttagcctcgtttatgatttaaagagggatgaacttcaaaatgattaccaaatgtattggcaagtcgtcaaagacagcacttctaatccaagctacgcacacatgctacccaacgcgatgagaaatatactggagcactacttcaattttgttcataagaaagagtcactaaagcaaacattggagcaattaggtcaaacagagtcagattttaagcctttgtttaggtacataaatagagagtctcattctgattcgattaacctagtagactttgaaagaatcaatgctgaaaggtacattgaaaaattcaaacagatatttgtagaaactggtttcgaagaacactacaacagcatgatggggattgaaagcacgactaagattgacgcagaagcagagtctgcttaa

SEQ ID NO: 317575 - DNA, 366 bp, Proteus mirabilis
atgaagcaatatcacctcaaattaccgtggccaccgacaaataacacgttattttcagtagtcaacggaaggaaaataaagagtaagaaaggcaggatatttaccgaagcagtaataaaccaaatcaccaaagcaaatcagcaattcaatttatccggcaagctaaaaatcaaaatagtagccaaccctccagacctaagaaaacgtgacctagacaacctcctcaaagcaccattagacgcactgacgcaaagcggtgtaattgctgatgacagtatgttccgaagcatgagtattgattttggtgaaaaggttaaaggtggatccttggatatcacgatatgggagatagatgatgttcactga

SEQ ID NO: 317576 - DNA, 285 bp, Proteus mirabilis
atgacaagtatctaccgctcaaaaaaatggctcaaagccgtagctcaaatcgaatgttgtgtcttgtgtggtcgctatggcactcaggtagcacatagaaacgaagataagggaatggggcttaaagttgacgatagcctcacggcagcattatgtcagcactgccatcacgagatcgataacggcagcaagttaagtcgaattgaaagacgtcaactaatggatagggcgatagttttaacgctcagggaactaaccagagggggattgatagaaccatcatga

SEQ ID NO: 317577 - DNA, 249 bp, Proteus mirabilis
atgccaacaggtaatagacaaggagcagcaagagagatgaataagccactaacaaaaacacaaggcgaggtattgagtttcatccgaagttatattgcagaaaaccaatatccaccaaccagaatcgagatagcaagccatttcgggtataaatctccaaacgcggcagaagaacacctgaaagcactagcgataaaaaacgcaatacttgttgttaaaggtgttagcagggggattagagttttatga

SEQ ID NO: 317578 - DNA, 246 bp, Proteus mirabilis
atgaaatggcatcagaaggtactcatcaggatatttagtagcaacattcttacatttctatttcaactcattgtttggggggtaatatcaaccctaatagcgatagataaaatgggcgagtttaatcttcatgtttatctaggggcattaccaatagtgattattcaggcattagtgatgacatgcctaatcaggtggttgtttaaattttgtatgaaaaatattgatattaaaggaggcatctaa

SEQ ID NO: 317579 - DNA, 246 bp, Proteus mirabilis
atgggaaaaatgacattcgtagttgagtatgaagatggcaaggagccgtctatcagcttcaatatggaaatctttggcggaaaggtgatagaagctggctttcgtgattataacaacgacatgctgactgaaaaagaaacagacgcgttgattgaatgcctaaacattgaagaactaaagaatgctggctatggagttgatggatataagcttcttagaaagctaggtataacattagacaaatag

SEQ ID NO: 317580 - DNA, 612 bp, Proteus mirabilis
atgatgactaatattacactcgataatataaaacttgctgtacaacgtatcgcaattgcctgtgaacagtctcaaaatagactatgtgaagcagatagccaacttggtgacggtgatttaggggtaaccatgcaaaaaggatggcgacaaattgctaacgatgcccaagattggcctgacgatttaagcaaagcgctttttcaatgcagtaaatcattacaaaaagcctgtgcgtcttcttttggtactttgcaagcaacggcttttatggcaatggccaaatattgcaaagaaaaccacctgcaagaaatagcgcttactgatatttccccactattgacggtcgcataccaaagcatgatggcgagaggaaaaggggagttagggcaaaagtcagtattagatattctttatcatttatctgaagatctagcgtcgatctcatctctgactgaactaaaacccaccgctttaaaaagtattaataatacgctaaatgaatttcgccctaagcctaatttattgggacgtgcccgtatgttcccagaaaaatcgataggattagacgatcccggaatgttagcgattaacgttattgttgaagcaatttga

SEQ ID NO: 317581 - DNA, 141 bp, Proteus mirabilis
atgaaaaaagataaattggttgtgacatcacttgcaaccgagcttttagatgatgtatttataagttataaaaaaacctcactgatttatctaagaaaaataatagtggtgacccctactcaaaaatacgaaatgctttag

SEQ ID NO: 317582 - DNA, 195 bp, Proteus mirabilis
atgcagtattttttgattcattacattagaatccatatttgggcttgtagtggctcactaaaactggccactgatatagagttttcccatatttttatttatgtgaacaaggcagacactgatggcattcgtaactcagaaatgtccaaaaacgagtttacccggctgtccgctccttgctcagagcagacctaa

SEQ ID NO: 317583 - DNA, 447 bp, Proteus mirabilis
  misc_feature (435)..(444): n is a, c, g, or t
atgcagggtgcaatgacacgaattttattgggaagcgttatgttcagcgctgctatttgtcaggttcaagctgaagcactgcagcctgatcctgcttggcaagaagggcgactcgcaaatggtttccaatggcaaattttacaaacaccacaacgcccaaatgataggatccaaattcgcttattagtgaatacgggctctttatcagaaaagcgcagtgaaacagggttttcatctctggtgtcaaaactgaatgtgttagaaaacaccggattaacaccagaaaaacgcgataatctttggaaaaatgcattcgatcctgattatccattgccaccgatgatcgtctcttatgactttacggtttataacttaagcttgcccaataaccagcctgaattattaaaagatgcatttgcattattggcgggtatnnnnnnnnnntag

SEQ ID NO: 317584 - DNA, 408 bp, Proteus mirabilis; identical to SEQ ID NO: 317261

SEQ ID NO: 317585 - DNA, 876 bp, Proteus mirabilis
atgagtatttttttcaatcccgctaaacacccacatcgcttaaagccacaaccattgggggagcaaggtgagcgctataacgaagattggcccatgcctgagctcgattttttagagaccgtagataaacaacagtgcattctggttgataaagaaatacgccgacgtgatgcgtttgctttccctgggtttattaccggaattattgtctttattatggtatttcattttgtttttatggaccactataatcaatatacaacttttaaagacgatattccttattatgaaaaaaaatatggtaacttatatttggaagacagtgtgacaattttagattactttaatgcttattatagtcgatatattacatcaacaccctatcaagacacgctattttttcttactatgttcatcatgtctttcgtcttacttggcttgggtggctatcaatcttttttcaaaaaaaatccaatactcgtttttaatcgtgaaagaaatctggtttatacttggcgcaaaaataaggtatttattgcccgctatcctgaaattggtatcggtaaaattggtaaaacacttacctttcaattattcgggttagataagtcaaaacaaactttagtttctgaattatttttccctaatgtctatgtttattcagtgtacaataccagtactgactatcacgaccagcgctttattaattttatcaatacttatatgcgcgaagggcgtgatgccattattccattcgattatcaccgtaaaaaacccaaagtgtattttggcaaaaacccacctccaactgattttgagcaacaggtcaaacagattctggcaaagcttgatcaggagaaagaacaccatgcgtag

SEQ ID NO: 317586 - DNA, 444 bp, Proteus mirabilis
atgcctgacccaattgggttattgggtgggattaatctgtatcaatatgcgccgaatccgttggtatgggtggatccgctaggtctagatcgcttcccttcgtggatggatacaacccaaggttaccaacgtcagcatttaattccttattcactcagaaatcatcctatttttgtgcaatcaggaatgaatattaatggtgcaacaaacatgatgcgacttcctgtagcaaaaggaatagatcctaatcaggatttgggacttcatcgtggttggacaaaagagcatgcaatatataatgaaatgatgaaatcaaaactagatgctttagaaagagttgcaattaaagaaaaatgggattatcgccgaatacaaaatgaaatattgaacctacaacatgaggctcgtaaaggatttaaaacaggaaaacttatatgtgcttga

SEQ ID NO: 317587 - DNA, 345 bp, Proteus mirabilis
  misc_feature (260)..(269): n is a, c, g, or t
atgcataatcagatattaaaaaaactgccacaaatagagcaaatgcatcaaataaaactactttatgttgctgaaagtggaagccgtgcttggggcttcgcatcaacggatagtgactatgatgtacgtggtatttttatacggcctcgtaatgcatatctttcaattgataaacctaaagaaacatttgagtggatagaaaataattggtttgatgtaggagcttgggatattacgaaagcattgcatctattacgtannnnnnnnnngttcatcattatagagggatcgcaaaagccgttagtagacatcattttgaagagagtcatgcaagtaaagcgatag

SEQ ID NO: 317588 - DNA, 240 bp, Proteus mirabilis; identical to SEQ ID NO: 303454

SEQ ID NO: 317589 - DNA, 153 bp, Proteus mirabilis
atgaccgtcaatcaacaaacaaatgataaagagcaactgatgcagttatctcccgttgtttctgcggtgtacggtgtacctatctttgttgaagaaacccttgatggggcttatgctcaagctaataaactgctgggcaatgaatataaataa

SEQ ID NO: 317590 - DNA, 216 bp, Proteus mirabilis
atgttgaataataacaattttacaataatgtctgttgaccaatttcccattattaccatgcaggttttcccagaaacgttagagcatgctaataactggattgctgaaatggacttagtgcttgatcaaaaacaaaactttgtattggtttacccacctatcaacaagaaaaatgaacaagaggatatggagcgcatgaaagcggttaggcgctag

SEQ ID NO: 317591 - DNA, 252 bp, Proteus mirabilis
atgctgccaaaagttgagttaaaatggtatcgcacctcggtagaaggtaaacaagagcacttctttaccacgacgctaactgacgcgacgatcgtgaacatcgattgccaaatgcctcattgtcaagatccggctaaagccgacttcacgcaacttatcgaagtttccctctcttaccgcaaaattgactgggagcacactgttgctggaacgtctggtgcggatgattggcgtgcgcctctcgaagcgtaa

SEQ ID NO: 317592 - DNA, 732 bp, Proteus mirabilis
atggaacatttaaagttaaaagctgaatatagagaatatggttttattagagaacaattagaagagtgtttggggttttctttaggaaaaaatagtgattttttacctgattatcttaagccatataaaacaaggataggaatacagttagaggaagcggctaatatactcgctggatgtcgccctagagaacatgtgaattcaggaccattagttgacattattcatggctatatagcatcactttgggatgcttatgataatggtatattgtcaggtagtaatgttgtaatggattataactataatgaagaatatcgaactgacgttactttagttaaggatcaggtaactgaatgggcgctatctcataatttaaaatggcctttcgaattatcaagtaataaaaataatactgaaaacgatacagatgagctacttaccaaaatagaaaaaatagaattagagaataaaaatttaaaaattaaattaaatgaattaaaaataaatatcccatcattgttgtctcaatatagagatgatgacccgctggctatagctattaaattaagaaatgaagtatggacagattatgacgaagattcaaggtctacaataccaacgcaagaatgggtggtggcaaaacttatagatgattataaagaatttgaaatgaccaaagcccaagcacaagcaatcgagaaagtagcttgccctattaagcgtaaatag

SEQ ID NO: 317593 - DNA, 270 bp, Proteus mirabilis
gtgttctgtttgataaagcagatcagacgttttattctcataaaaaaaacgtatcacggcattcatcctaagatatctaaatttgcccgtaatgatattgatggttacaaagacggcgacccaattgatatccctgatgaccattttatttccgttcgtgtacagatgcctgagcaatcaatctataacgtgagaatacgggagatggaagaagcgctgaaagtggaagaggagcgcagacaaaaagaagagaagatgaaagagcaataa

SEQ ID NO: 317594 - DNA, 333 bp, Proteus mirabilis; identical to SEQ ID NO: 314869

SEQ ID NO: 317595 - DNA, 162 bp, Proteus mirabilis
atgcttaagctttctatttacgcaactgttttcgcattatttttaattttactgatcctttatgttgctattcgttggataaattttaagagtgagttttgtagaaaaattttaaacaaacaacttttatacaataactcactcgatgatgaaatgtattaa

SEQ ID NO: 317596 - DNA, 1068 bp, Proteus mirabilis; identical to SEQ ID NO: 314831

SEQ ID NO: 317597 - DNA, 204 bp, Proteus mirabilis
atgcaagaacaattagaattcttcgatatcccaagcccttgcattggttgttaccgtagtcgtcaagaacggttcagttggtcaataatgagtcaacaagaaaaacgaaatgtattgagactttgtcgacaacgatatttaagagctcaacaaaaaaccgtgtatgaaacagaaaaagagaatgaacagctggatttattttaa

SEQ ID NO: 317598 - DNA, 180 bp, Proteus mirabilis
atgaatattatctatctcggtattgatctggctaaaaatgtttttcagctttgtggattaaatcaggcgggtaagccggtttataaaaaacgcactgatcgtaaaacgttactacagaccgtcgcgaatattccggcctgcctgattggtgtggaagcctccacgggtgcattttactga

SEQ ID NO: 317599 - DNA, 177 bp, Proteus mirabilis
atgaacactgtagtactgaaaccaaatgagtcatcagaactgcaaaacttaaaagcagaaggtgaaggtaacctgattattcctatgaaagcaggtttatttgctacagaacttggtgactcactgaaagcacaagatattaatgttccagtaacctttagtgttgcttataactaa

SEQ ID NO: 317600 - DNA, 159 bp, Proteus mirabilis
atgaacaaaaagagaacagatacaacaattagaattaacgaagaaaggaaactagagttaaaaagaaggatcttagaaataggaaacaaaacaggtgaattattgtatttagatgatggggtaaaagatatcatagccaaacaacaacaaaaaaaataa

SEQ ID NO: 317601 - DNA, 549 bp, Proteus mirabilis
atgaaaaaatcattattttcactattaattctatctacgctttctttatcaacactagctattgcacaagagattagctttggtgagcaaaatattcctgtcagaggcagggtcattcaagataacctaacttgtaacgttcaacctgttgcgccaattcaattacctgatgcttatgttagttctattgatagggcttctgcgacaacttttagtataggtttttctggctgtaataatcaagctaacaatagaaatgtcaaagtagttattgcaaaacaagacaatagttatttaacgaatactggtcaaacaaagactgataccaatgctcgagtagcattattagattctcaaggtgtagcggttatacttaatagtaatgatagttcgtttcgtacatttacttcggatgttgccggtgggaacggtaacatagaattttcattaagatatgtgggactactaaattcggatgatgatgttaccccaggtgttttctcttctgccttatcttttgatgctttcgtcactgatgaagtctactaa

SEQ ID NO: 317602 - DNA, 474 bp, Proteus mirabilis
atggaaatgcttacagagaaggatgaaaaattctgggggagagctgtttggatcctctccatattaggggtgcctatcatccttggtttttaccaccttttacttatgtggaaaggaacttcgttgtttcccttcataaatcctaaagatatatctgtgatgcttagtattgtgacaacatttagcattacgatgactggatttatagccgctatcggcgcttatttactctctatatcaagaagtcctacatttagtgaatggagaaacaaaggctatctatctattttttttaatctgtatggagtaacaatcgtttttttgttagttacatttgctacctgcttgatgatgcttctaacaaatatgaatatgtggtggttaaaagtaatactatcattggtaattgtgaatttaattcatattgtatcaataacctacattgtagttagtcaagcaaaagctaatgattaa

SEQ ID NO: 317603 - DNA, 576 bp, Proteus mirabilis
atgtcaacaattatgtttccaaccccacctccgataattagacagcatctgaacaatgcaatcttttattataagactttgtatgaaagtcgttattcgtcattaattaatgtggataaatttaattattttaatgcattattaaatgctaatattgatggcttatgttatgcaaaagaaaaaggtttagatgaagctcgaatcgcactattacgttggaaaggacatgaggaagcttttatctatactttactttttaatgagttagatagtgaaaaagagtttgatagttttgggttgatgataaaagaactaggatttaatgctgttattggttcattggaggcactgctccgtgttgagataaacgctagaactgcacaattagcgctactgaaagaacgagagcctgacatattcattgtcgctttattaaaaataaaagcacattatcaggagctaatccatcatgataaattattatattatttaaatcttccctcaaaagaaattaaaatcgcattatgttattatgtaaaaaaaaatgaagctaataagcttttccgaaaatattag

SEQ ID NO: 317604 - DNA, 237 bp, Proteus mirabilis
atggaaaaatcccgaacaacattagaccaatggatcaccttacaagctgttgttgattacggtggctttgctcaagccgctgatgtattacatagaactcaatcatcaattagctacactatcaataaactagaacaaactttgggcatagaaatactttctttagaaaaaagacgtgcagtattaaccactgagggagaattattgctaacactttctcgagaagtaacagagtaa

SEQ ID NO: 317605 - DNA, 651 bp, Proteus mirabilis
atggaacatattaattctcttataaataaaatgaatgctaatacatctgaagttattaaacttgaagatttagcaccattatcacttcatgaaattcatgcattgagtgaaaaaagactcagttggaatgaagcaaaattcttatataaagaagcaaaaattgcagcaaagaaatgcaaactaaatgaggctcactatttagcacgtaataatccacaagtgcaaaatgcggtagctttaggtattcaaaaacaatcagcacagagccgtgcattgggcgattggatcccagatagaagtgatatatatgtagatagtcaatcggtagcatctatgttttcacctgcggcttatttaacagagctttatcgtgaaggcagagcactgcatgatgaaaattccatttatcatcttgataagcgtcgtccagatttagcacaattagtgctgtctcaagaaaatatggataaagaaatttcgacactttctttatcaaatcaaattttaaccacagcattacaaaataaattaggcagtgataaagatttgttttttgaattagcgacgaatcgcttaacaggtgaaacaccgtatcatcaaccttatgaaactgttcgccaaacattattactgtctcttatacacatctga

SEQ ID NO: 317606 - DNA, 345 bp, Proteus mirabilis
atgaatataatgacgaaattaagcgtagcagtattgcttacatccttatccactatcgctatttctgcagatataaaactaacatacggtattaatttgattgattttaacggcgatggtgtaaaagatattgtcgttaaatctaagcgtatattaaatgatgcatcatcaattaatatgatcacggtttatataaaagatgcagatgaacaagtttatattgtaccttcaatttatgataatgcccttagcttatttgataataaagctgaaaacagcaatattaaaatctctaatttcaaatttatagagaaaaaaaaatcaagttatcttagtgagcggtga

SEQ ID NO: 317607 - DNA, 216 bp, Proteus mirabilis
atggacttatcaaagcaaaataataacagagaaactgaaagttatgataatggtttaatgggaagtcttgtgcttcaaataaatcagaaaaataataactggtatattacatcaacggtatcgacaagtgattcattaaattttgatgtatacgcgaaccctaaatcagtctctataattgcttttacgtggtgtagttctactcctcaagaataa

SEQ ID NO: 317608 - DNA, 1830 bp, Proteus mirabilis
atgtatgaacgtgattttaatggattgcgttttgctatcgggttaatgagcacttggaatttacagtccttagccagcttaacagtattgagcagcagtaaaatttatgcagcatcaatcgggaataattcatcaagtagggtggtgaataaacagcaatcattaactccgatttatgcttttttaaatagtccaggtgaagttcgtatttatcgccaaggtaaattattaaatattcaaaatttcccgatgggtaattttgaagttgataccagcatgttgccttatggtatttatgaagtaacgattgaaaccgttattgatggcaaggtagtgacaacacaacatcaaaccattaataagtcttttggcaccgctaacggtaattttgaccaattaaattgggaaatttatggtggctatattgattttgataaacgtcattatatcaaagagggtggcgcttataaccaaactcccgaaaaaagttatttaatcggtagctcttttgcttataactttcctctgttatccggtattcgttttcaaatgtctaactatggatttgataaatttattgtacaggagacgaatatcagtgtagcggtaaataactatctttctattgcttggcaaggaatgttagagaatcatggtagtcaccgtaatattagtacgctttctattaatatcccagaaggctatggttcattatgggcatctaaagagaaaactatcgtaagaggtgatttaccgctatatgaggctgacagttactcttatggaggaactgtcaatttcgataagataatggatagaacgggttcatttactatcagcaataccaaagataagcgagttggtagtgattctattaattatgaatatgcaaatacattattttcgggacgttatggcacggtaggattaagagctggggttcagcgttatcattatgataatcaaaatagcactaatgaaaaatttattaatcttgatttctctttacctctttcaacgtggttaagtactgggatctcttcaaccaatggcaatgtaaaagccaatatttatgtgaataagaattttgaaaactccgtgatcactaatgcgggcgtttctgtttctaagttagtacatgataaagataatggtgaatctgacttctcaacactaggttacgcttcttatgatacgaagtataactctggtacggtgaccattaatcgccctgataataaacgactcaatggtaatttaacttctcgtggctctatagcttatagtgaagggatgatcacacccagtggtcaacaaggtaaatctggcattattatcaattcagacattaaaggtagtggcagtatgctcgctaaagttaacgggcaaaattacccgattagtggaaaaaatacctttattccattatctccttattcagattatgacatccaattaatgaatgatggcaaatcgaaagacagctttgacattatttctggccgaaataaatccgtcacattgtatccaggaaatattgccttttatcaaccggaagtgaggcaattagtcacggttttcggacgtctgaaatcccctaatggtgaacttttaaaatatgcttcaattcgaaaccatattggtcgaactaaaacagatcaaaatggtgagttttcaatggatgtagatgtccgttatccggtgatctcgttactacaagaagatcagcaaacaatctgtgaagcagacttagatcttaaaggtgcacaaggggctatgtgggtcggagaggtaacttgtcaacctcagtctagtttcgtaaaaagataa

SEQ ID NO: 317609 - DNA, 522 bp, Proteus mirabilis
  misc_feature (506)..(515): n is a, c, g, or t
atgcgtaagagtattatcgctttatcaatattaggtattattttttcgaatacgattaatgctaatgaaataaaaagaattaaagtgggcggatatattattcctccggcatttgttaatgctttagaggaaggtatgtcggtgcccgttttcttacgacttaatgatgcaaataaacaaaaccaaagtgaaaagaaaattgcagatgcgattattgttatcgataatgataaaataaaactatcaagtattcaattaatcgaaaataatcaaggcgcaacactaaatcagttattagttgataaaattgaaggtaaaaaaaatgctatctttaatgaaaataatagtatagctattgatagtaatgctattcttcaattaaatgtctcttcatttaatttatcattagatgttgataagtcagcttttgcacccaaagaacatgctagacaatccatattaggaaattcatctgttaattcattttctgctgtggccaactatgnnnnnnnnnngatttag

SEQ ID NO: 317610 - DNA, 387 bp, Proteus mirabilis
atgaaagataaaatgaaagaaattgaaaatcagattgagctctattatttagctaaaaataaaattgaaagcattcgacaacaaatagctgaggaaaaatgccctctaaaaataggtgatataattaaatataagaaaaaggataaaatatatagtggtaaagtcgacaaaatattttttgtagttaaaaagatggaatttttgggaccactaaaaagtaatgaagttggttggggggttaatgttaatagaattttaaaaactactggaaagcttagtggtatttctcatggtgtgaatcaatttcaacattttattaaggatggtatttggcaagaagaagatttaacctacgatgagcgatttgaacgattgttagatatatga

SEQ ID NO: 317611 - DNA, 888 bp, Proteus mirabilis
atgatgttcaacactattgatgaagcaaaagaatatgtcgttttgctcacaaataaagcgagaaccattgaagatattgactctaatattacctattataaaaaaatggtaaataactcacatagtgaagaatcaaaaaatttgtggctttcagaacttgataaattgaatgagtggaaaaatagtgataattttaaaaatggaatttatccccaaggtattgatgaactgattattgaattattagaatggcgttcagtaatttatgcattccaacatgttgaaactagacgagaaccatttaaagaaagtggattctatgctcaatggtatattggtgctatatatggtgtgttttcaatatttggaaagttgctaagcaaagataatcgtgataattctttaagaaaactatggagaattatttcaccaatcatgttaactgaaaaagcatgtactaaacaagaagtggactttatcaacgttgctctcgatgtcacatcgggtcgttttacgaataaaaactcgcaagcattgttgtttagaaataagttaatttctcacaatgagtccatgccagttataaagtgggatgaagttgataaagactttgcatttttaattcgaatgtggtcattgctaatatcttggagttcatttggattgtttcagccatttaggactggtgaacaagtgtttcaaggggttgaatcaatgttcagtaaatcagaaataacaaacttaaagctcaaaagagaagaatatttaaagatggtagaaaggtggtccacaagctatatccatacaggctttacagattttggcaggggcgctttttcttctttagaagccaaagtatccattgtttcagacaataaaaaagcttga

SEQ ID NO: 317612 - DNA, 1041 bp, Proteus mirabilis
atgaataacggtgtggtgacagtagagctatctaatgggcaaaaggtcacactcgatagcattaagaagatgcagggggatattggtaataaagctgatttaacattatcaaaaacacaatcattcacatcagcgatagaagcaacaacgaaactaacttcaaaatcagcggatgggaaaacatcaatatcattgacgaccagtaatgcaggcggaaccaatatcgaactcaattctgcatcgggttataacgggatacaaataccaaaatcgtcagggacaataatgcttgttggtgattatggagtaggacagaaaacattaaatacaacaggtcgcctgtctgatttactattaacacctacaggattttggtcatatataaatccagcaaatatgccaaaaggcgttgttacttatggaagttgcatttcaactaaatacgcatctgataattttcaaaacatcctgttacctaattacggctctgattatatagccattcagagaatcacaaatggagaggtctcaactgttcagttgttatcgtcgaataaatttactgttgattcaaatggattttataaacgcgcctctccaattatcgacatcaatcccgacggcacattcaccactaacgacgaatcagaaggtgctacagttactcgagtagctcagggtgaatatcttatcgaaggcgttttaggctttaactcagatgcaggttggggtggtgttgatggtggtattgaaattccactagatgttaataaacagccgttgatatgggtagactctgaagttatgggggacggttctatcctcgtgagaacgtatcatcgaactcaccctaacgcacctaaattcgcccgtaatgacattgatggttacaaagacggcgacccaatagatatccctgatggtcgttttatctctgttcgtgtacagatgccagagcaatccatctataacgtgagaatgcatgagatggaagaagcgcagaaggtggaagaggagcgcagacaaaaagaagataaataa

SEQ ID NO: 317613 - DNA, 348 bp, Proteus mirabilis
atgaaaaagccaatcgaagaacaaaaccaagggcaaattgaatgggttgttgtcaatggtgaccaagccacagtgacattagaacaaccgattatgcgtggtgaaaccaaaatcgacaaagtgacggtgcttaaacccaattcaggcgcattacgcggtgtgcgtttacagccgttaatggatatggatgttgatagcatgatgcaggtgctaccgcgcatcactatgccaacgctaaccaaaaacgatgtgctgtctttagccgcgggcgacttggtaaacctaagtgtgcaggtggtcaattttttattaccgaagtcggttatgcccgattcccaagcgaattaa

SEQ ID NO: 317614 - DNA, 516 bp, Proteus mirabilis
atggcgttaccacgcaagctaaagaattttaatttatttatgaatggcaccaattatgtgggcgttgcggaagaactcacattacccaaaatcacccgaaagttagaagcctatcgcgggggcggtatgaatggttcggtgcaaattgatatgggtcttgatgacggcgcgcttgatagtgagtttactctcggtggtgctgatatcgacgtttaccgccaatggggtgcctcaaccattgatgccgtacaactgcgtttttgtggtgcttatcagcgtgatgatacgggggaagtgcttgctgtagaggtggttctgcgtggccgttatagcgaaatcgatccgggtaactggaaatcaggcgacaacacacaaaccaaagttaccgtaaaacccacttactacaagttagtgatggacggtcaagaaatcattgaaattgatatcgtcaatatggtggaaaaagtggacggtaaagacctgttacaagcacagcgtgacgcgctagggctttaa

SEQ ID NO: 317615 - DNA, 1173 bp, Proteus mirabilis
atggcacaagattatcatcacggtgtgcgcgttattgaaattaacgaaggcacccgccccattcgcactatcagcaccgctattgttggcgtggtttgcaccgctgatgatgcggacgaaaaagcctttcctttaaacaagcccgtcttattgaccgatgtatcacagggtatcggtaaagcagggaaaaccggcaccttagccagtaccttaaaagccattgcagatcaggctaaacccatcactattgtagtacgtgttgcacaaggtgaagaagaggcagaaaccaccactaatattatcggtggtactaccgaagaagggctaaaaacagggttacaagcactgttagcatcacaagcccaacacggcattaaacctcgtattattggcgcgcccggtcatgacacgttagcggttgccaatgagattgcggtgatttgtcaaaagctccgcgcctttggttatgtgtctgcttacgactgtaaaaatatcagcgaagcaatcaagtaccgtgacaactttggtcagcgtgaattaatggtcatttttcctgattttacctcatgggatagcgtgaccaacagcgaatcaaccgcttacgccacggcgcgggctttaggtctgcgtgccaagttagacaatgatatcggttggcataaaacgctatccaatatcacagttaacggcgtgacaggtatttctaaagatatctattgggatttacaagatcccgctactgatgccggcttactgaatgaaaaaggggtgactacgcttattcgtcgtgatggttttcgtttttggggttcgcgtacctgttcggatgatccgctgtttgcctttgaatcttatacccgtagcgcgcaagtcctcgctgacaccatggcggaagggcagatgtgggcaattgataaaccgttaacgccatctttagcgcgggatatcgttgaaaccatcaatgcaaaattacgttcactggtcagtcagggctacttgttaggcggtgaatgttggtatgacccaacatcaaatagcaaagaagcactcaaagacggcaaactcacactggattatgactatacacccgtgccaccaatggaaaatctgatgttacgtcagcgtattaccgataaatacctgatggatttcggtaacaaaattaaggggtaa

SEQ ID NO: 317616 - DNA, 420 bp, Proteus mirabilis
atgattgagtctattaagaatattcgacaacatagagaaatacctttatctaagggggttgagtgtgaagttaaatttagcgaatttgatagctttattccttatttcgccttatcagatgattgtgagttattagggcgagaagtttatcaacattgtctttctggatattatggtgacatattaccgccactacctttaacgaatgaagagcttgttgcaatagaaaagaatacgcaacaaaccctgttacaagaggcattacataatattattctgcttaaagatgcacaagatggtgggtatattgaacctgaagatattcctcgtttaatcgtttggcaaaaatatcgttatgaattaacaaaagtagatttttctacttacccaaatattcaatggccaaagaaaccagaatag

SEQ ID NO: 317617 - DNA, 1674 bp, Proteus mirabilis
atgagcgctaaattttttgccttattaacggtaattggtgccaataaattggcaaaagccacggcactaggcactaccttaaaaattacccaaatggctgtgggtgacggtggcggaacgttgccgacacccgatacacaacaaactaaactcgtaggcgaaaaacgccgtgcgggattaaataccttatttgttgatccaaaaaacgacagccagattattgctgaacaagtgatccctgaaaatgagggcggttactggatacgtgagattggtttatttgatgatgaaggcagtttaattgccgtgggtaattgccctgaaacctataagccacaattacaggagggaagcggacgcacacagactattcgcatgatattaaccgttagtcataccgagtcagtcgagttgaaggttgacccctcggtgatattggcgacccgtgagtttgtcaatgatgcgattgaaagtgcatcaaaacagacattagcggaagtcgctaagctttatgctaccaaagccgaattaagcacgggattaagtaaggtacaaaaatcagcggatgacgctaacacaaacgccaatagccgcgtacctagtacccgtaaagttaataataaaccactgagtaccgatattaccttaacggcgagtgatgtaggcgctgcaacaccggcacaggtgaatgaagccaagacagccgcatctaatgcacaggccacagcaaacagtggtgtgagcaaagcagataccgcacagaaaaccgctaacgatgcagtaagcaaagctaacgccgcgcaaactgccgcaaataatgccaatactaatgctaatggtcgcgtacctagcacccgtaaaattaacaacaaaccattaagcgctgatattaccttaacggcgagtgatgtaggcgctgcaacaccggcacaggtgaatgaagccaagacagccgcatctaatgcacaggccacagcaaacagtggtgtgagcaaagcagataccgcacagaaaaccgctaacgatgcagtaagcaaagctaacgccgcgcaaactgccgcaaataatgccaatactaatgctaatggtcgcgtacctagcacccgtaaaattaacaacaaaccattaagcgctgatattaccttaacggcgagtgatgtaggcgctgcaacaccggcacaggtgaatgaggccaagacagtcgcttctaatgcacagaaaacggctaacgatgcagtaagcaaagctaacacagcacaaaccacagcgaataatgcgaatagcaatgccaatggtcgagtacccaatactcgaaaagtcaatggaaaacagctaaatgtagatatcaaattaacggcagaggatgtgggaggtataacgcaaagtcaaggtgatgctagatatcaattgaagaatgccggtatagaaggcggtattggtagctacattcttggatggataaaagatgtgaataatggccagattgtatctggtgggaatatttatcgttcggcaattaattcaattaacttttacacgggatcaacagaaaataatttcggaactatatcaataggttcagcaatagctggatcgtggaaagctctgggaagcgctagtagcaaaggagctattcaaaatggcggtgtagtattatttgtgagagtagcttaa

SEQ ID NO: 317618 - DNA, 612 bp, Proteus mirabilis
atgaatagcttattaccgtcaggcagtagcccattagaaaaggcagccgccattgcctgtcaatccttgcaaaccttgccagtgcctttacgccaattatggaacgccagcacatgccccgttgagttattgccgtatcttgcgtgggcttggtcagtagatcgatgggatgaaaactggtcggagcctgttaagcgtcaagtagtacgggattcgatgtttattcaccgacacaagggcaccattggtgcgcttaagcgtgtggttgagccgttaggttacatcatcaaagtcacggagtggtggcaaaccgatgatccgccgggcacatttcgccttgatgtgggcgtgcaagaaaacggtattagccaagaaatttatgatgaattagagcgtttgattgccgatgcacgccctgttagtcggcatctcttggggttatctatcaaccttgattcgcaaggtgagttttatctttctgccgcgacatttagcggtgatgagttaacggtttacccctattttgcagaagaaattaccgtgtctggtgcgccattaacggcggtcggagtacacattattgataaagttgaggtcgcacatgagcgctaa

SEQ ID NO: 317619 - DNA, 909 bp, Proteus mirabilis
atgccaacgattaatttaagccaattaacaccgcccgatgtgattgagtcgttagatgcagaacaattattacgtgaacgcaaaacggcgttgattgctgcgatgccaccgcatttacgtgatgcggttgctaacacgttatcgttagagtctgaaccactgaccaagctgttagaagaaaacgtctatcgtgagttgttattgcgccagcgtatcaatgagtctgcccgcgcggtgatggtggcgtatgcaaaaggggcggatttagatcagttagcggcgaattataatttatcgcgtttggtgttacgccctgccaataacaacactattccgcccacaccggcgattttagagtctgacgatgatttgcgtttacgcattcccgccgcttttgaggggttaagtgttgcagggccggtgggcagttatgaatttcatgcccgtagtgccgatggtcgggtgtccgatgtgtccgcgatcagcccagcgccggcaaatgtcactatctcggtgttatctcgtgagggtgacggcaccgcatcggaagaattactgcgcattgttgagcacgcgttaaacgatgaagatgtgcgaccagttgctgatcgcatcaaagtgcaatccgcccaaattatcccttatcaaattgatgccacgttgtttttatttccggggcctgagtcggagccgatacgcaaagaagcaaatcaacgtttgacgcaatacatcacagagcaacaccgcttagggcgtgatattcgcctgtcagcgatttatgccgcgttgcatgtggaaggagtgcaacgtgtggaattaaaacaacccactaaagatgtggtactggataaaacgcaagcctcctattgcacccaaagcaccttaaccattggtggttcggatgaatag

SEQ ID NO: 317620 - DNA, 339 bp, Proteus mirabilis
atgaactatctcggtatgaatgcacaaaccggtgaacgtattaccgatattgagcacgttcgccaatcggtgaaagatatttttaacacacccattggtagccgattgatgcgccgtgaatatggcagtttgctggccgatttaattgatggcccagttaacgccaagatgcgattgcaattaatgtcagcgtgttacaccgctgtttatcgttgggagccacgtattgtgatgacggccattgatattcatagccaacaggaacaggtgattgtcgatatcaccggctattacgcccataaccaacaaccgattaatttctctctaccggtgacataa

SEQ ID NO: 317621 - DNA, 627 bp, Proteus mirabilis
atgaatatcgcagaacttatccgaaaaatacaaaacttgatccgcactggcgttgtgattgatgtcagtgcggaaaaagggtgtcgagttaaaacgggcgacaatgaaaccgactggcgcccgtggcttactgcacgtgctggtaactcgcgctcatggtgggcgcccaatgttggcgaacaagtgttattgctatcaatcggtggcgatttaaccacctcgtttgtgttaccggcaatatttagtgacgatttttcagagccgtcaagctcattagccgcccatcgtcatgagtataaagacggtgcagtaattgaatatgagccggcaaccggggcgctaacagtagcaggaattaaaaccgccgtagttgaagccagcgagtcggtcaaagtcacgtcacctgacattacgtgtgtcgcgacaaacaaaatcaccttagatacccctaccgttatttgtaccaacaacttaactacgggatcactgacggtgcaaaaaggcggcaccatgaccggtgatattactcatgttggtgggagaatgtcctctaatggcgtggtggtttcaacccatacccacggtggcgtgcgtactggtgatggtaatacggggcaaccgcaatga

SEQ ID NO: 317622 - DNA, 384 bp, Proteus mirabilis
atgtctattgaaaattttagtgccggtgttcaatatgatgattataaaggttcaactgctgctgataatcaagatattaataatttttataaatatttagaaggaaagcaactaaaaattaaagataaagttatcgttggaatttctttggatgcttctcatctatctttggatcctgatcatgagttatctgttagatttttcttatccgatttacaaggtgaaagtgatgttccaacactaataaaatcaaaaaatccattgagtgtaaaagaaataaagattgatatgtcatataaggaattttttcaattatttaaacgatttaatttaaccttatctactaagggattattagaaaataaagatattgatattatttaa

SEQ ID NO: 317623 - DNA, 639 bp, Proteus mirabilis
atgaacgctgatgatttcagcccgttaacccaagcattagccgctatgttggcaaaagcgtcacccaatgaacgtaaaaaattagcccgtgaaattgcccgtgatttacgcaaaagcaatttgcaacgtattcgtgcgcaaaaaaatcccgatgggtcggcattcactaaacgtaaagcatcaacggttaccgtgttgcgaggaatgaaatttgtctggaaagggcaaccacgtagtttaaaaaactggcgattacgcaaaacaaaaaaaggtgaggtgatcaccggttacgatttggaaaagaaagccgaacgtagtttttataaacgtgatattttgcgttttattgaagtaaaaaaagacaaaatcagtacgtcaaaacccaataaacagactcgcatgtttaagcgtttagccactgcccgttatttgcgaatgtcagcaaatgataaaggtgtcacgctttcttttgctccgcaagtcgcgggcattgctgcggtgcatcattacggtttaaaagagcgtgtgcgaggtaagttattagaaattcaataccctgaacgaaagttgttaggcttttcaccggcagatattaaacatattgaaaatcaattactgacatttctcacaaatcactaa

SEQ ID NO: 317624 - DNA, 438 bp, Proteus mirabilis
atgaaaaagcctgcaaacctacgtgataccttaattaaaaaggtggcctatttaggggataaccccgataggctctacacctttattgacggcggggcgattgtggcaagcggtgcccgtagtcaatcttatgagtatcaatacaatctcaatattattattgatgattatcccggtgaccaagatgtgttaatggctgtgatcattggttggattgaacaacatcagcctgatattttccttaatcccgataaacgccaaagtcattttacctttgatgcctttattgatagcaaccagaccgccagtattagcattgatttaaagttgactgagcgtgtcctcgttaatgtgcaagcggataaattggttgttggtgccattgaagagccggctgatccgtttgaaagttgggagagtgtggctcatgaacgctga

SEQ ID NO: 317625 - DNA, 504 bp, Proteus mirabilis
atgaaaaggaacgtactgcttattattgtggcgtgtgtgatgggcttgctactgatatttaagtttgatgctttgctcactgagaatagccagcttaagggtgataatctcgcccttaagaaaagtgttatgagtcatcaagacgccattgaacattatcaggaagaacttgcccgcttatcagaattggataaacaacacacaaaggcgttaaccgatgcaaaaaataatattagccggcttaatgatgagttgcgcaataatactaaacgggtgtacatcaaagccgattgccccaaccccgataatcacaccaccgccaccgccggcatgggtaatgcaacctccgcacgacttaccgaaacagctcaacaagattatttacgtctcctcgaaatgatggcggagaataaggcgcaaacggaatatttgattgattatacaaatcaattattacagtacatcaataagttaaaccatgaaaaagcctgcaaacctacgtga

SEQ ID NO: 317626 - DNA, 432 bp, Proteus mirabilis
gtgagtaagtttacattcagtcagcgcagtaaaaataatttaatcggtgtaaatgatcaactggtgagagtgatatatcgcgcgttagaaatttcaccggctgatttttctgttattcaaggcgtcagagaactcgctgaacaacgaaagaatgtagcgaaaggggtgtctcaaacaatgaattcacgacaccttgttgaatgccctattgatggtgtttgtgaaggcaatgccgttgatattttgccgtcaatcattaagccgggaatggattggaagccagaatattttgatcctgttttgaatgcaatcaaacaagcgggtgatgagttgggtgttaaattacgctttggtaaaaactggaaaagtgatcccagtttacccgttgaaacccgctttcctgattatcctcatattgagatcccacgatga

SEQ ID NO: 317627 - DNA, 315 bp, Proteus mirabilis; identical to SEQ ID NO: 300087

SEQ ID NO: 317628 - DNA, 207 bp, Proteus mirabilis
atgcggatttatacccagcaaggggataccgtagatgatatttgttggcgttactttggccagtcatccggcatgattgaacaagtattagaagccaatccggggctggttgaattaggggcaagattacctaccggcaccgcgattgagttacctgatgcaccccaacaacacagcaccacaccgattttacaactttgggattaa

SEQ ID NO: 317629 - DNA, 456 bp, Proteus mirabilis
atggattatgtttctgctaaccctgtgccacaaaaagacgaaaccattaaaaataatggctttttccctgatattcaaactcgtgattttcaattgcaaactcgcgtcgatggcactgtgacaccggaacggctgaaaagcacgttattgaacgccatgattgaagtaaatcgtgaattgtatcagtggcgtattggtcaagctgcgaaaacattaaaagaggtgcccgctgaacagattaacggtgaaagtgaactgatgattttatatcagcgtgcggtgttctgttttgcaaaagccagtttaatcgagcgttatcgcgatattgatactaccgcacaaggtaataaaaaagccgacaccatgacgccggctattgatgaagtgtggcgtgatggcaagtgggcgttacagcgtatcaaaggggaaacccataacacggtggagcttatctaa

SEQ ID NO: 317630 - DNA, 669 bp, Proteus mirabilis
atggcattatctccgtgggaaaaacaccgcatgagccttagcgcgcaacagtccagccaattgggtgggcatgttagccgcaatacacagggctatcacatgatgctgttacgtcttgcgacagataaaaaagagctaaaacattttcagtcacgcgaacgcaaagaagcttataagcgcaagatattagccaattatcagccgtgggttgatggggcattgtccggtggtagcggtgtgcaagatgatgtcttaatgacgattttgctgtggaaaattgatgcgggggattatgagggggcgttagatattgccgtttacgcattagctaaccgtttagtgatccccggggttaaccgcaccacgggcaccgtgattgccgaagaaatcgccgattctgccatgcgagcgtatgccgtgaaatcaccggtatctttagcaacgttagagcgtacacgtgccttgaccgatgatgaagatatgcctgatgaagtgagggcaaaactctacaaaatcttagggttagtgctacgcgataataatcgcccacaagaaagctactgcgtattaagtcgagccttagagctaaacatgaatatcggtgtgaaaaccgaattaaaacaactcgataaagtgctcaaagctcagcgtgacgctgaaaaagcatag

SEQ ID NO: 317631 - DNA, 1146 bp, Proteus mirabilis
atgaaaaaagaaactcgttttaaatttaatgcgtacctcacgcaactcggtaaaatttacggtgttagcgcccaagagtttagtgatacaaaggttcaaattgaaccgtctgccgcgcaaacgctggaaaccaatattcagcagtcagcagaatttttaacacacgttaatatcgtgcccgttgatgagcaagtgggtgaggccatcggtttaggtatcggctcaactatcgcaggcactaccgatacaacagcaaaagagcgcgaaacaagtgatccgattaagctgaccaaaaatagctatcattgccagaaaaccaattacgacacccaccttgattacgccaaaattgatatgtgggcgaagtttaccgactttcaaacccgtatccgcgatgcgattatccgccgtcaggcattagaccgcattatgattggttttaatggtacgcaccgcgccgataattctgatcggacaaaataccccttactgcaagatgtgaattcaggctggttacaaaaagtacgcgagcgtgcgccagagcatgtgatgggtagtgaaacgaaagacggtgcaaccacagcgcagcctattctggtcggtaaagggcaagcttatcaaaatcttgacgcattagtgcaagatacggtcgatactgcgattgatcctgaatatcaggacgataccggtcttgttgtgatttgtgggcgtaaattattagcagataaatattttccactggttaataaagaccaagataacagtgaaaaactggcagcagataccattatcagccagaaacgtatcggcggtttgccggctgtacgtgcgccgttctttcctgacaatgcgttttttatcacccgccttgataacttgtcgatttatttccttgcggattctcgtcgtcgtcaagtgttagataacccaaaacgcgatcgcatcgaaaactacgagtccgtcaatgaagattttgtggttgaagattttcgcggtgtggcactggtcgaaaatattgtttttgaagatgtaaaagagacatcgccagaaacaaaaaaagagggggtagcttctgaaaatgaagtcgtcaaagacgacaaagcagtaacagaagaaacaccaactgaaaataaaaaggcgaaataa

SEQ ID NO: 317632 - DNA, 810 bp, Proteus mirabilis
atgtcgaagaaatcaaaaccggttcgtctttgtgttgaaggggcgacaacggacgggcgtcgagttgatcgcgaatggttaacccaaatcgcgaaaaactttgatcccacggtttatggtgcgcgagtcaatatagatcactataactattcatgggcaccacgctttggtgatgtggagtcggtgtataccgaggaaattaaagaaggggcactggcgggtaagttggcactgtatggtgtgatcaatccgacgcctgatttaattgaactcaataaaaaacgtcaaaaagtctatacctctgttgaaattgacccgagtttttcagataccggcgaagcgtatttagtcgggctggcggttaccgataaccccgcgagtttaggcactgaaatgctgcaatttagtgctaatgcacaaagtagcccgctttcagagcgcaaacaaagcaaagataacgtttttactgctgcagaagaaaatcactttgaatttattgatgaaaacccgcagagcgagaagccggggctttttagcattattaaagagatgttttctaaaaaacaacacagtgatgatgcgcgatttaccgatgtgcatcaggcggtggagctgtgcgcccaagaagtacaaaccctttctgcagaaattaccgcattaaaaaacgccgaccaatgcgaagcggtaaaagcgctcacgcaacaactcacggaattaaaaacccaatttgaaaatacagacgcctcgttctcacatcgtccgccggccacgggtggcgaaaataacagcgaagtgctgacggattgctaa

SEQ ID NO: 317633 - DNA, 1755 bp, Proteus mirabilis
atgactattacagaaacatttgataaccgaaaaaaagcaatgcacctgtattttgccggttaccgcattgctcgcatagcgggatcgctaggcgaaaaggcgtccactattcacagttggaaacgccgcgataattgggatgaaatcagccctaccgaacgcgcagagttaaccgttgaggcacgttattgcaatctaattttaaaagagagcaaagaaggcaaagattttaaagaaatcgacttgttaggacgtcaacttgaacgcatggcgcggatcagaaaatatcaaaacggtggtaatgaaacggaccttaatcctaaaattgctaaccgcaacaaaggcgaacgccgtcagccagagaaaaacttcttttcagaagaacaaattgaaaaactggaagatatctttcgcaatacgttgtttgaatatcaaaaggtgtggtatcgcgccggtcatcaccgtatccgcaatattttaaaatcccgtcaaatcggcgcaacattctactttgcgcgagaagcctttattgatgccctgaccaccggacgtaatcaggttttcctctccgccagtaaagcgcaagcctatatgttccgtgaatacattatcaaaatggcattggaggttgatgttgaattaaaaggcgacccattgatgttaagcaacggtgcaacgctctatttccttggcactaatgcacgcacagcacaaagttatcacggtaatttatatctggatgaaaccttttggatcccgaaatttcaggagttacgcaaagtgacttcgggtatggcgatacaaaaacattggcgacaaacctacttttcaacaccgtcaaccatgagccatgaagcgtaccccttttggtcaggcaagctgtataaccgcgggcgcaaaaaagaagacagagttgatattgatatctcacatgaagccttagtcaatggacgtttatgtgaagatgggcaatggcgacaaatcgtcaatattgaagatgcactacgaggcggttgtgatttattcgatttagagcaactcaaaaaagagtatagcccggacgaatataacaacctgttaatgtgtcactttatggatgatatcgaatccctattcaactttaacatgatgcaaaactgcatggtggacagttgggaagtgtgggacgacattcaaccgttagcgctgcgcccttatggttatgatccggtttgggtaggttacgaccccagcaaaggcggtgaaaatggtgatagtgccggttgtgtggttatcgcgccgccgaaagtacccggagggaaattccgcatattagaacgccatcaatggcgtggtatggattttcgcgcacaagctgacgccattaaaaaaatcaccgaacgtttctatgtggaatatatgggcattgataccaccggcttaggacatggtgtttatcagaatgttatccagtttttccctgctgcgcgtgagtttatttataacccgaatgtcaaaaatgccttagtcattaaagcctatgacgtgattagtcacgggcgcttagagttcgatgcgcagtgcgttgatatcattcaatcctttacatccattcgtcgtaccaccaccggaagcggtaaccgcccaacctatgaggcctcgcgcagtgaagaaagcggacacgctgaccttgcatgggcaacgatgcatgcccttttcaacgaaccattaaccggcaccaccgagaacagtaataatattgtggagatttattaa

SEQ ID NO: 317634 - DNA, 435 bp, Proteus mirabilis
atgaaatttttagaagaattatgggatgcaataaaaggcaatacagtagctagggtaaaagatccaattataggaacattcgttatttcttggcttgtatgtaactggtatgaaatatctcttcttttttggggtgatggtaagtcgtgggagcgtttaaatagatttcattcatatttaggtgctgatattttaaataattacattcttgttatagtttcaccaataataataactatactttatctttttgcttttccgtgggtttcttttttcgttaaaaaattacaattaagagctactagcttattatttaaacaggctattgatattgaaataaaaaaagtaaatgaacaattagaacttaataaaataagattaaaatctaatccagataaagattatttatctgaattagttaaaaatagatattga

SEQ ID NO: 317635 - DNA, 2601 bp, Proteus mirabilis
atgaaaaaatcaattctagcaatagtagtatcttgcatattatcttcaccagtattagcaagtacaaccctaacaacagatagtatttgtgaggaaggtatactggacatcaccaatggtaagtatacgtattgcagccgtattaacgtcaatactacaaacattaaaggtgctaacaatactatgtatggtggtgatgcaatttatgatcatggccaattacaaggttggggtaaaaatgggcaagtttatgtgaaaccagacggcacactggctgaaggtgttaactggcaagatgctggtctagccggtcgtatttggtaccatgacggtcaattacaaactatcaacggtaaaattgaattcgttgaaaaatctgggctgtatttagtcgttaatcgtggtgaaatctctaacagtgtcgctaacattgctggtaataaagtcactaatcttattcaaggtgataataatgtcactaacgctatcgatggtcgtattgatgcaaaattaggtgatgtttctggtgaagttaataaactgaagccgcgcgttgaagctaatgaacaggggattgctaaattaaacacaacagttactgagcaagataaaattattggcaaacttggtgtacgaatgacggatgttgaatacacggctgataacaataaatttgccatcactaaactaaatactgaaactcagcgtttagaagaagtaaaagctgatcgcgttgacctagatgcattagagcaaaaaggaaatgaagcttataacactgtaaataataaagttgaaaatgtgtctaatgacgtagaaatcattaatggcaaaatcactaaagtagaaggtgttgctggctctattgtttctaacaaagagtttattattaacaaagctggtgacgtttacgaaggtgtgcgtactgatatcactaatgaaattaattcaagcgtaaatgctgctatcggtggtattaaaggtagcgttaataacacttgggaaaataacaaaggtaatgtcaaagctaatgtgagcggtaaatatgagggtgctaaaactgaaatcactaacaacgtgttaaatgaaattggtgatatcgctttaggtgacagtgaaacaattgtaaatattaaaaatgatattagcaaagatgtcactaatcagttaaaacttgatgctaaaggtttagcaattaacatcaaaaaagatatcgttgaaggtaataacgaatacgttaatcaaatcaaaggcgaagttaacaaccaagttaacattgcaaaagatgcggttgaaacagtggttaaagatttccaagatcaaatagatgcaactaatgcaaatgttgatggtcaggttaaacgtggtgaaactgcttacgctaacctgaaacagcaaagtgatgataactcacaagctatcattaatataagcggtaaagttgatggtgcgattgaagacggcacttactgggttactaatttacaaaaacaaattgatgtgaatgttgaagcaggtaaaactgaattaacaaatatcaatggtaaagtcgacaacgcgattcaaatcggtggcgacaaaattactaacttagaacaacaaatcgtagaaggcaacacaactatcattgcagacgttgatgctaaactggaagacaattcgaagaaactcatcgctatgggtcaaaacgaatctaaccgtttagaacaagacttacgtaatgacggtcaagaagcgtacgatgatttattagctcgtatcgataacgcgacttctaaagaagacgtagatgcgattcttaatgaatacaagaaacaagctcttgccaacatccgcgcaacagttgctaaaaacggtcctgctgtagttgacggtttacagcaagctaaagacgacgctaaacaaaaagcagaggattatgtgaagaacgaaatcgaccaagccattgcggataacacgcaagcaggtaaagattacgttaaagaccaaatcgacaatgctgttgctggcatgactccgggtgctaatgacttagatggtcgtattgagaaattagaaaatacggttaacaaaggtcaagtaatcgttaacaacgttaaagatgctggtaaaactgcgggtactgcgttaatcaacaaagcaccagtagtaaaaggtgaagtgattgctaaagcgaatactgctatcaacgcaggtcgtactatcaatgacaaagcgaatgaagcattatctatcggtgctaacaacacagtagcaatcaatcaagaacgtacggatcgtattcaaggtcagcgcgaaacattgaaaacttctatggcttatactgattctcgttttaacagcatgcaaaaccaagtagatgctaaccgtaaacgtgcagcaggtggtatctctggtgtttctgcgatgacaaacattccacaattgtctggttcggctacttattcatttggtgttggtatcggtgggttcgatggtgagcaatcaattgcagcgggtggctcagctcgtgttaaagataatgttgtaatccgttcatctgtatccacatcaactgaaggagaaatggtgtggggagctggcgttggttttgaatggtaa

SEQ ID NO: 317636 - DNA, 267 bp, Proteus mirabilis
atgggggctgaacaacaaaagtaccttacactttcttctggcgttaataaaagtaagttagccattggattaattgatatagatggaaaccaacgtattactttaggtgaaaaccataacggtggaaatggaactcaacttaacgatggcacgatgttgctaacctttaatgcatttgttgaagcgacaccaaaagcaatacaggaaaaaagtgttgtacctggagtttataatgccacggtagaatttgaggtttcttatgaataa

SEQ ID NO: 317637 - DNA, 813 bp, Proteus mirabilis
ttggcaaattacttcactgaatcagacttgccttttgaaataacgccagcattttttaaaccagaagtattattaaaatacaaaacagaccgggataggtatactcttaatagtcgtagtgtttattgtcgaggtgcatgggaattaaagacatttgatgtcaattctgctggacaagttcacacatacttaatatatcttagccacttaccgtatgaggagcaattgcattggaagcaatacaatgagcgtcctaaagctccaatttcaaaacgtgctatggaaaatgatattgaagggaagtggagtaacgattatgacgcattgctgagtttgaaagataaactagagaagttgaattctcaaggggtcccatggtggaaactcagagataaaaatgcacctgataaagttcattatccttatactagctcccgcgatgaatgggctgaagaaattttaaatttagaccagttgattgtcgaaggtttggaggaaaagtggcttaggaaaaaagcaaaggatttgaagttaaatcctgatgctagattacgcgcattaaaactaattgaggtgatattagttggtgttggatttgaagccgagcatgctcgtgaaatcatgacaccatttcatgaggttcacaatgcacgttcgatcttaaaagggcatactttggggcaggagtcagaggaacttagaaagaatgcgataactgaatttggtagttataaaaatcactacgaaaaaatatgtgccaattgtgatgaatcgcttgaaattataactaatgtatttggtgacattacatga

SEQ ID NO: 317638 - DNA, 144 bp, Proteus mirabilis
atggagccccaatgcttagtcttagagggctatttcttcttagtttccagaaaaaaaggttttctattacagaaatatttttttaaaagtatgggttttatgcttaaaaaaaagtttttaaaatccatttttagtataaattga

SEQ ID NO: 317639 - DNA, 582 bp, Proteus mirabilis
atgaagctaatagggatatgtaggcatgtagaccattttgttgataatggcaataaatcaactattgatgttagtaattctacatttatggatgctacaaataaggatgatatattgaattatggtagatattcactctcattccagccaaccattaagaatttacatgtgataactaataatgttattaatttaggcttatgggttaattcagggactgtgtcagataatgcgtcattaatgcttggttgcattgtaaaaaatgcagaaataaaaaactttacaggttcagaaataaaaaacccaacagatggagcagtggatattggtggtacttcgaagttcacagctagaaattgcactatatctggtatttatttttactcttcaggtgcagttggagatgcatctgaatttgttctaaatcaaacatccacaagtggagtgcatattttttatgggaaagtattcgttaatgcagatagtgcgaggttagcaaataaatattcaccgtatttaatcaaggacacaaacaggatggcatatacagatcagtatggaacggtgaaatatatcaactaa

SEQ ID NO: 317640 - DNA, 141 bp, Proteus mirabilis; identical to SEQ ID NO: 317581

SEQ ID NO: 317641 - DNA, 438 bp, Proteus mirabilis
  misc_feature (412)..(421): n is a, c, g, or t
atgctgtggtttaaaaatattttggtctatcgcttaaataaagagatagcgctgtcaatggatgagttagaacaacagctggcttcattagcattcaccccttgtagtagccaagatatgaccaaaacgggttgggtttcacctatgggtgatcgtggcgaagcacttatccatgttgcaggtaaacaagtcatgatgtgcgcacggaaagaagataagatcctccccgccaccgtcattaagcaagcgctacaagataaagttgaaaagttagagggtgaacaaggtcgtaaattaaagaaaaccgaaaaagcgacattaaaagatgaagttgtccacacgttacttcctcgcgcatttagcaaattctcacaaacctttatttggttagatttagataaacaattagtgnnnnnnnnnncaattagtgattgttga

SEQ ID NO: 317642 - DNA, 960 bp, Proteus mirabilis
atgaaaacgcaaacgataaataatccgagaacccctacacttctcgagtcactgtttcctatatttacaatggtggtgctattaggcggaggttacgccgcttttgacttacctcctgaaccactaatggtgttatcaaccgtcgtcgcggcattattagttaaacgattaggctatcgttacgacgaaatcttaacggctatctcacaaaaaatcgccaaaacgatgccggctttgctgatcttaattagcgttggtttattaatcgggacatggatggtgggaggaaccattccactgatgatctactatggattaaagatgatcagtcctgaaatgctatatgttacagcactgctagtgacatcattagtatcagtttgtactggtacttcatggggctcggcgggcactattggcgtcgcttttatgggcgttgctgtcggtatggaggctaatctggcagcaactgcgggtgctgttgttgctggtgcttattttggtgacaaactctcaccgctatcaggggatactaacctcgctgcaatggcggccagaatagatctttatcaacatatctgtcacctgctttataccacattaccttccttgatcctcacagcgattatcatgactgtttatggtatgaatggcgatttagcaggacaaggagtgcctgaaaaagtcaccttaattaccaatggattggagaatatttatcacttcaacttgatcctgcttattcctgtattagtcattttatatggttcggtcacgaaaaaaccgactattccagttatgctggcctctgccgctattgcgatgttgaatgcttatcttattcaaggatttggcttacatgatatcgtaaaaagtgccgttgatggctttaatgtctccatgatccaaggtaaagaagtacctgaattattaggtaatttattaaatcgtggtgtatga

SEQ ID NO: 317643 - DNA, 1251 bp, Proteus mirabilis
atggcaaataatacaaatctttctgaaacgttatttaaacctcgtgctaaacatgcggaaacctcaacgttaatacagtacacacaccctaaatctaatattgattcgtactctgtacttaatgggatgagccagcaaaattggtatcgcacaattcaacgtctacagtggatctggcgaggtatttcccccatagagatcgaagaagtattaagtcgcattgctatttttgatgcgccacgcagtgatgataaatttattgatacagtcgttggttatcgacgtggcaactggtcatttgaatggtctcatcaagcaatgatttggcaacaaaaagcgttacgagagacctcagaggaagctgccgctgattgttggttacgagcggcaaacctttatagcattgctgcttatccatttattaatggcgattttcttgctgatcaagcggtagtattggcgatgaaagcttttgaaaatgccatgaaattctcttcatttgaagtaaaaaaactgacatttaaattaacaggtaaaggaactactagtggatttttacatctacctaaagggtgtaaaggaccttatccaacagtcattttttgtggtggattagatagtttacaaagtgattatgttaacttttttaggcgctacttatcaccaaaaggtatcgcgatgttaaccgtagatatgccatctatcggttattctgttaagcagaaactcagcgaaaatacctgtcaattgcatggcgatattttacagcagttgggagatattccatggattgatcacactcgggtgggcgtaatgggatttcggtttggtgccaatattgcggtgcgtttagcctatctttatccaaaattgattaaaggtgttgtggcattagggccattaattcatgccttttttactcaagcggaattacagaagaaaatccccattatgtatcttgatgtactggcgagccggttaggattattaaatatagatgaaaacaatctcagactatcgttaagtagttattcactgaaaaaccaagggttgattggtcgtcgtatgccagtgccgatgatgagtgtttattggaaaggggatgaaattagtcctaaagaggattcgcagctcattgctcgctcttctatggatggcgatatagtagaaataaaagaaaaaccactttataaagggcttgaacaggcattaactaaaagcgcagattggatctatgctaaattaatataa

SEQ ID NO: 317644 - DNA, 1173 bp, Proteus mirabilis
atgtttgatcgtcctgagttttccgttggtgctatccatattaatcccagtgttgatattaaaggtaaatccccactctctggcgccagcactaatgccggcgatatcgccccaagtgctttagtccccaatattcactttgttgcgcctatcaacgataaatgggcaattggtgcatcaggtactactaactttggtttagctaccgactttaaaaaagattacccagcaggtttaattggcggtaaaactgatttaaaaaccatgaacttaaatttaagtgcaggttatcgagttaataaacaatttagtgtcggtttaggcttaaatgcgctctatgctgatgctgaaattacccgccatgtaggtgaagcaggtaagctattgggtggtgccttatctcaacatccagatcctgactatcagggattaggccgttatttatcaggcttatcgccaagtgatcgttttgcacaattaaaaggggatgcttggggctttggctggaacgccggtttattatatgagtttgatgaagataaccgtatcagcttcacttatcgctctaaagtaaaagtgaaatttaaagatggtgagtaccaaagtgatatccgctcattacccgcactagaaggtatgggagtgattggtactaatggagacaccatcaaaggtaaacttgatcttaacctaccggagatttgggaatttgccgcttaccaccgtgtcgcccctaaatgggctgtccattataatttagcttataccagttggagtgagtttaaagagttaagagcaacacgtaaaagtgatggccagcaactcttcaacaaagaagaaggcttccgtgatgcatggcgtattgcattaggaaccacttattaccatgatgataattggacattccgcaccggtattgcctttgatgatagtcctgttcctgctgataagcgctctatctcgatccctgaccaagatcgcttctggttaagtgcgggagcaacctacgcatttaataaagatatgtctgtggatgttggtttagcctatatgcacggtaagaaagtgacaattaaagagaagctatctgaaagcttaccattgccggcttatgaatttgaatcatcaggtaaagcatggttatacggtatgaactttaactatcgcttctaa

SEQ ID NO: 317645 - DNA, 246 bp, Proteus mirabilis
atgacaggtttccccggcttaaaagataaaatcgaacctaaaaaatgggttgattatcgggtttactttgacgaaagagtcaatctgattactagccaagcccctgctaccactatagatttcgcacttaaaattattgagcgcctaaaaggtaaagcagttgcagctgatgtcgctaaacaacttgtattaccaccaggtatttataattatcaagatgaatttactgggcttggggataggtaa

SEQ ID NO: 317646 - DNA, 1101 bp, Proteus mirabilis
atgaaaaagattattttccttttctgtgtattgctaatgccatttttaacacatttagcatatgcggatgatgtaagtggattaactggtgaatggaagtcgccggaagaagtccgccgtcttattgatgaaagtagaagagaaacagctttaataaatcagtacactaatgagtgtgcaaagggtaataatcaaagttgtattcaattggaaactataaagtcaaaaaacagcaaaattaatttagatgcaaattttgtcaaaacttttagcgattcatttcaacaagaaataaaaaagtggctaccgcctttgcaaaaagcggccaaatatttactttttacacttgggattatcgcactggtcttaaaaatggttccactggttctaaagggtgctgatttaggggagataataaaagaacttataatttttgttttaattattggtatctggctggcatttataataaacgctaaagagtggactgatgcaatcataaatagctttatgaaactagctcaattagctaatcaaacatctatgcaagccacgcctgttggaatattaaaacaaggatttattgttgttggaaaggtgtttactgacccgataaaccctataacgttattaactcaagttatttgtgcgttaattataatgatcatttatgcgaaaattgcattttatttgctgaaagtcatgcttgagacgtacattgtttcttatggaggcattattctgttggggtttggtgggatagctttcaccagtgactatgcaaaacgctattttacctacgttatatcatgcggcattaaattatttatgacattactgattatcggttttggcggtaattttattgcctcattcctgactctcaattttactgaatttgcaaattgcgtcgcaattgttgctgttgttgtcatgcttatgatgctggctgaaggaatacccgacatggcacagtctatggtcactggtgccagcttaggcaatagcaatatgaatatcggcggctctcttgcaacaatggccgctgccgccactgcatttaccgctgcctgttatgccggagccgccgcctttgcttaa

SEQ ID NO: 317647 - DNA, 2502 bp, Proteus mirabilis
atgaagttatataaaaaacaatacaatacatcactttcttttgctgacttactgaattttggcgtgatgattactcccaacttaatgttgggtaaagatggttcactgactgccggattagtttatacctgttgggattatgaaaattctgataattctgaattaaatgacctggttaatgcacttaatgcagcctatctccggttgggtacaggtatcacattgcattttacggtaataaggagtgaaacctcagaatatccgcagccggaaaaaagtcattttacgtcattactgaataaattaattgatgaagaacgccggatcaaatgggaaagcgcaggggcgcatttttcgagtgtgctttcattttcaattacttatttacctgaaagcatgtcaaaaagtcggttaagtgatttctttgttaccgacgaatccggcactaaaaaatcaaaatcattaacagataaacacattgaatactttgaaagcgttatttcagaactcagcggacaattaagcggaacgtttactctgcaccggcttggggtacgccatgataacgctacaggtgttgtttataatgatttagtccaatatttcaatcattgtatcagtggtgataattatccggtcattcatccggataatcagtttcttgatgctgttttgtctacggatgatttttatactgagcctcgccttaaaattggtaataaatatatcagtgtgctttgcattgatgcttatccggcaagttcagtgatggggatgctgcaatcgttatcaaatttaccttgtgagtatcgctggacgacccgcgccatatttcttgatccgatagatgcggataagcaaattgaaaaataccgtaaaagttgggggcagaaagttcgcggatttgtcgatcaacttatgggtaaacacagcgataatattaattatgatgcagccacgatgaaagaggatgcacagattgctaaaggtgaaaataactcaaatacggttcgctatctgtatcttacgcccacaatagtgattatggatgaagatattgaccgtttggatgaaacgacaaatcttatccgtaccacgattaaaaatgtcgtcaattttaatgcaagaattgagacagttaatgcaatggatgcctaccttggcagtctgccgtctcatacctatgagaatgtgagacgcccccttttacataccggaaatatgacgcatatagtgccctgttccacgttgtggacgggcgaagaaacatcaccctgcccgttctttccgtcggacagtccgccgctgatgaaggtcagtacaacgggtaactccgagtttaatcttaatttgcatgaggacgatgtaggacacggcattatcggcggtaaaacaggtgcagggaaatcatcattagtcacattaatttcttctcaatatgaccggtatcctgattctcaggtatttacctttgataagggacgttctgcaaaagtgttctgcaaactatcgggaggaaagtattacgatattatgacgggcgagcattctcttaactttgcaccgctggcgcgtatagatgaaccgagtgagtttatatgggcgtttgagtggttacaggatattgccgaaattaacggcgtaaagctggattctgaaaaagttaaaaaactgaatgaagccctgaaaattgtctcaagaatggataataaggacggccagtaccgcaacattgattcactgattacaaaattgcaagaccgcgaattgaaagatttgttcagtcagtacggctccggcggggcatacggtgaagtgcttaatcagccacaagaacaaattacactcagtaactttaccgtttttgagtatggagaattactggacaggggcaataaaatcaaactgccggtacttttttatctctgccacctgattgagcgacaactcgacggaagaccgacactggttaatattgacgaggcatggaagtttttagatgaacctgttgcgggtaaacgccttttacaatggctgcgtgaatggcgtaaaagcaatgctgccgtggttatttccacccagaacctgcacattatcgaaaaagcctttccgctggtattttcagaaatcgctatggcttgcccgacaaaactgtttcttagtaaccccgccgccgaggaagaagtttcgatcaatgcttataaaattcttggctgcaaagccgctgaaatccgcagaatccgtcatttaacgccgaagcgtgagtattttgtgaaaaaaggtgattttcgccggacattcagcctcgatatggttgagggtgatatcggacttgctaccgttgccgcaagctctaaaaaggatttaaaagagatagataaattagattttgaacattccagtgaagaagaattactgcaccagtggcttgattttaaaggtgttgatagtggctatgtgcagtatctgacagacagactgaaatcaaggggtgaaatatga

SEQ ID NO: 317648 - DNA, 195 bp, Proteus mirabilis
atgtatatgctttgtgctagttttagcttttcttattttatatcttctttttatcttttttatctttcggttttatttcttagcttttttagttatttttcttatcaagaaatatggttaatcttttcaagtaaccttttacagcatactacttgctctactgtttttttatcattatccaataataatgaataa

SEQ ID NO: 317649 - DNA, 369 bp, Proteus mirabilis
gtgtgcatcttcggcaaattagcagaaattgcaggtgaatatctgagaaaaggaagtcaagtatatatcgaaggttctctgcaaaccagaaaatggcaagaccaaagcgggcaagaccgatacacaacggaagtggtagttaatgtcggcggttctatgcagatgttaggcggtaacggtggtaatcaggcaggaagccagaagtcacagcagaatcaaggatggggacaacctcagcaaccgcaagcgcaaaaacaagcatcgagtaatcaaacaccacaaagtgagccacctcaagattgggatgatcctatacctttcgctcctatcggactcccctacccacaccacgctatttatgtgatttaa

SEQ ID NO: 317650 - DNA, 372 bp, Proteus mirabilis
atggcattagcgagttcatttttaggcgtatctttagggttatttgattatttagctgatttctttaaattctcaaatactgggacaggacgtttaaaatcggccatcgtaacttttgtaccacccaccattttagcgattatttttcctgatggcttcttgtatgctattggctttgcaggacttgcagccacaatttgggcggcgataattccagcattaatggcaaaagccagtcgtcaacgtcatcagcaacaaagctttaaagcacctggtggcacctttatgattatctttgtgatcttatttggtgcaattaatgcgattgcacacatattagcaaactttaatctcctacctatttaccgctga

SEQ ID NO: 317651 - DNA, 468 bp, Proteus mirabilis
  misc_feature (272)..(281): n is a, c, g, or t
atgcgctttataaagctattacctgctattttagctgttattttagcgggttgtgtgacacaagcacctgaagttaaacaaccattaaaaccgcaagcaaaattagttgaaggcgtatcttgtattttacctgatgcacctactgccaattatgactatattgcgacaaatgatcgttatggtcaaaatagtaaagcatcaacagattactttaaattagccattaattactcaccggctttttgtgattataaaaaaaataatattaagcnnnnnnnnnngaaaaagagcgtgctaaacgcgaattcgataaatttgaaatccagtgtttctcagataataaatttggctggattgttcatgggctatgggctgaaacctgcgatggtaaatcatgggatgaatgccgtgactggaaagacatacgcaagcatcctcgtttatgtaaaggggatttaccaccattag

SEQ ID NO: 317652 - DNA, 285 bp, Proteus mirabilis
  misc_feature (147)..(156): n is a, c, g, or t
atgaacgaacatacaatcagtaatgaatctcttattttttctctgttactggtcttagtggctatatttattagccgaaaagagaaactttcattagagaaagatattatttggagtaccgcccgagcgataattcaactctttatnnnnnnnnnngaaagatattatttggagtaccgcccgagcgataatccaactctttattgttggctacgtattaacttatattttcgacgtcgaccatattatccttacatttctaatggtcttatttatctgttataa

SEQ ID NO: 317653 - DNA, 972 bp, Proteus mirabilis
atgtcagggaggcgtttagcgttaggaaaaatcgcccttggacagaaagtgttctatcaagatgaaggctttaccgtctatcgcacgacaaacaatcttttccttgttgaatcggcggaaggtgattatcaacttttcgaagccaatccacataaaatcaatacactgcgcttaatgaaaagtgctgatcgtcataataacgctttacactaccgctatgctaatgacggtgaattggtacaaattcatgatgatgcgtatctgaccgatatccggttacattatgatgaaatcacccaacgcttacagtcggtgacccgccaccaaggacaagaagaaaaaacgctggtcacttatacttatgatgcacaacagcgtttagtgcaagtcactaatgcggataagcgagtgactcgtcgttttggctgggatgatgaatcgggtttaatggccatgcaccaatatgccgcaggggtcagtagtcattatcggtggcaacgttttgatgcctttaccattgaagacaatgaacctgagtggcgagtggttgagcactggcttaaagacggtaaacgctgtttagagcataccgaactgacgtatgatttagctcaacgaaccctcaccaccgtggaaacggggggcgaaaccaccttccgtcgctggaatgaacaacagcaaattatcgaatacaccaatgcattgaatgaaacgtggtggtttgaatgggataccagccgcttattaacgaaagcaatagccccagatggcagtgaatgggggtatacctatgatgagcgcggtaatttaacccaatcgaccgatcccgaacaacaatcgacttgctatgattgggacaaagattttgcgtttcccacggcacaaactttgccaaatggggcggcttggcattgggagtacaatgagcacggcgatattcgtcgtgtgattgacccgcttggcgtgggatga

SEQ ID NO: 317654 - DNA, 339 bp, Proteus mirabilis
gtgaaagagggaaaagtacaatcgcctaataaaaatacgggtaacacagcaacgggtactgaatcaggaaaaccacaacaaagcagaacgggagcagccctgaaagctgtcgctaaatccgttggtgagggaatactcaataaagcggcaggaagcagaggctccacggcagcaaacattacccgtgcagcgttaaatcatgcggcacaaagtcaacagtccacagaaagccctcgtaaacctattgccagtccgtatgcaaaaagcaccggaaataatagtagcggaaccagtaaaatgcctaacaagggaaataatgatacaggggaaaatcaatga

SEQ ID NO: 317655 - DNA, 645 bp, Proteus mirabilis; identical to SEQ ID NO: 279647

SEQ ID NO: 317656 - DNA, 915 bp, Proteus mirabilis
atgaaaaaaacaattttatttacctcattgctgatttcaggcgttgcattagctgatcctgttgtgccttctgtcagtaatatagaaaggattaatacaggtgcaacctctcaaccaacaacgccacagcaggctatgccatcttcaatgctcttaggtggtaaagacttacctttaagccgaaaagagcaacaggcgattaaaacagcaaatcaatgggttaacgggaaacagtatatttccaatggcggtcaggaggtagtgtacacatacggagcaggtcaggcggccattattgccacaccgctaaaactcagtgtttttgagcttgaatccggcgaacgtattgttaatgagggtattcagttaggtgattctgttcgttggcacgctacccccgtaaaacaggggaatcagacgaatgttattataaaaccaactgacacaggactatcaacggatttagttgtcgtcacagaccgccgtacttatcacattaagttaatttcaaacagtaaaaactatactccattagtcaaattcagttatccggaagatgaaaaccaaaaagcgtggaatgcgtactatcaaaattcaggtgcagataatagcagtatctcacttgccggaaataaaacgggacttgcccctgtaaattttgattataccattaaaggcgataataaaatgaaaccgttgcgggtttacgacaatggttctcaggtgtttattcaaatggatggaaaactacaggaaactcccgcattatttgtcattaatggctcaggaaaacagcaattagttaattatcgttatgtagataatacctttgttgttgaccgcttgtttaacaaagctgttctgacacttgatgttggcggtgatcaggaaaaagttaccatcacaaaggggtaa

SEQ ID NO: 317657 - DNA, 447 bp, Proteus mirabilis; identical to SEQ ID NO: 279649

SEQ ID NO: 317658 - DNA, 1215 bp, Proteus mirabilis; identical to SEQ ID NO: 279650

SEQ ID NO: 317659 - DNA, 489 bp, Proteus mirabilis; identical to SEQ ID NO: 279651

SEQ ID NO: 317660 - DNA, 222 bp, Proteus mirabilis; identical to SEQ ID NO: 86452

SEQ ID NO: 317661 - DNA, 351 bp, Proteus mirabilis; identical to SEQ ID NO: 301391

SEQ ID NO: 317662 - DNA, 240 bp, Proteus mirabilis; identical to SEQ ID NO: 86451

SEQ ID NO: 317663 - DNA, 258 bp, Proteus mirabilis; identical to SEQ ID NO: 86450

SEQ ID NO: 317664 - DNA, 432 bp, Proteus mirabilis
  misc_feature (382)..(391): n is a, c, g, or t
atgttagataataatttaaaagctcaactgaaagcttacctagaacgattaacccagccagttgagttagttgcaacattagacgacagcaaacattctgctgatatccaagccttattaaaagaaattgaaccgttatctgataaagtcacataccgtgaagataacagtgctaatgtgcgcaaaccatcttttcttattaccaacccagggaaaacaactggcgttcgttttgcaggctcgccattaggtcatgagtttacttctttagtattagcattattacaaaccggtggtcatccatctaaagaagccccagaattacttgaacaaattcgtcagttagacggtgagtttcatttcgaaacctattattcgctcnnnnnnnnnngctctcttgtcataactgccctgatgttgttcaggcattaa

SEQ ID NO: 317665 - DNA, 246 bp, Proteus mirabilis
atggaattgttattacgggaggggagtgtagagactccatatagcttgcctttagtctgtgcaacaagtcagtttgtgaatgcgtcttatcaggatgaccctattgattgggccaagcgcaatacggggatacgttttcggggaaaacagatttttgtgagcgaacgaatacgtgatgctcatcggcaacatcatgtagagcaacgtattcccttttatgtccttaatggttcacattatttttaa

SEQ ID NO: 317666 - DNA, 306 bp, Proteus mirabilis
atgagtacaattaattccattattgcttatagaataatgcaaaaaagaaaagaattagggatgacagggagggaaatagcccattcattggaaataagtcaacagcactattctcgtatagagaatggacataccaaaataacagtagaacatttattctctatcgcgtttattttaggtgtcaaacctaaagaactattgcctaattataaattttcaaatgaaaaagaaatgattaaagcaaaacaatcattatcagcagaaagcattatgccaataaagaaaagcgacatgtatcccacataa

SEQ ID NO: 317667 - DNA, 642 bp, Proteus mirabilis; identical to SEQ ID NO: 305892

SEQ ID NO: 317668 - DNA, 156 bp, Proteus mirabilis
atgaaaaaatatctatttgcagtactggctacattgttcgcatttgcacctttagccctaacagtggttgaaaatgatcaagttgcacagaccgaaggtaaagttgtaggtacttgtgaaaatgattctaaaaaaatcatttatactcgccattaa

SEQ ID NO: 317669 - DNA, 372 bp, Proteus mirabilis
gtgccgattgtttctgcattatatccttcattagctcatttactgaaacaagcagagaaagcaggagcagagccgaatgatcaggcatttaatgttgggtggtttgatttaatgaaaagaaagaaacatccaaaaaagatgggagaatatccattacgctcatttttcaaacgattatcaacagaatgtaattttattatctcacctcaccgttttcgacatactgtcgcaacacatatgatgcaatcaccagagcgtaatctgtatgttgtgaaaaggctattagggcatgctagtattacatcgacattagaatacattgatgaaagtgttgataacttgcgagatatacttgaagcggaattgatgtga

SEQ ID NO: 317670 - DNA, 243 bp, Proteus mirabilis; identical to SEQ ID NO: 297991

SEQ ID NO: 317671 - DNA, 744 bp, Proteus mirabilis; identical to SEQ ID NO: 277195

SEQ ID NO: 317672 - DNA, 435 bp, Proteus mirabilis
  misc_feature (420)..(429): n is a, c, g, or t
atgagtatttttttcaatcccgctaaacacccacatcgcttaaagccacaaccattgggggagcaaggtgagcgctataacgaagattggcccatgcctgagctcgattttttagagaccgtagataaacaacagtgcattctggttgataaagaaatacgccgacgtgatgcgtttgctttccctgggtttattaccggaattattgtctttattatggtatttcattttgtttttatggaccactataatcaatatacaacttttaaagacgatattccttattatgaaaaaaaatatggtaacttatatttggaaaacccaaacgatcctaaaatacctccttttgttaaaaatgaatattcccttttcttctatcaagacagtgtgacaattttagattactttaatgcttattannnnnnnnnngtgtga

SEQ ID NO: 317673 - DNA, 486 bp, Proteus mirabilis
gtgacatattttgcgaagccgggatcgccggccgtgatgccggtgacgtttccgctggtgtttgtgttcagtgccggaaaggccgattgcaccggaagtcatttttgcctgacggtggccggtcatcaggtgtttgatgaggagcaacagcagctgattgccggcatgtcaccggcgacgatacagctggcgtggcagagtaccgccggtgagacgcccggggcggttctgtctgtgggccgtcaccgggtggggctgagtgacaacgacattaccgtttaccggtttgccccgcgggatgaggcgtggccgcaggacagtgactgggatcgcctgctgtacaccgtttttaaaggggaggcgccggataaagccggctggcaatgtgtgcctttttcactatctgaactgagctgtcacggtgagtttgcccggctgacctgccggggggcgatcctgaagggcgcgggaggcgtcatatcatga

SEQ ID NO: 317674 - DNA, 438 bp, Proteus mirabilis; identical to SEQ ID NO: 14572

SEQ ID NO: 317675 - DNA, 204 bp, Proteus mirabilis
atgttattaaatattcattatctggatattaatcagcctcatatattgggtacacaatggcaacctgttattcatcatgaaactgtccggactgatgatggaattcatattacccgtaaagggggggagcgggtaatcagggaagtggtaaaaaatcctgaatggacaggattgacaaaggtagaaaaaatgactaaaaattaa

SEQ ID NO: 317676 - DNA, 363 bp, Proteus mirabilis; identical to SEQ ID NO: 27106

SEQ ID NO: 317677 - DNA, 408 bp, Proteus mirabilis
atgacgttatttaacctgatttatggcattgcccgtgggctgttctttgtggccgatcacgtctgtcgctattcccggggttgggaatggctgatgtggctggttgaggaagcccggacactgcgaaatgttgaggctgatttgaaactggctgaaaggtatgccggggagcaaaaccgtcctcattccgtttcgctgatgcagtgtacgctttatgatgccggatttgcttacggtagattattactatggcaggcggatggtctgatgagaccctggccggcatatttgcttcgccgtttaccggatatcggtcagcggattgatgcagcggtctggcagaaaggctgtgaagccggccagggtctcatcagaccatccgcctgccatagtaataatctaccgtaa

SEQ ID NO: 317678 - DNA, 423 bp, Proteus mirabilis; identical to SEQ ID NO: 27142

SEQ ID NO: 317679 - DNA, 486 bp, Proteus mirabilis; identical to SEQ ID NO: 27141

SEQ ID NO: 317680 - DNA, 204 bp, Proteus mirabilis; identical to SEQ ID NO: 317675

SEQ ID NO: 317681 - DNA, 465 bp, Proteus mirabilis
gtgattgattatgaaatattatttgatgatatcccacttgtttatctacacaaaaatcatccgttaatgaaaatgaagtgggatcttaataattttttatctttttctcaggtgagtacagaatatgacaaacaaagtcattgggctttagataatatcttaaaagaaataaacaaaagtcgtcagatagcaattacttatacttcttttgagcaatctctttttatggtatctcaacctgatcatcaattaattacttgtgcaccaggatattgtcgttattatgtgaaaacacattttcctgatattgtaacattacctatacctcttccccctgtgtttttagaacagcttcatctaccttttgttttgttatggcataagcgtaatagccataatacaaaaattatatggctaagaaatacaataagaaaaagtattaaccaacaaacttccgatatctga

SEQ ID NO: 317682 - DNA, 465 bp, Proteus mirabilis; identical to SEQ ID NO: 317681

SEQ ID NO: 317683 - DNA, 309 bp, Proteus mirabilis; identical to SEQ ID NO: 298420

SEQ ID NO: 317684 - DNA, 984 bp, Proteus mirabilis
atgaaccatttgatgggtaaaagactttttttattaggtacaatcttctttttttctgctgacgtctttgcagcttgtattcagaatcctaatttaaaaaatattcaggctcggatccccaataaaacctattcaattcaatatgatgatatagggacaagagtattagatgagtttcagattaattatgccaatgggcctataacaactttttcaggtaacgatgggcggtgtgggaacgcatcaatcactgccaattatactaatggctggttgcctaatgcgaataaaatagcacagaccaatattgcgggtattgggatacaggttaaatttgctggaataggtgcattaaatacaacgtatttgaccccaaaggacccaagtggcaattcttatcgacttcttaccccttattggacagtcaaaattataaaaacaggcagagtaacgcaatcaggaagccttcaatggggcaagattgctcaagcagtacaaaataatacacaacctaaaaacacaacttggaacttaacttcactttatttgcctcttaatgcaataaagataaattcattaaaatgtactacaaaatcatcaaattataatattaatatggggacttggtatgatactcaatttaaaaatattggtgatgtcagtaaaagtgtagatgttcctattacattaaactgtgcggctggcactaacattaaagcgacagtgacaagtagtgctggatatatagatgcaaatacagggaaattaaacctatcgggcactaatcgagccactggtgttgccattcagttattagataaaaacaataacccgataaaactaaatacaaaaaatagtctacaaaatggggtctcctccggtgattatatatttggttggaaagcaagatatataaaaacaggtaataaaataacgcctggtagtgctaactcaacagcaacagtaaatatcttatatgagtga

SEQ ID NO: 317685 - DNA, 306 bp, Proteus mirabilis; identical to SEQ ID NO: 297209

SEQ ID NO: 317686 - DNA, 135 bp, Proteus mirabilis
atgatgtcattaaaaattattagagagcaggttctgaaatttttatcacaatatagcccctcagtgatggcaattaaaggtgaatggggggtaggtaaaacttatggctgggaggaaagaaatgctgtcagctaa

SEQ ID NO: 317687 - DNA, 189 bp, Proteus mirabilis
ttggatggtgagtctcaagccatcatcgaaaaaaatcttccccttattacccaagataagaccgtcattatgattgctcatcgcattattgtattagaaaaaggccagataattgaagaaggcaaacataatgaattgattagaaaagatggcgcttataagaaactttggcaacatcaacaaggataa

SEQ ID NO: 317688 - DNA, 366 bp, Proteus mirabilis
atggatgatgacgacagaattatgctggaaaagcagttacaggcgttaccgaaagagactgcgatatccattgtacaacagctgggacaggggctgagtaccgggagtgtgcgtaatccggttgggtacatgttgcaattgttaaaagctgcccgtgaaggtcgctataattcgatttctttcagtgatgtcgggctgaaaggcaccggctcacagaaaacagaatgctgtcagaaagtctctgaaaattcacaggtaataagcaaaaacagagtcgtttctcagaggctaaaaacgacaccagaagttgctcacaatcatcttaagcgtatcagacgacagcttgccggtataacagatgaataa

SEQ ID NO: 317689 - DNA, 192 bp, Proteus mirabilis
atggatattacgtttttctgttctgacatttcttgcagctctggagttgaagttatatgtgtagcagttactgatgtgacagatatttcaattccagaaaaacatcaaaatgaagtcctcagaacggcaattagcaggcaaaatattattaaacaccttgaacgcgaaggctacacagtcacaaaaggctag

SEQ ID NO: 317690 - DNA, 309 bp, Proteus mirabilis
atgaataaatacaccgaactatctgactttgagattaataaaaaggttgctgagcatcttaaattaaacacaattgcatacgaacgtactgaaatagttttgtttgatgatatggatgctacacctttcgccccctgcaataacccgtcagacgccatgcctattattattgagaataaaatagcaataaaccctaaaggtgatacttggcaatgtgggtcagggtggaatgtagctgaaaataaaaatcctctacgtgcatgtatggaagttttcttgatgacgaaggatgctgaggatgaaagctga

SEQ ID NO: 317691 - DNA, 294 bp, Proteus mirabilis; identical to SEQ ID NO: 307858

SEQ ID NO: 317692 - DNA, 147 bp, Proteus mirabilis
atgtttgtggttggtaaattaaaaattaatcaacaattaaagcagtcactatctcattctataaaggaaatagagttaataagctaccaaatgatgaatacaatatcttattcatcatttagtacattaacgattattaataattaa

SEQ ID NO: 317693 - DNA, 381 bp, Proteus mirabilis
gtgaatcaggccgccggtcgttatattcgttcgcttgaagccgttcagcacatcagcatccgcgaccggctgaatgattttatgcagcagcacggcacagtactggcggccacactggcaccagagctgatgagctacagtgaactgacggccattgcccgaaactgtgccatacagcgtgccacagatgccctgcgtgaagcccttctgtcctggcttgcgaagggggaaaaaattaattattccgcgcaggacagcgatattttaacggctatcggattcaggcctgatgcggcctcgcgggattataatcgccagaaattcaccccggcacagaacctgatttacacccgccgacgtgcagaactggccgcacggtag

SEQ ID NO: 317694 - DNA, 519 bp, Proteus mirabilis; identical to SEQ ID NO: 299944

SEQ ID NO: 317695 - DNA, 1569 bp, Proteus mirabilis
atggcaaatcacaaagaaacctgtctgagtgctgcagagcgtgtgtttgatacccgaaccgtggataccctaacatgttatcatcgagagatggtaaagatgttgatggatagtgagtccttttattctagtccaaataactcacagataaatactaatgagagattagagaaaaaaataaaaagcaataccattgaaaataaagctgtgaagggatcttatggtgatattttaaataatttaaaccagcagctaatgaataataaacctgagattgagccttatttctcacattacaactctcccgtcatgcgattggcgaaattaggctacctttctgcactggcctataatgctgataatgtttttaacaaacattcacccatacaaaaacagcaagagcaaaaaataactcatgatttgtgtaaactaatcggttttgaaccagataaagcatttggacatattaccaccagtcatgtttttgcttgttatgaaattttgtgggctttgagaaatttaaaaacactgccgatggcgattgcacgtcatccaaaatcaagggatctggttgcagataaaaaagcatttgagttatttaatatgtctatcactgatattttatccatcagtgaacagctatatgaacgagatatttttgatgatgtcagccatttaacttgtcgtggcaccggcatgacaagaacgatgcatttaggtaaattactagtaccgatataccgcttcgaattttggaagaaggcgatggatatcttggggttaggttatgataatctcattgccttaccaatagatgaagagtttaaaacagatatagctaaaacgcgtcatattgtgcttcgcttaatagagcagggagagccgatactcggtattattggtgtgttaggctcatcgacatacggtagcattgacaaacttaagcctcttttcgaattacgtgaagagtgtgaaaaacaacataacaactcattctatattcacattgatgcatcccaattaggctatatgaaaagcctttttcttgacgaaaataatagcatcatcccttataacatattgtgcgataaacttaagcaagaagcacctttacttgagttaacctcagatatttatgatagttttactcagctatcaagagctgattctgtttcttttgagccatttcaagcgggattttctccttatcctacggggattgtttgtataaaagatgctcgattaagccgttttctcgctaacccgccaaaactgtgcccagaagaggggaatattcccgatgaaatcgatgggatccaatcagcacctgcagttgcatcaatgtgggggatccatcagctatatgcttttaataattttgggtatggacaatgcgctcaaaatcaatgggaagctagagtaaaactggaacaacaattaaaacaagagaacgaatttgaaaaatcgggtatctcttatgctattcatattttgccagtttcagattttaataaactcacttttgccattgctcttaaaggcaaccaatgtttaattataaaaatttag

SEQ ID NO: 317696 - DNA, 387 bp, Proteus mirabilis; identical to SEQ ID NO: 317324

SEQ ID NO: 317697 - DNA, 387 bp, Proteus mirabilis
gtgataaatactaatcaagatggtaccgcccatatctattataatcgtcttgatgttggtgatttgggtttatcattaaaaaataatgctgaagcagaattaattattaatgaggttgtttctaaagatgtttcaattctaagaggtgagcttgagttacaaggaaaaaaggcgacagtggttatagctaatcctaatggaatttcttgtcgtgattgttctttctctggaattaatgatattaaactaattgcaggtagcagtacagggaaattttctaagacattcactatagcagatataggttctagtgttgtttttgatatgagaaataaattagataaaaatgaatacaggtcagattatcgaactctatcgagagaataa

SEQ ID NO: 317698 - DNA, 315 bp, Proteus mirabilis
atgaaagcggatctaatgtttttagatagagcatttaatattgatgatagttatttatatggaatggcaggaaccctaaaaatagataatatatcattgttgaataatagtgttcttgatgttgtcgctgaggatagtatatttcttggtggtaaaatccagggggatggtcatgttatattacaattaaatgatgataaagttgatattgaaggtaaaaacttgttaataggaacagagggattaagattagaggggggaacaaaatataaattaggtagatcaactattatagattatactgaatacaaataa

SEQ ID NO: 317699 - DNA, 216 bp, Proteus mirabilis
atgaattcaggcatggtgggtataccgaaagccaccgaaaaaggattatctgtcacttatttgattgatggagcctcagaactagggggcatgctacgactcgagagtaaattcaattccgcacttaatggtgactatattattgagcaactgaaattcgatgttgcttcacatgatgatcctttcttttatcaggctacctgtaaacgagcataa

SEQ ID NO: 317700 - DNA, 1188 bp, Proteus mirabilis
atggctgattatcgttatatcaataataaaggcgtgattcttcccgacacggccacaatacgtgatgaagtcgaaagcgagtttcgtgcggtgtttggtcaatcgattaaccttgcccctgaaacaccacaaggggcattagcgacgatggaagttgaaaaccgtgatgcaatggtgagaaacaatgccgagttagcaaatcaaatcaatcccgatattgcgggtggtgtttttcttgatgcaatatgggcgctaatgggtggccaacgcattaatgccactcactcttatctttccagcgttgaatttagtggcgtacccggcaccattattcctaaaggctcattagcgtctagtgttgccggtgccatgttcgaaacagtttcacccttgattattgataatactggcaaagtaacaggggatatgagggcggttgaatatggtcctgttgaatgcggtgctggccaacttaattctgtggctagctcagtattaggttgggagaaagtcaataatcccactcatgcggttgttggccgttatgctgaatctgatatcaaagcaaggcgacgacgtaagcaaactctggctaaaaataccgttagtgttgcagaagcgatcacctcttcactgtatgaattagagggcgttaattcactgtcttttcgagagaactacaccgatgcggtgctcactattgatggagtttctctattgcctcacagcatttacgtttgtgttgaagggggcgatagtaacgaaattgctaaatcattgctgagaaccaaaaccattggatccgcttttaatggcgagattgaaatcggtgttgtagagccagtgagtggacaagaatataaagtgaaattttcacgccctaaagagatcactgttttttgtcgagtgacagttaaaaaatcagccgttgatgcgcaaactattatccccagtgccatagaacaatggacgcgtggagagttggacggcgataacggtttgattgttggacgtgaagtatcgccttttgagatagcctctgcagtgaatactgttgaacctcgtctgttcgtgactaaggttgaattgtcgctagatgggaaagtgtggaatgttgcattaattccgattgccattaatcaaatcgcacgcttgcaacggggtgctgtgcaagtggtgattgtatga

SEQ ID NO: 317701 - DNA, 1392 bp, Proteus mirabilis
atgacaactatttttaaaaccccctttgcaacacaaggggataaggcttctatacctgtagaaatccaaccagacggctcagtgtcttatacacaaggttatggttacgactatgagcgtgaccaagtcacagatcctgctgcgaaagatattgaacgtgaaaaaatgaacgggatatttcacgatatcacggaagcgattggcgaaattcagcgatttggttttcccaaatgggatgaagccggtaagccgtatgcgatacgcgctattgtgtatcataaaaataaagtctggcagtctaaagttgagaataacaatattgagccggttgccggtaatgcatgggcagagttaaaagcggatgccacagcaagtgatgtgggcgcatattcaaaaggggaatccgataaacgttttcaaccattaggtaattacacaccatctggttatagctactcaaaggcagaaaccgacaccaaatatcagccaaagggtaattatgctcccgcagggaactatgccaataaaggggatagttacactaaaacggaaagtgatagccgatatcaagcaaaaggaagttatcaaccatcaggtgattacgcgaccaatacagcactaaacagtgggcttaataataaatttgataaaggtaatgtagttcaaagtacgggaacgtcaacggttcatgtgatgagccagaaagcttctacagatgcttttcaacctaagggaaattatcagcctaaaggtaattacgcgttagtgggtgcttcatatacgaagactgagtcggatggccgatatcaagctaaaggaagttatgcaacagctggaagtagctacacaaaagcggaaagtgacggacgttatcaaggtaagggaaattaccaaccagctggcaattatgcgctagtaggagcatcgtatactaaggcagagtctgacggtaaataccaacccaaaggcagttatcaagcttctggttacagctattcaaaatcagaatcagatggtaagtatcagcctaaagggaattatgccattgcggggagtagttacacaaaagcggaaagtgatggtcgttaccagaaaaaaatagcaacagacgttggctcacttactggtgattgggatgtagggaaaactattaccataccagtaaatctgaaaggaaaaactataactttaaaacgagggagcgaaaatacttctggtggaattgatactatagtagtgcctctccctttagaaaacggaggaattgagatggcgaatatgaaagatgatggttttatatggcttgctgttacatttaataataattcaactatattaaaaataactaacggtaaattttcaagaatcgttaaggtactatacgaaaaataa

SEQ ID NO: 317702 - DNA, 678 bp, Proteus mirabilis; identical to SEQ ID NO: 315430

SEQ ID NO: 317703 - DNA, 1554 bp, Proteus mirabilis
atgaaaattcgttcacaagtcggtatggtactgaacctcgacaaatgtatcggttgccatacctgttcagtaacctgtaaaaatgtttggaccagtcgtgaaggtgtggaatacgcttggtttaataatgttgaaactaaaccgggtacagggtatccgcaaaattgggaagatcaagagaagtggaaaggcggctggatcaaaaatattaaaggtaagttagtaccaagaatgggtaaccgtgttgggctattatcaaagatttttgccaacccagatgtgccagcattagatgattattatgagccatttgattatgactatgagcatttaaaaaatgcaccagaaggctcattacccaccgcacgtcctcgttcgttgataacaggtcagcgtatgaccaagatcgaaaaaggcccaaactgggaagatgatttagggggcgaatttagcaaacgtgctgcggataaaaacttcgccaatatgcaaaaagagatgtatgggcagtttgaaaatacatttatgatgtatttacctcgtttatgtgaacactgcttaaatcctgcttgtgtcgcgacctgtccaagtggtgcgatttataaacgtgctgaggatggtattgtgcttatcgatcaagataagtgtcgtggttggcgcatgtgtttaacagggtgtccatacaaaaaaatctactttaactggaaaagcggtaagtcagaaaaatgtattttctgttatccgcgcatcgaatcaggtcaaccaaccctatgctcagaaacctgtgttggacgtattcgttatcttggtgtgatgctgtatgacgcagataaaatttcacaagccgccagtgctgataatgaaaaaaacttataccaaagtcaattagatatctttttagatcccttcgatcctgaagttattaaagctgcagaagagcaaggtattccattaagtgtgattgatgcagcccaacgttcgccagtttataaaatggcggtggattggaagctggcattaccattacaccctgaatatcgtactttacctatggtgtggtatgtgccacctctgtcacctattcaatctgcggctgatgcaggagtgttgccacatacgggagtattaccggatgtagaaagtttacgtattcctgtccaatatttggctaacttgctgaccgcaggcgatacagcgccagtgttattagcattaaaaagaatgttggcaatgcgccattataaacgcgcagaaacggtagaaggtaaaaccgatttgacagcattagagcaagtgggattaaccgaagcacaggcacaagagatgtatcgctatttggcgattgccaattatgaagatcgctttgttattccttctagccatcgtgagttagcaagagaagcttttcctgagcgtaacggctgtggttttagttttggtgatggttgtcatggcagcgagagtaaatttaatctgtttaatagccatcgtattgatgccatcgatatcacttccaaaacccctcaagatgagcgccgttctgaggagaaaatatga

SEQ ID NO: 317704 - DNA, 663 bp, Proteus mirabilis; identical to SEQ ID NO: 315433

SEQ ID NO: 317705 - DNA, 1746 bp, Proteus mirabilis; identical to SEQ ID NO: 315436

SEQ ID NO: 317706 - DNA, 1251 bp, Proteus mirabilis
atggctacacaagatcctgtgaatacaacatcaccatcatttataaaaaataggcgttcatcattaattgcagcgatttttttaatggctacatctgcaattggtccaggttttattacgcaaacagctacctttacagcgacgatgggagcagcctttgcatttgggatattagcttctatcgtcattgactttgttgtgcaacaaagtatttggcgagtcattaccgtgactaacatgcgcgcttctgatattgcgaataaggcaattcccggtagtggatacttattagctgtattggttatttttggtggtttggtattcaatgtcggtaatattgctggggctggtttagggcttaatgccatggtaggactggatcctaaatggggtggggttttaagtgctttactggcgatttatatcttctcttcacgcaaagcaagtcattttattgatcgtatgatcattgttcttggcatcgtgatgattttattaacactttttgtaatgtttgcgtccaatcctcctataggtgaagcattaaaacaaacagtactgcctaatacgattaattttgccactataacaaccatcgtcggaggtacggttggtggttatatttgttatgcaggagcacatcgtctgctcgataaaggtacaacaggtattgaaaatatcgatgcggtatctagcgcggcaactaaagggatattagtggttggattaatgcgttatatcctatttttagcaattttaggtgttgtcgcaagtggagtgacactagatatttccagccatgcggctaatcctgcttctcaagcattccaacatgcagcgggcttaactggactacgaatttttggtcttattttatgggcagccgcactgactagtgtgattggtgctgcttatacgtctatgtcgtttataaccgtgtttaaaaagggtattacagagcgtcaacgcaatattgctactattatttttatcgctatttcattggcaatttatatggttatgggaacagctcctgctgccttattagtctttgctggtggcttcaacggattgattttacctattggtatgacgttatttatttttgttgcatggcgtcgtcaagatcttatgaatggctataaatatccaatgtggttgcaatggtcggcaattttagtctgcgctttgacttggtatatggggatcatgtctgttggcgctattttcaattacctcaatattgcttaa

SEQ ID NO: 317707 - DNA, 759 bp, Proteus mirabilis
atgaatttgcaaaaaagcgcgccaatacaattttccttaattgccgttaatttagatcaaaaacaaccgggcttccctgaacatattttacctgaatatcttgagcaactgggtgtagagtataaaattgttgaagagaatacttacggtattgtaaaagagatcattccagaaggtaaaaccacctgttcactttgctctcgcttacgtcgtggtattttataccgtacagccaccgaagttggggcaacaaaaattgctttaggtcaccatcgtgatgatattttagaaacgctgtttctgaacatgttttatggtggaaagctaaagggcatgccacctaaattaatgagtgatgacggaaaacatatcattattcgtccattggcttatgcccgagaaaaagacattgagcgttttgctcaagcaaaaaatttccctattattccctgtaatctttgtggctctcaacctaacttgcaacgccaagtgatcaaagagatgctaagagattgggataaacgttaccctgggcgcattgaaaccatgtttagggcaacccaaaatattgttccgtcgcatctatgtgatacccaattatttgactttgctaatatcaaacagggtgatgagattattaacggcggtgatctagcatttgataaggatgatattccaacaagccctattctttccgatgatgaagatgagcgtcctgactttagccaagctagattggatgttgttgaggtaaaataa

SEQ ID NO: 317708 - DNA, 429 bp, Proteus mirabilis
  misc_feature (367)..(376): n is a, c, g, or t
atgaattataaagaatttgcaaaacaaattctcgctattgttggtggcgaggataatataaagtcattagtacactgctcgactcgattacgttttacattacataatgaagataaaattgatccttcaaaagccaaagcaaatagtaaaatattatctgatgtgatgaagggaggacaatatcaactggttatcggtaatgatgttgataaagtatttaatgaactaacaaaaatgataaaaacaaataatactcctcatgataataataaagaccagaagaaacagtctatcgtaaataaagtattatcagcaattactggctctatcgctccggttatccctctgttagcgggtgccggtatgnnnnnnnnnnggtatggggaaagtgttacttattgtattaacgatgcttggttggttggataa

SEQ ID NO: 317709 - DNA, 291 bp, Proteus mirabilis
atgaatagtgatgggaaaccagctgaatataattactatcatacatggtataaaaattactaccctaaaaaaattggcgctattaaagataggtatgattcatatacaaaaaaagtagatagtaataatccaatatttttaggcattacctctattatccaagccaataatattgcaaagggaatggatttatatttagaagacaaatctaataaagataagctcaaagaagcgcaagaattatacaattcaatgtaccaacaattagtgaaagactgtggaaaaatttag

SEQ ID NO: 317710 - DNA, 204 bp, Proteus mirabilis
atggatattgttgattcacatcgtcgtaagtggttaggccttggtatggctgctgttggtttaggtttacttccctcacatgcatttgcatcattagcaactccccgaccgaaaattcttcgctttaataatttaaatactggtgaaactattaaagccgagttttttgatggtaaacgttataataaatccagccttatttga

SEQ ID NO: 317711 - DNA, 2550 bp, Proteus mirabilis
atgcaacatcgtattattctccccggagccactacgctgacccggttgatttcagaggtaagggaaaaggcgacgttgcgcctgtggaacaaactggcactgataccgtcagccgaacagcgttcacagctggagatgctgctggggccaactgattgcagccgcctgtctttactggaatcactgaaaaagggccctgtgaccatcagtggtccggcgtttaatgaagcaattgaacgctggaaaactctgaacgattttggcctgcatgctgaaaacctgagtacactcccggctgtgcgcctgaaaaatctcgcacgttatgctggtatgacttcggtgttcaatattgccaggatgtcaccgcagaaaaggatggcggttctggttgcctttgtccttgcatgggaaacgctggcgctggatgatgcattggacgttctggacgccatgctggccgttatcatccgtgacgccagaaagattgggcagaaaaaacggctccgctcgctgaaggatctggataaatctgcattggcgctcgccagcgcatgttcgtacctgctgaaagaagaaacaccggacgaatcgattcgtgctgaggtgttcagctacatcccaaggcaaaagctggctgaaatcatcacgcttgtccgtgaaattgcccggccctcagacgataattttcatgaagaaatggtggagcagtacgggcgcgttcgtcgtttcctgccccatctgctgaataccgttaaattttcatccgcacctgccggggttaccactctgaatgcctgtgactacctcagccgggagttcagctcacggcggcagttttttgacgacgcaccaacggaaattatcagtcggtcatggaaacggctggtgattaacaaggaaaaacatatcacccgcaggggatacacgctctgctttctcagtaaactgcaggatagtctgaggcggagggatgtctacgttaccggcagtaaccggtggggagatcctcgtgcaagattactacagggtgctgactggcaggcaaaccggattaaggtttatcgttctttggggcacccgacagacccgcaggaagcaataaaatctctgggccatcagcttgatagtcgttacagacaggttgctgcacgtcttggcgaaaatgaggctgtcgaactcgatgtttctggcccgaagccccggttgacaatttctcccctcgccagtcttgatgagccggacagtctgaaacgactgagcaaaatgatcagtgatctgctccctccggtggatttaacggagttgctgctcgaaattaacgcccataccggatttgctgatgagtttttccatgccagtgaagccagtgccagagttgatgatctgcccgtcagcatcagcgccgtgctgatggctgaagcctgcaatatcggtctggaaccactgatcagatcaaatgttcctgcactgacccgacaccggctgaactggacaaaagcgaactatctgcgggctgaaactatcaccagcgctaatgccagactggttgattttcaggcaacgctgccactggcacagatatggggtggaggagaagtggcatctgcagatggaatgcgctttgttacgccagtcagaacaatcaatgccggaccgaaccgcaaatactttggtaataacagagggatcacctggtacaactttgtgtccgatcagtattccggctttcatggcatcgttataccggggacgctgagggactctatctttgtgctggaaggccttctggaacaggagaccgggctgaatccaaccgaaattatgaccgatacggcaggtgccagcgatcttgtctttggccttttctggctgctgggataccagttttctccacgcctggctgatgccggtgcttcggttttctggcgaatggaccatgatgccgactatggcgtgctgaatgatattgccagagggcaatcagatccccgaaaaatagtccttcagtgggacgaaatgatccggaccgcaggctccctgaagctgggcaaagtacaggcctcagtgctggtccgttcattgctgaaaagtgaacgtccctccggactgactcaggcaatcattgaagtggggcgcatcaacaaaacgctgtatctgcttaattatattgatgatgaagattaccgccggcgcattctgacccagcttaatcggggagaaagccgtcatgcagttgccagagccatctgtcacggtcaaaaaggtgagataagaaaacgatataccgacggtcaggaagatcagttgggagctctggggctggtcactaacgccgtcgtgttatggaacactatttatatgcaggcagctctggatcatctccgggcgcagggtgaaacactgaatgatgaagatatcgcacgcctctccccgctttgccacggacatatcaatatgctcggccattattccttcacgctggcagaactggtgaccaaaggacatctgagaccattaaaagaggcgtcagaggcagaaaacgttgcttaa

SEQ ID NO: 317712 - DNA, 531 bp, Proteus mirabilis
  misc_feature (483)..(492): n is a, c, g, or t
atgaaacagaataaacaaacaacattgatacatagtgggcgtcaagcaattaaaacatctggcccaattaaccctcctgttatgagagccagtactattgtttttgattcaataaaaagttggcgtgaaatacgcgatcgtcgtattactgaacgagtattaagctatggtgctcgtggtacagaaacagcgtttgcacttgaagcattagtaactgaattagaaggtggttatcgagcacagctctttcctacagggctagccgcaattgcatttactattatgggctacgcccgaagtggtgggcatgttttatttgctgattctgtctatgaacccgtacgtaaaatagcctctgcttttttagagcctaataatatcacttatagcttttttaaaactgacggttcagatttcgagcaaaaaattcaagaaaacactcaacttattttcgttgaatcaccgggttcattactttatgannnnnnnnnnaatgctggatctaccagaaatttgccatatcgctcatga

SEQ ID NO: 317713 - DNA, 192 bp, Proteus mirabilis
atgaatactatatcaacaattaatgtacctttccacggtaacaatttatatgtagtgaattacaacggcgagccacacgtcccaatgaagccaattgtagaagggatgggtttagattggaaaagccaattcagcaagattaaatcaaggttttctaaaggcatggtggaaatcaccatacccacaaattaa

SEQ ID NO: 317714 - DNA, 165 bp, Proteus mirabilis
atgaagggagcaagcaaaatgccacagcttaattttagatggcctcaaaaagatattgatgccgccaaagattgggctgagtcagtaggaagatcattaaatacggaagttcataggatagtaatgaattacatcaaggaaagaaaagaagatgttaaaaaatag

SEQ ID NO: 317715 - DNA, 252 bp, Proteus mirabilis
atggctagagatgaacctaaatttacatttagaatgccctacgaagtaagggaaaaactaaaacatagagcaaaatcaaatggcagatcctttaatgccgagttattacagattgttcttgatgctttagataagcctgttacggtacagggatataaaaatgacaccgaaaaactagcagatcaccaagcagaagaagttaaaaagatggtgttcgatacattagttaaactatataatgataaaaaataa

SEQ ID NO: 317716 - DNA, 933 bp, Proteus mirabilis
atgatatttggtgataaaactttagttccacataaaaatggacttagtagcccagaaaacgcaaatgaagaccaagattatcctgactttgaatattgcataacatcagtacatatgaaatcaaagcttgtgtcagcaattacaaatcactctgtatcatctaaaaaatttattgaaagtgaattaaagaaattcaatgaaaaaaactctgaatctcgtaagtattttgagtctctttttgattctgaagagtcaacatcaaagcaaataagagttgaaatagacaccgattccctttctgataacctgtattgcctatctaactttaatgatgaaatgctagcagtaaaaccaaaatcaatacatctgatactaaaagaatccaaccctgaaaaagcaaggagcaacattgtaggttattgttactttgatgataaaagagaagaaagagagtattcaataaaggaagggaatgactctcttgagatactattgcctgtaagctcagaaatattttctaatatctttacagggattgagaatggtaacaataccatttatgtgtcgatttatttccttggctatgcagatactattaatagaatgtcagcaataatcgccccttccacatgtgttatagacgcatcctacatgggagataactttgtagcgctaaaaaacatatcattgttatcaaaagatatttctacaaatgatgataacaacgacatgtctgaagtagaaacaaatgattaccaagtggatgatgataacaatgaaattattaaggaagtatcatctaaaattgagcttatagatagaaatacatatgaaaataccgttttgctaacatctataaactcaaatattagagtgatgtcatacctgttaatatttctcattgccttatttttgtttaagtttatctggtaa

SEQ ID NO: 317717 - DNA, 378 bp, Proteus mirabilis
  misc_feature (282)..(291): n is a, c, g, or t
atgaatattaatcaactgaaaagctttgttgaagtagtgcgaaatgactttaacattacaaatgcggcagagaaactctatacctcacaaccaacgattagtaagcaacttaagatattagaagacgaactcagtgtttctttattcgtccgtaaaaataataatttattagcacttagtcctatggggaaagaggtccataaaatagctagcgatattcttgggcaggttgataaaattaaaagtattgtggcagaagaagatcgtaataaaaaagtagannnnnnnnnnactctttacccaacgtcattgatcattttcgccgctattaccctaatatttcactccattttcaccaaggtgctcctgctcagttag

SEQ ID NO: 317718 - DNA, 249 bp, Proteus mirabilis
  misc_feature (155)..(164): n is a, c, g, or t
atgtctttcgaattaccaaaattaccttatgcgttagatgctcttgagccacatatctctaaagaaacattagaataccactacggcaaacaccaccaaacttacgtaaccaacttaaataacttggttaaaggtactgatttagaaaataaatnnnnnnnnnngaagagctcatcaaaactactgaaggtggtattttcaataatgctgctcaagtttggaaccatacattctactggaattgtttag

SEQ ID NO: 317719 - DNA, 174 bp, Proteus mirabilis
atgacactaaaaacatacacaagtacgacacttatttctcaatgggctaatggtgttcgcaaaattcctgctgaacgttgccttgaaattgagaaagcgacgttaggtgtagttcggtgtgaagagcttcgacctgatattgattggtcgtatttgcgtggaactcaacaatga

SEQ ID NO: 317720 - DNA, 255 bp, Proteus mirabilis
  misc_feature (211)..(220): n is a, c, g, or t
atgatgttgatagcgttttttaaaacactatttaaattcttatttcgagtaagaattgaaggactaattaatcagttttcacaatatgaaaaatgcattattacgccaaatcatacatcgtttattgatggtatattattgcgtttatttttaccgattaaccctgtctttgctgtttacacctcagtggctaatgccaaacataccaaannnnnnnnnnatggctcagtcgttatgcggatattgttcctttag

SEQ ID NO: 317721 - DNA, 780 bp, Proteus mirabilis
  misc_feature (759)..(768): n is a, c, g, or t
atgtggcattctagtcatatcaatgaacctcagaacaatgatgaacagattatggtccagatagcagaaaacccctttatccttgtagatggctcttcatacctttatcgtgcctatcatgcttttcctccgctaactaatagcaaaggtgaacccacaggggcgatgtatggtgtgttaaacatgctacgcagcctaataattcagtataagcctagtcatgtggcggttgtgtttgatgctaaaggcaaaacattccgtgatgagttgtatgaggaatataaatctaatcgcccaccaatgccagatgatctgcgtgagcagattgagcctttgcatgaaatggttcaagcgatgggcttaccgttactttctattactggcgtcgaagctgatgatgtgattggcacattggcattaaaagcagccagtgatggtcgtaatgtgttaatcagtaccggtgataaagatatggcacagctagttacgcccaatatcacacttatcaacacgatgacgaatgttattttaggccccgatgaagttaaagaaaaatatggggtgccaccggagttgattatcgactttctcgccctgatgggtgactcatcagataatattcccggtgttccaggggtaggtgaaaaaacagcattagggctattgcaaggacttggtagcttagaggatatttatcaacagcttgataaaatagccacattgagtttccgaggtgcgaaaacacttggcgctaaaatnnnnnnnnnngtggttggttag

SEQ ID NO: 317722 - DNA, 324 bp, Proteus mirabilis
atgactggattaattattaccatcgcgttattgggtcttattttttattattacaaccgtattatctctatgcgtgaagcggttatctcaagtgaaacagaaatatcggtacaactcgaccgtcgtggtaaagtgtttgatagcttattagctacagtaaaaaaatatcttagtcatgaagccgatgtttttactaaaatcaccgaattaagagctaaaacgcaaagtagcaataaccaagaagcaaaagcggcagaagatgagctatcaaaaattgtttcaagtggtgcgattaatgtcgctgttggatactatcatggctaa

SEQ ID NO: 317723 - DNA, 282 bp, Proteus mirabilis
  misc_feature (236)..(245): n is a, c, g, or t
atgcctaaattttggttacccttgtgtttaagcacaagtgtcttgctattaagtggctgttcatccatggggggaatgtctttttctgcacttaatccaatgaattggttctcaaatgagacgttaacggtttctgcaaatggattaggtaatatcactgcttcaacggcagtgacagagcaagcgatcgaaaaagagctgggtagccgtttccattaccgacaaggaatggaaannnnnnnnnnaacaaggcaatattatggttattgtgcaagcacttga

SEQ ID NO: 317724 - DNA, 960 bp, Proteus mirabilis; identical to SEQ ID NO: 289821

SEQ ID NO: 317725 - DNA, 1131 bp, Proteus mirabilis; identical to SEQ ID NO: 312399

SEQ ID NO: 317726 - DNA, 489 bp, Proteus mirabilis
gtgcaatttctgtcggcttttttccgtaagaatttaaaaagacccgaagcgatagtgacactcagtgatgaaattgaacacgtcacggcttatttacaaattgaaaaagcgcgctttcaagaaagtttacagatagatattcagatacctgaacatttagccactgcgcgccttcctgcattttcgcttcagcctatggttgagaatgcaattaaacatggaacatcacagttattaggcatcggaaagattacaattagagcgcatcaagaagaccacttaatagtgatcgaaattagtgataatgcagggctttatcattcgcaaggcgcatcacatcagctcggtttaggaatgagacttgtcgataagcggattaaattacgctatggtgatctatatggtgtacttgtggagtgtcagcctgataactataccaaaataaaaatctgtttacccttagaaaaaaatatggataacgcagcataa

SEQ ID NO: 317727 - DNA, 819 bp, Proteus mirabilis
atgattgtagagggtgatgcagaaaatattttgatccctactttggccaagtgcattgggaaagattttacggaacatggagtttctatgatcaacgtcggaggcgttgggctacgacgatacgctaaaatattcatgagaaaaaatcctgatcaagatggaatacaatctgtacctgttgcttgtgtcaccgatctggacgttatgccaaactgtgctccctatattactaaggtcatccaagacgatagtgattggacaatattaggggacggagagaacagaaagtggcgtgctaagcgggattttacattgacgaaattaaatgaacataaggaaaagattaaatccaaggcccatgggcaaaatattaagtcatttgtagcagatgagtggacactagaatatgacttagcatttgcaaacaacaacgctttggctgaagagctctatattgctgctcaattggctatatgggatgagggtaataattactctgaaaaaacagctaaggaaaaatttgagaaggcccaatccaaatatacaaccttaaaggaagaagctgacaaacttgcagcagataagggttggaacaagaatgaagttttagccagtaaagtctatgcaatgtatgtcacaggctctaaagcttcaaaatccatcgcggcacagtatttgtgtggaattatcatggacaagataacccttgaaaaaacatatgatttaagaaccaagctcccgggctatattgttgatgcaatagactatgttacatcgaatcttcgtattgtttcagggagtaagattaatgaaagttga

SEQ ID NO: 317728 - DNA, 1431 bp, Proteus mirabilis
  misc_feature (1384)..(1393): n is a, c, g, or t
atggcaaatcacaaagaaacctgtctgagtgctgcagagcgtgtgtttgatacccgaaccgtggataccctaacatgttatcatcgagagatggtaaagatgttgatggatagtgagtccttttattctagtccaaataactcacagataaatactaatgagagattagagaacaaaataaaaagcaatactattgaaaataaagctgtgaagggatcttatggtgatattttaaataatttaaaccagcagctaatgaataataaacctgagattgagccttatttctcacattacaactctcccgtcatgcgattggcgaaattaggctacctttctgcactggcctataatgctgataatgtttttaacaaacattcacccatacaaaaacagcaagagcaaaaaataactcatgatttgtgtaaactaatcggttttgaaccagataaagcatttggacatattaccaccagccatgtttttgcttgttatgaaattttgtgggctttgagaaatttaaaaacactgccgatggcgattgcacgtcatccaaaatcaagggatctggttgcagataaaaaagcatttgagttatttaatatgtctatcactgatattttatccatcagtgaacagctatatgaacgagatatttttgatgatgtcagccatttaacttgtcgtggcaccggcatgacaagaacgatgcatttaggtaaattactagtaccgatataccgcttcgaattttggaagaaggcgatggatatcttggggttaggttatgataatctcattgccttaccaatagatgaagagtttaaaacagatatagctaaaacgcgtcatattgtgcttcgtctaatcgagcagggagagccgatactcggtattattggcgtgttaggctcatcgacatacggtagcattgacaaacttaagcctcttttcgaattacgtgaagagtgtgaaaaacaacataacaactcattctatattcacattgatgcatcccaattaggctatatgaaaagcctgtttcttgacgaaaataatagcatcatcccttataacatattgtgcgataaacttaagcaagaagcacctttacttgagttaacctcagatatttatgatagttttactcagctatcaagagctgattctgtttcttttgagccatttcaagcgggattttctccttatcctacggggattgtttgtataaaagatgctcgattaagccgttttctcgctaacccgccaaaactgtgcccagaagaggggaatattcccgatgaaatcgatgggatccaatcagcacctgcagttgcatcaatgtgggggatccatcagctatatgcttttaatcattttgggnnnnnnnnnngggtatgggcaatgcgctcaaaatcaatgggaagctag

SEQ ID NO: 317729 - DNA, 642 bp, Proteus mirabilis; identical to SEQ ID NO: 315545

SEQ ID NO: 317730 - DNA, 552 bp, Proteus mirabilis; identical to SEQ ID NO: 313376

SEQ ID NO: 317731 - DNA, 471 bp, Proteus mirabilis
  misc_feature (434)..(443): n is a, c, g, or t
atgaaaaatactgatctagaattaattattaatgaaaagctaagtattgagaattttcacgactacgcacctaatggtcttcaagtagaagggcgccctcatattcaaaaaatagtgacaggagtaacggcttgccaagctttacttgatgaagcggtacgtttaaatgcagatgctgtattagttcaccatggttatttttggaagaatgagccagttgttatccgttcaatgaaacgcaatcgcttaaaaaccctactatgtaatgatctcaatctatatggttatcacttacctttagatgcccatcctattttaggtaacaacgctcaattagcgttaaaaatgggcgtaaaagttgagggtgagatcgagcctttagtgccgaaagggatttttgatctacctgtcacagccaatgaattaaaaacacnnnnnnnnnncacgactcgaaaaagccttacagcgtaa

SEQ ID NO: 317732 - DNA, 618 bp, Proteus mirabilis
  misc_feature (524)..(533): n is a, c, g, or t
atgatagaggaagagtggctgcgtaacaatacagacttattaagtgaagatgaggatgatacgggattaaccgtggctcaggtgatccaaatgcaggtaaaagataatgatcgctgcctgttattagcaaaacaatttggtattgatgcacttttatcaaggcgttttaaatatctttcaacgggagagtctcgtaaggtactgcttattcagttattgatgaataaacctgatctattaattttagatgagccttttgatggtttagatattgactctcgtcgtacattaagtgagttactttcatcactacatcaacaaaagctaacgattgttcttattttaaatcgctttaatgatattcctgattttgtgcaaaatgctggcttattgattgactgtaaactcgtggcacaaggtaaaaaaagtgatattttatcagactcagtaattgcgcaattatctcacagtgaaacacttgaaaatctgatcttacccgcctcagactccgttgatgcagttcnnnnnnnnnncctaccttaccaccaacgctttcccctattatacttaaggatggcgtggtcagttataatgataaacctgtgctccatcacttaa

SEQ ID NO: 317733 - DNA, 276 bp, Proteus mirabilis
gtggattttcaccacgacgatcaagaaataacaccagaaacatcacttgtattggcggaaaaacaaccattattagatctcaatgcaactttcacctctccgacacaaactaaccctgcactggcttatttacgcagtttaggctctaaacgtagtcgccaaacgatgggatcgtttttaacaatcgtggcaaaaatgattggcttctcttcaataaagcattgccaatggggagcacttcgccgccaccatattcaagcaattatcgacatgtaa

SEQ ID NO: 317734 - DNA, 465 bp, Proteus mirabilis
atgatggcagcacttggggtatttgtgtttgagttacgcaccgtaccttatcaatccctacaaaaacaacaaacgtggcgacatggttttactcaacgtgtcgcacgccgaccggcacaacaatttattggccctgataccgatgtgatcaccttatcgggggcgctttatccctcattaactggcggtaaagtgtcgttgctggctctagaactcatggcggatagcggtaaagcatggtcgtttattgatggtacgggtaccattcatggcatgtttgtgatcaccgatttacaacgtacccataccgaattttttcaagatggcgccgctagaaaaattgatttctcgctgacattaaagcgtgttgatgactctatcagtcagatgttgggagatttaagcgaccaattaggcatgatggccaatggtgccggtgaagcgatgaaaggagttttatcataa

SEQ ID NO: 317735 - DNA, 1404 bp, Proteus mirabilis
atgacggataacttaagcggggatatgaaaaacctgcaatccgcatgggaagatttaggtattcaaatttttgacggtattgatagcccgctacggcagatatcacaaagcattacccgtgtgatttctaaagtcggtgtgtggatgaaagaaaaccctgaactggctaaaacgctgacgatgatcggtttagcgatagcaggcattattaccacactgggtattctctcgttatccattgcggcaatgttagggccattagccgccgcgaaattaagcttgtcaattttaggcattaaaggcggtagcgcgctcacactgttattaaaacccattaaattattaggcagtgcatttttaggattgggtaaagccatgttagctaatcctattttgttggctattgctgctatagcgggcgcgttttatctggtttataaaaactgggacaccattggcccctacgtttacaaggtatgggataccgttaaaaaatatactgctatcgcatggcaagcgctaaaagatactattaagagtgcatgggaggccattaagtatatattctttaattggacaccgcttgggctcattattaaacattgggattcgatagtcagctacacccaaacaacatggacgatgataaaaactaaaatttcagatgtttgggaaggaattaaaacaacacttaaaaacggttggaataatattgttaagtctgtacaagaaacgtgggaaacaattaaaaccacgatatcaacaaaatgggatgagattgtagaagataccaaagcattaccggctaaatttttgcagtttggtagtgacctgattgatgccattattcaggggatcaaaaacaaatggacggactttaaaaatagcattggggaattggcaaccgcagctaaagaagcactcacccctgagtttatgaaaagtaatgatccgaaagtgcagtctgcgttagattcttacaacagcaactttgccggtatgtatgattccggcggttatatcccgcgtggtaaatttggtattgcgggagaaaatggcccggaaattgtcgaaggccctgcgaatatcaccagtcgtaaacacactgcgatgttagcggctgccgcattatcgttaggcagcgccttttcgttacaggcacaaaatgccccgttgcacccacacagtttgcccgttgaaaactatcgtcctgctccggctaatgtgaatattcaacaacagcgttatcaaggcgcgccggcacattatgaaattaatattcatcctcaaccaaaccaatccgcgcaagatattgcccagcttgttatcgcggaaattgagcgccgtgagcgtgaaaaacaagcacgattaaatagccgttatcaagacagtgaggtgtggtaa

SEQ ID NO: 317736 - DNA, 252 bp, Proteus mirabilis
  misc_feature (220)..(229): n is a, c, g, or t
atggcagtgatgggacgtaaccttgcgctaaacattgaaagccgtggttacactgtatctatctacaaccgctcaagcgataaaaccaatgaagtgatcgctgaaaatccaggtaaaaaactggttccgaattactctattgaggaatttgttgattcattagaaaaaccgcgtcgtattttgttaatggttaaagcgggtgaagcaacagataaaaccnnnnnnnnnnaaagcgggtcaagcaacagataa

SEQ ID NO: 317737 - DNA, 900 bp, Proteus mirabilis
  misc_feature (860)..(869): n is a, c, g, or t
atgaaattaagcagtaacaatgctgaaactatggagagccttcgcagtgagcggaatcaatatcgtatacttgtcgatattacaaattctgtattagcgcatctagacatggatggcctcatttctgaagtatctaaagaaatacatcgttttttcggacttaatcatattagtctgatgttatgtcgtacttcatcacaaaatagtcatgaaggtattctttattctagtcgttatcagacaggaaaatctgtcattcgtcaacaacgtaagttcagtagcgccaataacaaagccgaagaaattattcatcaaaacaaacccgttttaatcgatatcaataaagaagatcaagacgatgttttgattaaacgtctcgtaaaacaaaatatgcagacggctttgttattgccactggcttttaaccgtaaaccgctaggtttattaatcctagcgcatgaaataagtagtgtttttactgaagaaacttgtcaattattgcaacaaattgccgcgcgcatcgggattgcaattgaaaatgccgccgcttatgaagagataactcaccttaaagatagccttaagaacgaaaatatttggcttaatgaacaaataaatagaaatggtagttttagcgagattatttatcaaagcgatgccatgcataatgtactagaacaaattgagttagtcgctcaaagtgacagtactgtacttatcttaggcgaaacaggtactggtaaagagttaattgcacgagcgatccatcgtttaagtcatcgtaaaaataagacgatgataaaaatgaattgtgcagcagtaccttccggtctgttagaaagtgatctttttggacatgnnnnnnnnnngtgcaacacatgcccatgtgggtcgatttga

SEQ ID NO: 317738 - DNA, 411 bp, Proteus mirabilis
  misc_feature (397)..(406): n is a, c, g, or t
atgattatatttatcaccggtgcttcagcaggttttggagaagctattgctcgtcactttattaaccatggacacaaagttattggtactgcgagacgtcttgataaactgcaagctcttcatcaagaactgggcgatctattctatcctttacaattagatgtcaccgataaaaaagcagtcagtgaaatttatcatcaattgccagaacaatggcgctcaattgatgtattagtcaataatgcaggactcgctttagggttaagtaccgctgataaaaccaatcttgatgattgggatactatgatcgaaactaataataaaggtttagtgcatgtcactcgtgcattactaccctcaatggttgaacgcaatgtcgggcatattattaatatcnnnnnnnnnnattaa

SEQ ID NO: 317739 - DNA, 501 bp, Proteus mirabilis
ttgctaacattagtcagaaagtctgagtttattcatgctacatgggatgaaatagactttaaaaatagacaatgggtgatccctaaagggcgaatgaaggggagaaaagagcatgttatttatctctctgatcaagcaatggatatcctaactggtatgaaagtttgtgcgatgggaagcgattacttaatgcctggtcgatatgatattaaaaagccactttctaatgctgcattgaataacgtgattgatggcaccgtaaaacgtatcaatgaaaaaggcattgagttcgaaccggttactgttcacgatttacgacgcacagcaagcacgctattgcacgaagcaggttataactcagattggatagagaaatgtttagcacacgttcaaaatggcgttagagccgtttacaacaaagcggaatatgctgaacagcgcaggaagatgttacaagagtgggctgatatggtggatgaatggatgaaagagaaagattaa

SEQ ID NO: 317740 - DNA, 738 bp, Proteus mirabilis
atgactgccgtgttgatgttggtatttaaagatccaattatgggactcgttgccggtattcaactctccgccaataatatgattagcttgggtgattggttagaaatgcctaaatatggtgctgatggtgccgtagtggatattagcctcaccacagtaaaagtacgtaattgggataataccgttacgaccattcctacttattctttaatttctgattcgtttaaaaactggcaagcgatgacacaatcaggtgggcgtcgaattaagcgcagtttatctcttgatatcaatagtatttactttttagatcaagagaatattgataaattagaaaaggcacagcttcttgaaccttatataaaaagcaaagtaggtgaaatctccagctataacgctagcctttgtcatgagcatcaaatgccacttaatcaacgtggtatgacgaatgtcggtacatttcgcgcttacgtggaagcttatctaaaaaatcatccgaagatccataaacagatgaccattatggtaagacagcttgctccaacctctgaagggctacctatcgagatttatgcctttaccaatacaaccgtgtgggtagagtatgaagctattcagtcagatatttttgatcatatattcgctattcttcctcagtttggtttacggatacaccaatcaccaacaggtagcgatgtcagagcattaaaattccctaccaatatcgacacaccatag

SEQ ID NO: 317741 - DNA, 393 bp, Proteus mirabilis
  misc_feature (380)..(389): n is a, c, g, or t
atgcagcagcaactgcttacatggatacgtcagtttaatgaagagtacgctcaaatcacttctctgttacttgttttattgatcatttttgttgttgctcttgttctccactttattttgcacaaacttgtgctccctaagctttcaaaagctatcagtaaatacgatcaaaagtggcaactctcttttgaaattaataagttattcagtcgatttgcctttcttatccaaggtgtagtcattaatatccaagccttattatggatgggacccggtaaaacacaggagatattaaccaccacagctcaagcatggtgtttacttttcggtttattgatgattttctcaattatggatctctgtttgcagatcatgagaannnnnnnnnngtaa

SEQ ID NO: 317742 - DNA, 735 bp, Proteus mirabilis
atggcttcctttactaattggcagggcattttctggctagcaagtgtttttctagctattttagctattacactatggcgctgtttacctacctataaaagccaaacaaatttaaattattttcaactgctcggttctatttttaaattgtttgccacgaccccagtattacgtacccgctcactgattggtgcacttatctttgcccactttggtttactgtggacatcaatggcttttttactcgcttctgatccctttaattattccgatgcagttattggcttgtttggacttgtcggtgctgcgggagcactaatggcaggtaaagcgggtgtatgggttgataaaggcaaaggtaaaaaaacgactacttcaggtttaattcttctcttcatttgttggggacttattgttatcgccccttattatcaatggattggactgattagttttattattggtgtggttttattagatttagccgttcaaggtgttcatgtcactaaccaaagcactatctaccgtattttacctgatgcccgaaatcggcttactgccgcttatatgactagctattttatcgggggcgccctaggctctttattatcgggttacgcttatcaccaatatggctggattggtgtttccagcgccggtgcaatcattggcttattaggtttactggtttggttatttggttataaaaatgatccagtgatccaatctgaataa

SEQ ID NO: 317743 - DNA, 462 bp, Proteus mirabilis
atggaaaacacagcaccacaaacctctcttagtaaaggccttattttacttatggccgttgccactggcatggttgtcgcaagtaactattatgcacaaccgctacttgattcaattgcaaattattttcatatctctgccactttagctggctttattgtcactacagcacaattaagttatgccttaggtttaatgctattggttcctcttggcgatatttttgaacgtcgttcactgattgttatcatgacgctgatttcagcgagcggcttattaattacggcaatggcacctaatatttggcttatgttaattggtactgccctatctggttccttttgccgctacacttgctgcacctcatcaacgaggaaaagcggtaggtactattatgagtgggcttttacttggtattttactggcaagaacagcgtcagggctgatggcttcctttactaa

SEQ ID NO: 317744 - DNA, 180 bp, Proteus mirabilis
atgatgttattatttttaaaaagactatttttatttgttattttcactatcggcatatcagcactcactggatgtattcgattagaggttgctacgaacgttaagattgaacatgaaattaatgtcaaaatagatcgccaagttgaagacttgctgaaaaacaatagtgctatattctaa

SEQ ID NO: 317745 - DNA, 312 bp, Proteus mirabilis
atggtttggcaagatcaactggtgtttaaaaaacaaggtaataaatttattgttaataatccaaccccttattacatcacgattatctcactttctaataaattaaatggtgaggatagcgataaattaaccaccttccccggattaatggttgcgccaaaagcttcactggatataccagtaaaaaccagtaacgttaatcagttttatatgatgtatgtaaatgattacggtggacacccagagctcaaatttgtatgtcagcaagatagctgcaaagtagcccctaaagatcaacaacctaaatattaa

SEQ ID NO: 317746 - DNA, 450 bp, Proteus mirabilis
  misc_feature (413)..(422): n is a, c, g, or t
atgaactcattcagcacactaaaaacactattttgtggctctttgctggcactgagtctagtgaatacaacacaagcgggtgtttcactggatagaactcgtattgtattaacgggtaatgaaaactcagccagtgttaatttaaaaaataccagccctgatattccttttttagcgcaatcttgggttgaaaatgaaaatgggcagaagatctcttcacccttagtggcacttccaccgttacaacgccttgatggtgctcaaaaaggcgtagttcgcattacaaaaacagctgaagttgggctattacctcaagatagagaatcactgttttatttaaatgtgcgtgaaattccccccgcaccaaaacaagccaacgtattacagatggcgatgcagtcacgcattaaatnnnnnnnnnnaaattattctatcgccctagtgccatag

SEQ ID NO: 317747 - DNA, 444 bp, Proteus mirabilis
ttgaatgtcaaaattcctgccggtgttgttgatggacaacgtattcgtttaaaaggccaaggtactgctggggagaatggcggagaaaatggtgatttatggctaactatccgtattgcacctcatccattatttgatgtaaaagggcatgatcttgaaattgtggttcctattgcaccttgggaagccgcattaggtactaaaattgctattcctacacttaaagataaaattttacttactattcctcccgctagtcaggcaggtcaacgcctgagaattaaaggaaaaggcttagtaagcaagcaaaaaagtggcgatctctatgccattttgaaagtcgtcatgccacctaaagtggatgaaaaaacacattcattatggcaacaactcgccgaagcccaagccgattataatccacgtaaaaactgggagaataaataa

SEQ ID NO: 317748 - DNA, 582 bp, Proteus mirabilis
atgtttggtgaaggtacacatcaaataaaaggtaaaactgttgaagtgactttacgtaagctcaaaaaacagctttacctatgcttaatgagtgttaatgctttagaagcgattcgtttctatgtcagctttgcctgttcatttgcctttgcagagcgcgaactgatggaaggtaacgctaaaatcattaaattgattgcccgtgatgaagcattacacttaactggcacacagcatatgctcaatttactgcgttcaggtcaagatgatcctgaaatggccgaaattgccgcagaatgcgaacaagaatgttatgaatacctattctcagaaggctctatgatcggtttaaataaagagatcctttgccaatatgttgaatatattactaatattcgtatgcaggcagtaggacttaaattaccgtttaaagcacgttcaaaccctattccatggattaatgcttggttagtatctgataatgtgcaagttgcaccacaagaagttgaagtaagctcatatctagtcggtcaaatcgactcacaagtagatactgatgatttaagtaacttcgaactgtaa

SEQ ID NO: 317749 - DNA, 1683 bp, Proteus mirabilis
atggcaataatctcaacaatgctaagtttagcaccattatggatcatctataaaatcagccagatttgtttttcaacatcacctaatattcaacaaataaataatctagtttatatcactgtgattattttaattttacgttggggattaatggcaataagtcatattgccgcacatcggggtgctttttatattcagcatcaattacaactcgcaatagctaaaaaaatcagtaaagtaccattatcattttttgctcaatatggcagtggaaatctgcgacgtattatcaatgatgatataaaaagcttagaaggttttttcgcacatatgctacctgatctcgtctcagccatagtgactccctttatcgctattatattacttttttatgtaaattggcctcttgccttattatctctaaccccattacccattgcttttatggctcaacttctcatgttgcgtcgagccaataaacaaaccaatgagtggatgaatattcagaaaaaaattgctaatgaaataggagaatatattaaaggaatacgagaaataaaagcgtttaacttaacctcccatacttttggtaaattatctcaatctatcaattcctctgttaaatggataaaaaataatgtcaaagctagtacaggctcttggatggtatttagtgggatattaacagcgaatctcgttattatagcaccagtaggtgggtggatgtatttgaatcaaaatattgatttatctacttatattttatttttaatgacatcccccctcgtacttgcgccgttattacgactaacatttgtgctaggagaacaagctcaacgaaaacaaaccttaaaacatatcagtatgatccttgaactttcagagcataaacaacatgataaacattttactctccctaaaaatagcgatattacttttaaagatgtctgtttggatcatggtgataaaccgatattagagaaaattagttttaatgcccaagcgggtacaacaactgcaattgtaggccacagtggtgcaggaaaatcctcattattaaaactaattccccgtttttatgattgtacttctggccaaataaaaataggtcaatatgatatcaactactggccagaaattgatttactttctcaaataagtgttgtttttcaagatgtatatctatttcatggaactattttagaaaatttactcatagcaaatcctaatgccttatttgaggatattatcaaagcaactaaagcagccaatattcatcatgttattgaaaaactcccagcaggatataatacattaattggtgaacaaggaaataaactttcaggtggagagaaacagcgattatcaattgcaagagcactattaaaaaactctccaatcctacttctcgatgaaattactgccaatgttgatgctgaaaatgaaattttgatctatcgcgcattaaagagtctatgccagaatcggactgttattatgatcactcataacctacatactattattaacgcagataaaattattgtgcttgataatggaaagattattgatacaggtacacacacccatttattaaaccaatgcccaacctatcaaaaattatggaatgattatagtcacactattcattggcaattaatccaggagaataataatgattaa

SEQ ID NO: 317750 - DNA, 390 bp, Proteus mirabilis
atgtctaaatcggcaaaaggtacgacagaacggcctggacggaacgtaaaagctaaatctggtttaaaccgcgctatactggagcagggctggtatgaaatgcgccgacagcttgagtacaagcagctctggcgaggtggtcaggtactggcaataccccctgcctacaccagtcagaagtgcgcttgctgtggtcatacagcaaaggaaaaccgccagtcacaaagtcaattcgagtgccttgaatgtggatatacagcgaatgctgatatcaacggggcacgtaacattttagcggcaggacatgccgtgcttgcctgtggagggagggtgcagtcaggccgcccgtcgaagcaggaacccgccgaggtgattcagacatcagtctga

SEQ ID NO: 317751 - DNA, 1449 bp, Proteus mirabilis; identical to SEQ ID NO: 311422

SEQ ID NO: 317752 - DNA, 732 bp, Proteus mirabilis
  misc_feature (6)..(15): n is a, c, g, or t
atgtannnnnnnnnnagcttaaataaagaatggatcaagaatagtagaaaaattgagaatagaatcaaactttggcataattttataagaattattaaagccatcgagctattgcattcccaaggtctgcttcataggcatctggataaagattctatactgactgatcctagctcacttgagtttgacttccaattgactggcttcgaatggtcactacgtgttcacgctgtttcagataaacataacgaatatatatctagagatttgaagaacaataagcagtattcttttttatctgattgggctgatctaggctttctaatagccgaattacttaacattagctcagatagattaataaaccttcaagccacaattaatgatttagtagatgaaaccgatctaattcttgatgaattagctttaattcgcggattaattggcattatgaaattggaaaccaacttgtcaagggaggctataaatggttctataataatagaaaaagcaaatactatattaaagtcattagaatctctaatttcagaagaaaattcaactaggtatattgaatttcttttttcggcaaaagcaaactcggaagtaacaccagataaaataacatctgtttttaatgccatacaatataccataaacaaagatcatggaatcacaatttcagataaggatattgatgaatgtttggactttatatatatctatctataa

SEQ ID NO: 317753 - DNA, 780 bp, Proteus mirabilis
atgattgagttatcatcaaaagttaaaaacattattttttggatatcaatatctttagtatctttgattgtctttggtatttttattattgatgtatttgtaactgatgctcatggaaaggataagttgagtatagttttttcttatctatctacggtttttgcttttttatccgcactaggcttatttgcaaccattggtgtttatttctggcaaaaaaatgaaaatgaaacacaaaaaaataataaaatcgaaggtattgatatgattatagcagatgagtgtaaaaacattaattatcttatctattccactcggcaactcatcaattcagtagaaagccaaaacaaactaatagaagagtacacgatagaagatgataactttggatacattgatataaatagcactcttaatgatgataaatatactgtggttttatcaaacgtttatttacaacaactagatgatggcgttcatgagcagtcatcaaaaattaataggataacacatgaaaaattatcagaaatgctatacacgtcagcatctcttgattttgagctctattatcgagtgtatgatactatttctatcataaaaaaagttaatcaagttttaaattattttttaaatttcaatgagatggctaagcaaggaaatgttgatggactcattatttatagtaaggaaactctcgatggatgcttaggggcattgaaggaaatatatttagaatgtacgggaaaggaattagagaaatacatgtggaatattagatag

SEQ ID NO: 317754 - DNA, 1605 bp, Proteus mirabilis
atggacatacctaatttgataaagaagctaaaagaaattaaagtcattagtaccctagttggtgaattttctttcatcaaacaaattggtgaaggaggtaacagtaacgtttgtctgtataaaaagaataatattaaatttgctatcaaatttttttcaaagggtgtcaataacaaatcaaaaaaagatagatttatagatgaatattttggaatgacacagatcccgtctcatcctaatattgctaactactttcatctagataaggttacacttcataatgatgaatatttaatcatcattatgaaattttataaatcagcgcttaagggaacacttacaggagaagaggacaaagatgtatatacaaaaaaattaagagctctttattacgatctactaggagctattgagcatttgcacacatatggcattatacatagggacattaaaccccaaaatattttggttgatgaagagtctggtaggtttgtactatctgactttggtatttccaaattcgatccagaaaatatcgctaaagaagctgaaacaaaagatggggaacgtcttgcaaattacagatactgctctcccgaacagcgaggaaaaaatttttcagcttctttttcaagcgacttatattcttttgcacaagtcatacaagagtatgcaacaggcgatataaatcaaggaggcggacgaacccaacttaaacatcaggacattgagttcattcaaatcgttgataaggttattgaaaagtgccttatgcaccaacctggaaatcggtttagtaacgtttcagaattaaacgattttatgactaaagaaagtaattcgtataaagaaaaaaagaaacgtatcgaaaaggaaagagatattgattgttcatgggattttctttacaagttcaatatggcaatagcaaaaggttttccttctgtcaaagaaatcagcgaaataactgctccagataaaatagcccgcttccttcaatgtattgatgataccatcaaaaatactgagcataaaaataatctttggatgatccaatctaatggaggggatttaaattactatggaacggaacatattagcaccaatacgtttgaaataaactatgggggcttccctcatcaggcaaatatcagtaaaattattgttcattataataacacaatcccatataaaagtttcttcattattttagtcgatagaatggatcactttgtttatgtagatactactgatttaaaaaaaacaaaaataagaaatactctaccgcaaaaaatcgatgatgtcgtcgaatggcaagattattatttggatccccaggatgccgataagccgtatatcgaaattgaggggaagatatataaaaatgacaaaaaatatttccgacgcttaaatcgctttgtagctactgaagctttatttgtgttgccctctaatatgttcgattatcgcttttgtcataatgatattgtcaaaaatcttcttgctgatattataaataagaattcattgagtcaggaatcagctagaaagtataggttcgatatagctaggcattacaattactggataactagtagactttaa

SEQ ID NO: 317755 - DNA, 243 bp, Proteus mirabilis
atgttatttacaatccaacgttggctaaaaccaggaggaattgtattaatagatgaacctgatctacatctacatccttctgttatagcacctctcttagcggctatcgaaaatattgtgactaataagaaagggcagttaattttaacgtcacactcaacagaagtttggcaacgctatgaaaaatttggttcacgtattgatcttactttgctaaaaggatcggtgaatgtcgaaaattga

SEQ ID NO: 317756 - DNA, 789 bp, Proteus mirabilis
atgagaattagttcaatttatacacaatctgtaggaccattagctgatggtgttattaagttagaagatgattggtctaatgagattgaagctcaagttttatttaccggtaataatggttgtggtaaatcgactttattacggggcatagctattttatgggaagcattaggtatttggctaagtactgaacaaccgttagctccagcgagcaatacacgaaaatggttagaacgttggggagggatcgctattatttttgaagattttaatctttcttctgatgataagattaaaattggacttttttatggttcagatgattttttttcccaagtagtaacaaactatttagatgtaatgtggataggtgaaatttcaaataataaaaagaaaaataaattatattttccatctagtgaaaataaacataatgataatctgattgagacctataaatatttagggaaaagacgtattcaatcactttataatgaattggatccagaattatctattcctaatattgtctatttagatgcagaagcgcgtaaatgggtaaatccaacagcaacgagaaaatcattatacccagacgatcttaaccaagcatggctcgcgacttatacggtgactaatgattggaatgggcaaatagaaacttcactgtttaatttaaaagcgacactgcctaatgaatatcctaacatgataaagagtttaaattactttttttcagacaacagattattttatcaaatggaaggcaacatacgtttgatgagttaa

SEQ ID NO: 317757 - DNA, 255 bp, Proteus mirabilis
atgaataacactaaattaaaagaatcagcctgtgatgaattaatttatgcgacttctattttaaatatcattatcaacgataacgtaacagctgtcggttgtattttaaatgcattagaaactgcaattaatttaaaagtagctgaagaaagcggtcatgttaaaaattacgatattcaaattacaaatttaatccagttagcaaaattaaatttagaaactgtttatgaaaaaatcagcttcatggaggcataa

SEQ ID NO: 317758 - DNA, 951 bp, Proteus mirabilis; identical to SEQ ID NO: 86446

SEQ ID NO: 317759 - DNA, 1275 bp, Proteus mirabilis
atggtttttgctacaactaattctagacaagtagaagaactaattagtgagaaatcacaatttgactggtcaataatggaagaaacaggaaaagtaacaggtgtagaacttcttagcccaatgttactttcatatagaagactgatgataggtgatcataagcagttacccccttatgcaacagaaaaaatgagagagatcctcactgatattaataaattgaagaatgcaataattattgcaactgatataaataatcaacaaataaaaggtgattggataaaagagcgttttactgaaaattttatctcaacaattgataacgaatcacttgaaagattgagttctagtgcagtcaggcttcatctcttatttgaaagtcttgtgcttgaagaaaaagcgaaatcacagaaatatatagatcgttatggtgatgagagaaagcatagaaaaattgcgagcatgcttaacttccaacaccgtatgcatccagatatcgcaaacttaatctctagcgtattttacgataaaaagcttaaaacagaaccttcaaaagaaaaattctatagagatgtaaatactattaccccttttacatttaaacctaactctccattacttaactccccagcaattatttggattgatacccccgatgttcaacaaactaaaaataattatgccgcagaatctcttcctgcttggacaaataacctagaaaaaaatactcttttatccgtccttgaacatttgaggctgaattcaaaagcagaaaaattaccaaaactagcaatcatgtcaccttatgcaaaacaggtagatttaataaagagaagcctagacaaaaaactgcataaagaaccaagttccttagaaatagagtattttcaaaaaccagatgatcattcttcattttgtagcactgttgatggttttcaaggggctgaggctgacatagttattgtatctatggttagaaataatcatcattcttatgttagagcatctctaggatttctccttgatagtaggcgcatgaatgtcctactaagtagagcaaaatataaaatgataattattggttcattcgaattccttaaatattggtctgatttaatcgacaaaaaagaaattaaaaaaggagatttaagtaatcaatttttagtcgatcttgtcaataagctcatcgaatatgagcgtgaaggactattaaagaagattaactctagagaattcaaacacgtaaagcaagataaaaataaaaaaaggacttaa

SEQ ID NO: 317760 - DNA, 228 bp, Proteus mirabilis
ttgattattatcacattaacgtcagtcataaaccgttatggtaattttatgattaataacgtaaacggtgatgatatggaatattggtttattgcgtataaagtgcgttccagaaatggtgatacctacgccggccatattgcgttagaaaaagcatgtcaggaagttgcacaaggggctcaagctgatattcctgcggtgagagttgtggcatttaatcgtttataa

SEQ ID NO: 317761 - DNA, 195 bp, Proteus mirabilis
atgatttcaattacaggacgttcaaatggtactcatcactcttattttaaagtaaatggcaaggttgccgcagtggttggcggaagtgatactattgccattgataggaatttttttgcaattgttaagccgggtgcaacatacagaatggagagtagtaaattttcatttgtttattggggggaattaaaataa

SEQ ID NO: 317762 - DNA, 1083 bp, Proteus mirabilis
  misc_feature (1039)..(1067): n is a, c, g, or t
atgctaataaaaaattctttagcttatgcgattacactaagtttctgcttatccttacccgcacaagcattaccttctctttctcatgaaccttttggcgatctttatctttttgaagatgaaatgccaaataccttgagcacctcaaatgaccatcagctatcactaagtaaagagcatgctaaagatggcgtacagtcactcaaatggcagtatcaaccccaatcaacattaacacttaataatgaagttaattatcaagatgataaaaatacagcaacaccactcacttttatgatgtggatttacaatgaaaaaccacagtcaacgccccttacattacaatttaaacaaaataatcaagtagcattaagttttaaaacggaactgaatttcacaggttggcgaggtattgcagttccttttcgtgatatgaaaggctcagcaacaggcaaattagataaattagtcattactgcaccagatcaagcaggtacgcttttttttgatcaaataattatgagcgtacctttagataatcgttggcctattcctgactatcaaattccatatgttaataatgcagtaaatacaatggtgagtaaaaattggagtgcattattgatgtacgatcaaatgttcacagcgcattatcctacattaaattttgcgactgagtttcgcgatgatcagcctgaagtggcatctatttatcaacgttttgaatactatcaaggtgtcagtcgtgataaaaaaatcaccgctgaaatgatcgacaaaaatttagcattatggaaaaaattagccttagaacaacatgctgatggctcaataaccgcaaaagcccttgatcatcctaatcgccagaattttatcaaagtcgagggggtctttagtgaagaaacccaaaaagcattacttgatgccaacatgctaagagatgtaggcaaaacgcttcttcaaacagcgatttacttgcgtagtcactccttatcagcaatcgatagaaaaaaattagaaacgctctatttattagctnnnnnnnnnnnnnnnnnnnnnnnnnnnnnacgctctatttattag

SEQ ID NO: 317763 - DNA, 864 bp, Proteus mirabilis
  misc_feature (825)..(834): n is a, c, g, or t
atggcaataagtagaagaaaatttattcttggtggcacagtggttgctgttgctgcaggcgctgggattttaacacctatgttaacgcgagaagggcgttttgttcctggtacgccgagacatggttttgttgagggaactggcggtccattaccgaaacaagatgatgttgttgtaattggtgcgggtattttaggtatcatgaccgcgattaaccttgctgagcgtggcttatctgtcacaatcgttgaaaaaggaaatattgccggcgaacaatcatcgcgattctatggtcaagctattagctataaaatgccagatgaaaccttcttattacatcacctcgggaagcaccgctggcgtgaaatgaacgctaaagttggtattgataccacttatcgtacacaaggtcgtgtagaagttcctttagatgaagaagatttagaaaacgtaagaaaatggattgatgctaaaagcaaagatgttggctcagacattccatttagaacaaaaatgattgaaggcgctgagttaaaacagcgtttacgtggcgctaccactgattggaaaattgctggtttcgaagaagactcaggaagcttcgatcctgaagttgcgacttttgtgatggcagaatatgccaaaaaaatgggtatcaaaattttcacaaactgtgcagcccgtggtttagaaacgcaagctggtgttatctctgatgttgtaacagaaaaaggaccaattaaaacctctcgtgttgttgtcgccggtggtgtttggtcacgtttatttatgcagaacctaaatgttgatgtaccaacattaccnnnnnnnnnncattacctgcttatcaatcacagcaattaa

SEQ ID NO: 317764 - DNA, 795 bp, Proteus mirabilis
atggattaccggcaaaaaaactacccgcattggtctaatgagagagaatatgcattccggcaattagttactcgcgaaaaatacccaggcatcatttataacggtatggatatcacacaagagaattggcaacatgcacagaatcgtttatctgactggatacaaacgttgccaccacaaactggcattattgccgtcaccgatgccagagcgcgtcatttactgcaagtctgtgataacttaaatattaatgtgcctgaagaaatcagtattataggcattgatgatgaagatatgacacgttatttatcacgtatagcgttatcttctgtagtacaaggttcacgacaaatgggatatttagccgcgaagcttctgcatcaaatattagaagggcatctaactgaacaactaccaagaatattagttcctccagtaaaaatcattgaacgtcgctcaacagactttcattcatttagtgatcctaccgttgtacaagcaatgcactatatttattacaatgcttgtaaaggaataaaaactgagcaagtgttagacgctgtaaatatgtcgcgttctaatttagaacagcgttttaagaaagaagtagggaagactatccatgccgtgatttatgaagagaagctgaaaagggcgaaaaacttattagccacaacaacattatcaatacaagagatttctttgatgtgtggctatccgtcgttacaatatttttactctatttttaaaaaagagtttagcatgacaccaaaggattttagagatgagaattaa

SEQ ID NO: 317765 - DNA, 408 bp, Proteus mirabilis
  misc_feature (40)..(49): n is a, c, g, or t
atgctccaagagttaagcgtaagcttaacatcaatgggannnnnnnnnnctagtctcgtgggctcggagatgtgtataagagacagcatcaatgggaaaattatttgctttcgtagttatagccgtaagtctgctactaaaaatactgcatttaaattagccaagacacctcctactcaaggggttgctcgttatgtagcagagctagctcactattataaaatatcttattgctacaatatgatggatcagtgggctgatgctgtaactcgcctagccggtgatgaggtggtacatgatactgttgaggacctccttgtagctctaaaacgagcagggaaaatcaccaagcaagaagttgcgatgctgtcagtcaattacctgcgggagcaaaaacaaagtgtttga

SEQ ID NO: 317766 - DNA, 372 bp, Proteus mirabilis
  misc_feature (359)..(368): n is a, c, g, or t
atgaagcttgaaactcgtatgcgtcagtcgattcaacaccgtagtggggttgtactgactcgttttgatctggctccattgggaagcaagacccaagttacacaggcgttaagtgtgttagtgaataatggcgaacttcttcgtctttctcgaggaatttatgctaaagcccaaaggatggggaatgatgtaaaagcgcaaggtagtcttgatgttatcattcgtgaagtagccaataaattaggcttccagcttcgccaaaaagacttgtgcttcgagaaagtaaatgcctcacaagatgaaattattgttgaagtggatgctccaagagttaagcgtaagcttaacatcaatgggannnnnnnnnnctag

SEQ ID NO: 317767 - DNA, 789 bp, Proteus mirabilis
  misc_feature (12)..(21): n is a, c, g, or t
atgatttatatnnnnnnnnnngatttatatggtctttatatcaatgaattagctgagcaccaaaaactatctcaatctttagagaataaaaaggtttatttaagaaagattgatctcattaagagtgtcatcaaaaacgcaattcctggatttaaagatatctatgttgataaaaaaacaggccgagcggaagttatgattgcaattgatgatgagagaattaacatcacacaaacatctcaaggacagcaagtcttggtttcactcatcactgatatagctcgacgtattttaactttgaatcctaatttagataatccattggattcttacggtattgtagtgatagatgaaattgaacttcatttacatccaaaatggcagcaaaatgttgttaatgccttactaaaatcttttaaaaacgttcaattcgttataacgactcacagcccacaagtattatctacgattgataagaagaatataagaatgtttgttaaaaatgatcaaggggaaatgagatctgtctctcctactttccaaacaaaaggtgttaaaagtgcggatgtgatggctcgtataatgggggctgattcaatccctgatgttaaagaagcaagagatgttgatgaattttctcaattattatctgaaggtaaaaaagatgatgcgctttctcttttagatgagttaaagcttcattttggagaagagcatcctgttattcttgattgtgaaaactctataaaaatttatgaattaaaagaaaggattaggaataagggctag

SEQ ID NO: 317768 - DNA, 450 bp, Proteus mirabilis
  misc_feature (429)..(438): n is a, c, g, or t
ttgaaaacgataactattaaaatcagtctttttgttttgtcactgtttttccctctcctaacaaaagcacttgttattccagataatggaacggggtatataggtgaattaacgcctcctcaatcatatatgtcacttcgtagtagtggtaattactatggagcggctgtaggtgttaataatgttgtagattattgtagtaaaaacagtgcgcaatggcagaattttttattcccattcccaggaagtcaagagggggagtacggattaaaattatataataaaaacgtaagtgaagaggaaaatagggaaaattatttagttgcagctatcaatggaatagtatctatcgatgcgttgtattatcagaatggattaccttccccgacaagaattaccctgcgtcgaggaaaagaaatttctagaacnnnnnnnnnnggaatattctaa

SEQ ID NO: 317769 - DNA, 390 bp, Proteus mirabilis
gtggcagcccctgaggtaattagtgaagtagatagtttcgtttctattgataataccaatactgccggtgctgttagcgcattagcctcgttaaaagatcacgcttttgtggcatatagtcgcaagtcaattgatgtatcacgacaaatggtggttgatactttaaacgccttaaatatcgagtatgcaccttctcacgccaactttatttttcataaagtcaaaggtgatgtgaaaacttatcaagagagaatgaaagcggcaaatattatggtaggacgtgagtttcctcccgcattaggttggagccgtttgaccttaggaacccctgaggagatgagttattttgtcgcgacattaaaagaatttagaactaaaggatggatataa

SEQ ID NO: 317770 - DNA, 1341 bp, Proteus mirabilis
atgcatcaatctgatgtagcggatcgctcacttttttcccttagctggcctatttttattgatatttttcttcatcttgccacgctattgattaacacttacatgataagtcatgtctctactgcctatttagctgcaatgggcgtaggtaaccaagtttttgatctttttatcaccatatttaactttattagcgtgggatgtagcgttgttattgctcaatatttaggcgccggtaagcgcgataaagccagtcaagctattcatatttctatcgcctttaactttttgctgggctttagtagtgccattattattctcttttttggctacaacattctaaatgtaatgaatacgccagagcatttagtacaagatggctataactatctccatattttggggatttgtcttattcctgaagcaatttcaattatcttagcagcctgtttgcgggtttatggtaaatcgaaagcggcgatgtatgtgacgttaattgccaatattgtcactgttatcggcaatatgattgtactatatggtttctttgggcttccacaatacggtttagtgggtgttgcatggtcaacagttgtcggtcgtattattgccgttgtcttattatgtggtcttttattctatggattaagaattaaattcgatataagactattagtgatttggtctaaaaatatgttagccaaaattctacatattggtttacctgctgcaggtgaaaacctagtgtggattttacattatatgaccgcctctgcctttataggcttaatgggagaagttcctctcgccgcacaaacactctatttccaactatcattattcttaatgttatttggcattgcgattagcattggtaatgaaatattagtcggtcatttagttggtgcaaaacgatttgatgatgcatttacacggggttttaaaagcctaaaagcaggtgtgctatttactattggtgtggtgattatttattggtttatgcgtgatcctattttgtattctatcaccgaagatcaacgcattatcgaccaactgttgcctttatttattttatcggtctttttggagcctgggcgtacatttaatattgttatggttaatgcgttacgtgcagccggagatgccaaattcccactcattacagccgtttgttttatgtggggagttgctattcctattggctatttccttggtataaaaatggaaatgggtttaattgggatttggataggttttctttgcgatgagtggctacgaggcttaacgaatgcatggcgttggcgctctcgtaaatggcaagctaagcgcttagatatttga

SEQ ID NO: 317771 - DNA, 900 bp, Proteus mirabilis; identical to SEQ ID NO: 307572

SEQ ID NO: 317772 - DNA, 1212 bp, Proteus mirabilis
atgaaacagtatgctggcttcatttatattgcgactacgcttgatactaaaagcgctgaaattttttatgtcagtgaattaataaaaaaagcaggccttcctgtcaaaaccgtagatttgacaaccaaacctacagcattagaaagagaagctgacgtcacagctgcacaagttgctagttaccatcctgatggaaaaaacgccgtgttttgcggtgaccgtggaaaagctatcgcagcaatgtccgtcgcttttgaacgttatttaacccactgtgacgatgtcctcgctattttaggattaggcggctcagggggaacggcattgattacaccagcaatgcaatctttgcccattggcgtacctaaattgatggtatcgactatggcttccggtgatatctccggatatatcggcgctagcgatatttcaatgatgtactccgtaacagatgtatccggcttaaaccgtatctctcgtaaggtattgagaaatgcggccaaccaaattgccggtgctgtttatttttaccaagaagaaaatagtgttgataaaccggctgttgcattaacaatgtttggtgtaactacgccttgtattcaacaactgactaaaaaacttgaaaataattatgactgtttagttttccatgcgacagggagtggcggtaaagccatggaaaaactgatagacagccacttacttcatagtgttcttgatctaacaacaaccgaagtatgtgattatttatttgagggtgtccttgcttgtgatgaagatcgttttggtgccatcgcccgcactaaaacaccttgtatcgtctcttgtggcgcgttggatatggtgaattttggtcgccctgctaccgtacctgagaaatataaagatcgtcatttctatcaccataattcgcaagtcaccttaatgcgtacaacaccaagggaaaatcgtcaaatggggatctggatcgctgaaaaattgaatcagtgtgaaggcccactgacgtttatttttccacagggcggtttttctgctttagatattgaaggggggccattctgggatcctcaagcaaaccaagcattttttgatgcatttataacaacatttaaagagaccgagactcgtcaattagtcatcagtccatatcacataaattctgctgaatttaatcagcaagtttatgatttacaccaggaacttatttgttaa

SEQ ID NO: 317773 - DNA, 351 bp, Proteus mirabilis
gtgagtcctggtatcttagctgtattcttgttaggactattttggaagaaaactaatgccaaaggggcaattataggggttgtactctcaattccttttgctttattcctaaaattaatgccactaggaatgccattccttgaccaaatgatgtatacctttattttcaccgcggttgttattggtttggtcagcttaacctcaacgaaaagtgatgatagcgtaggggcgattgtattaactgatgcaacatttaaaacccaaagtgggttcaatattgcttcttatatcattatgatcatcctctgtgtactcttggatatattggaatgcctgatcaatgccccctaa

SEQ ID NO: 317774 - DNA, 777 bp, Proteus mirabilis
gtgtatcgttgggcactaataccacttttattattattatttttgatattgggatcacttattgcattaatttgccaactctcttatcacgaactcaccatggttattactgatgctgaatttcattttgccgtattgatgtcactgagcaccgcgttaacatcattgtgtttagccgtgctcttagctgtacctgcagcttgggtgatggcaagatcgtcatttaaaggacagcgttttattgatgcgttactcgatttacccttagtcacgcctcctttggtaataggtattggattattattattgttaggtcatcaaggacctttaacaggggttttccctcaattatctcgtgcccttttttctcccttggggattattattgctcaaacatatgttgcaagtgcaatcattatgcgtaatagccttgcggcgtttaaagctattgatcctgcttatattcaaaccgcacagaatttaggattaacaccaacaaaaacgcttattttggttgagatcccactttgttggtctgtattaatcagtggttgtattgtggctttttctcgagcattaggggagtttggggcaacattaatgttggcaggggccacacgattaaaaacagaaaccttaccaatggcaatctatttaaatatagcgagtggtgatttctcgcttgcgataggttgcgctttagtactgatagcaattgcaattactctattgtttgctttacaccgtttacagcgtgataggaaattagcatgttaa

SEQ ID NO: 317775 - DNA, 882 bp, Proteus mirabilis
gtgcctggacgcattgcggctgtttatgtcaaagaaaatagtaaagtcaaaaaaggcgatttactgtttacacttgatcccacaatgtacgcactcagggtagagcaagcaaaagagcaactacagattgcacaagcgacattaagcaataagcaacgtattattattgcggaaacatccaattcagaagtggcacaagagcaaataaaacgtgcgcaggtcaatttatcattagccacacaatcattaaatcgattagaacctttattagcaaaaggctttgtcacagcacaacaagtcgatgatgctcggacgttaaaacatgatgctgaagtgacattaaaacaagcacagaaacagaatgtggcatctgaagcacttattaataataccgattcagaagaagcattagtcaagtcattaaaaacatcgcttgccatggcagagtgggagttaagtaatactgaggtaagggcgccaagtaatggatatatcgcaggggtcgttttatctcccggtgaatttattttgtcagggcaatcggtttttaccttaattgactctgatacttggtttgcttcggcttattttaaagagacggatttaaataatataaaaattggtagctgtgtggtgatttactccatgattgataatcaacaccccattaaaggtaaagttgaaggaattagtcggggagtcatgtcgaccgatctgattaatattccaagagacttaccttatgtacctaaatcattaaattgggtacgggttgagcagcgttttcctgtcaaagtcattattactgaaccaccagaagcactcatgcgcatcggtgccactgctactgtaaatattgtacctaacgatgatgactgttaa

SEQ ID NO: 317776 - DNA, 288 bp, Proteus mirabilis
atgaataacactaaattaaaagaatcagcctgtgatgaattaatttatgcgacttctattttaaatatcattatcaacgacaatgtaatgcctagcgataatatgtttaatgcgattgaacctgcagtagttaatatagaaagagctaaagaaagtatatcgagcattaatactgataagtcaccaaagcctatcggtgaaattaaaattagtgataaagacacaatccagttagcaaaattaaatttagaaactgtttatgaaaaaatcagcttcatggaggcataa

SEQ ID NO: 317777 - DNA, 795 bp, Proteus mirabilis
ttggccgatcttgataaaattgagttatcactagagcctcatgagctagcgcgtggcatatactgtcatttttatcctacgacagaattaaccgccgcctctcgtttaatgccccaatttcataaagccattttctattcattaacaatggagaaaaatattactgggcatacactttattatttgaatttctttgataataaaggtgatcctatggtcacaccgcctagtttacattttgcatgtgtttatattggctttgaacaatataaaagaaatgagttaggtctattaaataaacacagcgaaaaaatgcctgatgcagtaaaaacgggaaatatcacattattatcatcttgttatccacctattgtaaataatcaccatttttggaaattgttatctcattacagtgctaatggttcaatgttaatgtcattagatactattaaacatatgatttctgattatattctttaccgagatactgataggcagatcactcgaaaatgtgagcgattattaaatggactcgttgaactaaaaacacatttatatgactatattttaaaaggtaaaccctatcgttgtttatctttatcgctattcattgacgaaacacaatatgaaaatagaggtgaagcttttgtctttactacacatctttaccattttttcccgttctgtttatctgaaaatatgttattggaaatgtcagttacactcaacgatcagaaaaacaccacttggtatttatctccctcaccactaaggggctataaatcaatgatttaa

SEQ ID NO: 317778 - DNA, 498 bp, Proteus mirabilis
  misc_feature (459)..(468): n is a, c, g, or t
atggagattaatgaaaaacatttggtgattggcgacaacggggcacaatttagtttctgccataatttcaccatcatgccttatagcattttggatagaaaaattactcagcatccaaaccactcttgtatctctcttgaaatattatatcgtggtgatgtggaattaactcaaacaaatgcacttaatgtttttttaggggaaaataaaaccacctcagacattttattactcgcatttagtcaatattttgaaaaaattgaggtggtacataacggtgaacgttatgaaggcgatcctcttaattatgcttttgaacccaaaattggcaatgactataaaatcttcccacagaaaaataactcattttctgcgccacaacgtttattagaaggtctttatttaccccatgttcaccattttattgagttagatataccacaaatagtgactcaattnnnnnnnnnnaagaagagtgtaatcagagcttttttttaa

SEQ ID NO: 317779 - DNA, 264 bp, Proteus mirabilis
atgcaaatttcatacagctactcgaacggaactcgggtagtagacggcaaaacagtcatggaatttgacgaaagtagcaaactcagtattgagacaggaagtttcactgagttggctaaattgacggaaatagactcagctgaggcaatggaatatgtactcgattgtgacgatgaatcgcttgaaaggattatcaatgcgataggcaaggaagtctttattaacaggatattgcgagtttctaagctaaggagggttgcgtga

SEQ ID NO: 317780 - DNA, 234 bp, Proteus mirabilis
atgggattaataattcaagagcaatgtgttattgttgatcataattgccccgactggctaataactcagtctgaagggaatccaactattgattatacagatggcttaaaagtttatgctatttttaaaagacaattcctttcaggtaaaagaagacgtaatagaaaacaacgtcaactgggggataattgtcctttaatttcaaaatcatttgcaataaacttatggaattag

SEQ ID NO: 317781 - DNA, 588 bp, Proteus mirabilis
atgtatttaccagatagtttagatacaggaataattgcttttcatgatacagaaagacttaatgcaaaaacatgttttaaaaaatttatagagtctaattttcaaaatcaatcaccacgactagaagctagagttagagctttattacataaagatattccatcaagaataaaagaagcagatgttgtagaaataaaagctgttggatttagatcaagtcaagatgatgctgatgcgatggcattagtcggcaatagacttacaggtgaatttgttataaaaaataatggattatcaatgggttctgtggttgattttattacgagaaataaaccgcaaacagatttaatcgagttattagaagaaaagagtgataaaatcaaaattacagcatctgttaatggccaagataaagtgtatactttgaataatattctatccaaaggtatatccatagctttagatgatagtgatttaaatttagatcaaaatggtttccctaatatgggctcattacataacgccataaaaaatgaaattaatgattatctttcagatatatatggtgatgggagttattcaatatga

SEQ ID NO: 317782 - DNA, 123 bp, Proteus mirabilis
atgttaagaatatttttaacaagcttactatttattagttttttatctaatgcagattatgctccacaaattgataatccaagtgatgtttttttgtatcgtttgggggtaatgcgactatag

SEQ ID NO: 317783 - DNA, 336 bp, Proteus mirabilis; identical to SEQ ID NO: 300331

SEQ ID NO: 317784 - DNA, 399 bp, Proteus mirabilis
atgaaacaacctaactggacactccagttaccagaaaccataagggtggcgatgagccgccctttttcatggggcaaatttgattgttgtatttttgcctctgaatgtattgacgcacaatgcggtttctcgccaataaagccttatctcaatcactataaaaccaaagctgaagccttcaatctgatcaaatccaaatttggcacattagataaagccgtttcacgctatttcaaatccattgagatcgagtgtgttcagcgtggtgacctcgttctgtttaaaggtgaggacggtgacagtttagccgtggtctgggcggggcattattggggcgtaaccccacaaggtgtgaagccagtgcagattaacccaataaaagcgtggagagtggaataa

SEQ ID NO: 317785 - DNA, 336 bp, Proteus mirabilis; identical to SEQ ID NO: 300331

SEQ ID NO: 317786 - DNA, 195 bp, Proteus mirabilis
atggtgcttggcacactgaatttagttaatcaactcacagaaaccgtaagatggacagcaactatggcgctatggtgtcatttaggctatcacaattttattgaacttggtgatagcaagtcattgtattatttagcgaaaaattcatatacgctaaaagataaaaatatattgcatgttaatgattatatttaa

SEQ ID NO: 317787 - DNA, 348 bp, Proteus mirabilis
gtgcatggtggtgagtttgtttttaccaaagaagcgacggctaaattaggtgtcggcaatctctatcgcttaatgcatgctgcgcaaggttatgcttcggggggctttgtgggctctgtcgcaggacgaatacccgttacaccacaaccgacgttagcccgtgcgggtagtgtgcaaatgacagtcgttaatcatattacggtgacaggaaatggtgacgctgtacttgcgcaggcaatgaaagaagccgcacaacaagggacagaagcaggcgcacagaaagctcacgcgatgatgttacaagactttcaaagtaatggcgcagcacgcagaacattaggagtttaa

SEQ ID NO: 317788 - DNA, 348 bp, Proteus mirabilis
gtgcacggtggtgaatttgtttttaccaaagaagcgacggctaaattgggtgtcggcaatctctatcgcttaatgcatgcggcgcaaggttatgcttcggggggctttgtgggggcggtcgcagggcgaataccggttacaccgcaaccgacgttagcccgtgcgggtggtgtacaaatgacggtcgtcaatcatattacggtgacaggaaatggtgacgctgtacttgcgcaggcaatgaaggaagccgcacaacaagggacagaagccggcgcacagaaagctcacgcgatgatgttacaagactttcaaagtaatggtgcagcacgcagaacattaggagtttaa

SEQ ID NO: 317789 - DNA, 297 bp, Proteus mirabilis; identical to SEQ ID NO: 281117

SEQ ID NO: 317790 - DNA, 1797 bp, Proteus mirabilis
  misc_feature (1724)..(1733): n is a, c, g, or t
atgaaatcaaaaaactttaaactttcaccctctgggcgacttgctgcgtctttagcaataatttttgtctctcttaatgcttatggcaatggcatcgtgcccgatgcaggccatcaagggccggatgtctctgctgttaatggtggtacgcaagtgattaatatagtcacgccaaataacgaagggatttctcataaccaataccaagacttcaatgttggcaagcctggggctgtatttaataacgcattagaagcgggacaatctcaacttgcgggtcatttaaacgctaacagcaatttaaatggtcaagctgcctctttaattttgaatgaagttgttagccgcaacccatcattcttattaggtcagcaagaggtctttggtatcgctgctgaatatgtgctttctaacccaaatggtatcacatgtgatggttgtggttttataaataccagccgctcttcattagttgttggtaatccgctctttgaaaatggtcagctaaaaggctatagcaccctcaacaacaccaatttactatcgcttggtaaaaatggcttaaatacaacagggttgttagacttaattgctcctcgtattgatagtagagggaaaatcactgccgctgaaatttcagcctttactggacaaaacaccttctcacaacattttgatattctctcttcacaaaaacccgtttcagcattagatagctatttctttggtagtatgcaatcgggtcgtatccgcattattaatacggctgaaggtagtggagttaaattagcaggtaaatttaccgcagataacgacctaagtgttaaagccgataatattcaaacagatagtcaagtccgttatgacagttacgataaagatggcagtgaaaattaccaaaactatcgtggcgggatcacggttaataatagtggctctagtcaaacactcactaaaaccgaattaaaaggtaaaaacatcacattagtagcgagtagccataatcaaatcaaagcctctgatttaatgggggatgatatcactttacaaggtgctgatttaactatcgatggtaaacagctacagcaaaaagagaccgatattgataatcgctggttctactcgtggaaatacgatgtgactaaagagaaagaacaaatacagcaaattggtagccaaattgatgctaaaaataatgcgacattaaccgcaactaaaggagatgttaccttagacgcggctaaaattaatgcggggaacaaccttgcaattaatgccaataaagatatccatatcaatggattagttgagaaagaaagtcgtagtgaaaatggcaataaacgtaatcatacttctcgcttagaaagtggtagttggagtaatagccaccaaactgagacgttgaaagccagtgaattaacggcaggtaaagatcttggtttagatgctcaaggctcaataacggcgcaaggtgctaaactgcatgcgaatgaaaatgtgctggtcaatgccaaagataacattaatttaaacgtccaaaaaaccaataatgataaaacagtcaccgataatcatgttatgtggggaggtattggtggtggtcagaataaaaataataataatcaacaacaagttagtcatgcaacacaattaaccgctgatggtcaattgctccttgctgcagataacaatgtcaacattaccggtagccaagtaaaaggcannnnnnnnnnaaaggcaaccaaggtgcttttgttaaaaccacacaaggtgatgtcgtcattgataatgcgctga

SEQ ID NO: 317791 - DNA, 147 bp, Proteus mirabilis
atggtctgcctgtctggagggcatcgagcgtatccgcaaccagctttatgtcgtgcgtatttgctccagctacaaccagtgcaagcggaagcccgttcgcgtcagtcatcagactgcgctttacgccctgtttcccccggtctgtag

SEQ ID NO: 317792 - DNA, 342 bp, Proteus mirabilis
atgtttgaccatgagttatacaggaaaatcagccatcagataatttatgatatatcccgtgtatggtattttcgcaaactaatatatgcacaatgtttaaatgaagaaggaatgacaattaatgaaatagctgaagaatttaacgttaaaaaacaaacggccgaaaaatacctcaaaaaatttaaagaaataatggaatcaacagatctagaaacacaatataagctatatacagcaataaaaacagcagataacaaacacagcccagtaataataaatgaaataatggactatgtttacgaacttgaattatataaagagaagtggtatttcaagttttga

SEQ ID NO: 317793 - DNA, 1218 bp, Proteus mirabilis
gtgaaaaagttactttttattttcctgctcgtttctttctcatcatattcagctattgattataaaaaacttcttcttactggagctggatatgtttcttataaatcagagtttgattcttcctctggtgagatgcggcatacaattactcagactgatatcgataaagcctgtaatgatgcgtctcaaaatgcgcttgaaacgtatgaaatgtataaaaaacaatttttgtctagaatgcctgatttgcagtttaaatatgagatggcagaatcctgtaatatcaatggtgtaacaactggccattttaattcaagacctaaagacaaagtaacatgggaaattaccatgttctacggtgaggaaacgaaagaaccggagaaacctacaccggaagaaatctgtaaagcaaaaccgtctttctcggggcaatacaataatgtttatcctggtaaattaatttatgttgatggttgtgagtttgaagcaacgggggtcattgtttgtaattcggcattgacttcttgtgctgctgactggaaaccaactggtaatgttgctgacacttctgtcaatccttccgttcctgatgataatggtggcggtgataacggcggaggcggggataataatggtaatggcggtgacaatggcggaggaggtaataacggtggcgggggtaataatggtggcggaggttcatcattatcaaaagatgagttgattgatgcggtcagaacagcaactaatgatattccccgtaaaatcggaaaagaattaatagaagaaacaggcaaagattttattgatgaaagttttcgtattgaaaaagagaaaaaagcagcaattgccggaatttctgattctctgggtaatttaacccgtggtgcggggcgttttgcagatccgtctcatcatgcaaaatatggtaaaggtgaatctgcactggatgaagctgctgagttagctgattcatatttggaattaaaagataatcaaaattctatgtggggttatttttttcgtcaggttgttttattacctacgggaaatggctgttctgattttaaattttttgaaggtgacgtttatcagatcactattagttgtgacaggctgtcatcaataaaaactatgctgacatgggtaatgacactttccacaatttggtatgtgtttatttcattaacgttattattaagaaaaggcggtgattga

SEQ ID NO: 317794 - DNA, 180 bp, Proteus mirabilis
atgaaacgtaactgtaagattcagaatgagaaacctgatgctgactgtcagggaaatgaagataaaccggctgatattgttcaggctctttctgttaaagggttgtcagaaatagaatttgagcctgccagaatttcaatatttaaattttataatgatgaccgttccgcattgtcgtga

SEQ ID NO: 317795 - DNA, 1089 bp, Proteus mirabilis
  misc_feature (1071)..(1080): n is a, c, g, or t
ttgtatctttatattgaaacactgaagcaacggctggatgcgattaatcaactcaggctggaacgtgcatttgcatcgatgagtgatgtgtttaaacaggtgtatggtttaattcctgttttactgcattaccaccaccctcagttgccaggctatattcaaggaaatgtccctcatggtacatgtttctttgaacctgatgacgtgcaacgtcaatgggtcaataagctgactaatgcatcatgtgatgagccaatgaatggatacaccagcggagagttacctattacgggtatctattcgatgggaagtacttcctcgattgggcaaagtcactgctccgatattgatatttgggtctgtcaccaatcttggctggaccaagatgagcgtgcgcgtttacaacgtaaatgtttactgatagaacaatgggcgggagaattaggtattgatgttacttttttcttaattgatgagaaccgcttccgtcatcatgcaagtggtagcttaggtggggaagattgcggctcaactcagcatatcctgttacttgatgagttctaccgtaccgctgttcgccttgcaggtaaacgtttgttatggacgatggtaccagtagaagaagagtaccattacgatgaatatgttaattcactctatgcccaaggtgtattaacgcccaatgaatggcttgatttaggtggattgggtgagctttctgccgaagagtattttggtgcaagcctgtggcaactctataagagtgttgattcaccttataaagccgtattaaaaagtattttattggaagcctattccgcggattaccctaatggcaaattgttggcattagaaatgaaacagcatcttcatcgtggtgaaatcgtaaattacggtttagatgcatattgtatgatgcttgagcgcgtaacccgctatttagtttcgattaatgatttaacccgccttgatttaatccgtcgctgtttctacctgaaagtttgtgaaaaattatctaatgaaaaaaatgagaatgaacctgcaggttggcgacgccaagtattatctcannnnnnnnnnctcagttag

SEQ ID NO: 317796 - DNA, 780 bp, Proteus mirabilis
  misc_feature (728)..(737): n is a, c, g, or t
atgaaatttaaaataagtgctttaacagcctgtattttaatgacttcttattcactacatgcacaagaagataaagtagaacgattagttgtatcagcctcagggtttgcacagcaacaaacagatgcacccgctagcattacggtaatcaacaaagaacaattagagaaaaaaccgatacacgatcttgctgatgccgtaaaaggggttgaaggcgtcagtgtgaatggtaatgcaaataaacaagaaattactattcgtggcttacccggagaatacacactgattttggttgatggcagacgtcaaaatagtcgtgaatcacgccctaatgggagtggtggatatgaaggtggatttattcctcctgcggatgccattgaacggatcgaggtaatacgtgggccaatgtcatcactctatggctcagatgcgatgggcggtgtgattaatattattactaagcctgttactaaagagtggcatggtgcagtttccatggggggaacattgcaacataaccgtgacgcgggagattctatcaatggtgatttttatctttcaggcccattaattgaagataaattaggtttacaactttatggtagtagctacttacgtgcagaagataaaattatgtatgggcaagggcgtaacgataataaaaatattacggccaaattagcttttactcctgcagataaccaaaccattttattagaagctgnnnnnnnnnncttatatctagtgatttgctctctggtaatgatctctatatga

SEQ ID NO: 317797 - DNA, 366 bp, Proteus mirabilis
gtggcgatagggcgctatccaacatcgcgttttagcttattggaattacgtcctgaaacggggcgtaagcatcaattgcgccgtcatatgtctcatattcgtcaccctattattggggatacagcccatggcgatttacgacaaaatcgtggggtcgtaaatcattttcaatcacatcgtttgatgttacacgcaagtcagctaaacttaattcatccgatcactcaacaaccacttaacttaacagcgaagtgggatctgccatggcaacatctgattaatcagtttggctggcgtggtctaaagcccgaattagagcaattcggtgaggatttagctcaccattttgtactttctgatatttga

SEQ ID NO: 317798 - DNA, 1005 bp, Proteus mirabilis
  misc_feature (32)..(41): n is a, c, g, or t
atgtaccttcgcaaccatcactggttgatatnnnnnnnnnntgatatcaaaactgataaaaatgaaacaatacctgccatttatatcgtcacgaaaacagggaatgtgtttgttcttgatagaagagacggtacacctattgttcccgtaacagaaaaacccgttcctaccagtgtcaaatatggtccacaaacacaaggtgagcattactcacccactcagcctttttcagcacttaatttagcacctaaaaataagttgcaaggttcagatatgtggggcggcacaatggcagaccagctgttatgtcgtatcgccttccatcagttaaattatgagggaatttatactccaccatcagaaaacggtacgcttgtttttcctggtaacctcggtatttttgaatggggcggtatttctgttaatcaagataaacaagtcgcggtaatgaactttattaccttgccttttatctcaaaactttatttaaaagatcctcaagatagtcaagcaattgacgcaggccacggagagcaaggtttacaacccatgacgggaacaccttatagtgttgatattcatccattcttatcaccactaggattaccttgtaaacaacccccttggggacttgttgctggtgttgatttaacaaaaaatgagcttgtttggcaacaacgatttggcaccattagggatagtttgcctaatttagtggaattaccaccattaaaaattggtgttcctgggctaggaggcgctatctcaaccgcaggtaatgtgatgtttgttgctgcttctcaggataattatattcgagcatttaatgtgacgaatggcaaaatgttatgggaagcacgattacccgcaggtggacaagcaacgccaatgacctactctattggaggcaagcaatatgtggtcattatggccggcggacatggttcatttggtactaaaatgggcgatagcttagtggcctatgggttacctgataatttatag

SEQ ID NO: 317799 - DNA, 945 bp, Proteus mirabilis
gtggatgttgatgcgatttgtgacggtcaacaagtggtgataggcggtattatggagcatatcgaacaagcgggtgttcactctggagactcagcttgctctctacctgcttatactttaagccaagatattcaagatataatgcgcaagcaagtacgtgaactcgcttttgaattaggcgttaaagggttgatgaacgtacagtttgcggtgaaaggtaatgatgtttatcttatcgaagtgaatcctcgcgccgcacgtacagtgccttttgtctctaaagcaaccggtgtgccattagcaaaagttgctgctcgagtgatgataggacaaagtcttgagcagcaaggtgttaccaaagaggtgatccctccttactactcggttaaagaggtggtactcccctttaataaattctcaggtgtcgatcctattttagggcctgaaatgcgatctaccggtgaagtgatgggggttggtgctacttttgcacaagctcttgctaaagcgatgttaggtagcaattccaccatgaagaaaaaaggaagagcgctactttcggttcgtgaaggtgataaaaaacgtgtcgttgatttagcaactaagctattgaaaaatggttttgagttagatgcaacacatggtactgccattgtcttgggggaagccggtatcaatcctcgcctagtgaataaagtgcatgaagggcgacctcatattcaagatagaattaaaaatggtgagtatgactatattgtcaatacgactgccggtcgccaagctattgaggattcaaaactgatccgccgtagtgcattacaatataaagttcactatgacaccacattaaatggcggatttgcgacaacactgtcattgagtgctgatcctactattgatgttatttcagtccaagagatgcatgcaaagataaaaaaatcttaa

SEQ ID NO: 317800 - DNA, 828 bp, Proteus mirabilis; identical to SEQ ID NO: 296283

SEQ ID NO: 317801 - DNA, 636 bp, Proteus mirabilis
  misc_feature (578)..(587): n is a, c, g, or t
atgaaccgtaaaaacctgtttactcgcacagctctcgctgccattgtaggaacactttcctcttatgcaagcgctgccggttttcagttaaatgaatattcaacttcagcactaggtcgtgctttttcaggagaaggcgttattgcagatgatgcgagtgtaggtagtcgaaaccctgccgcattgaccatgtttgatcgtcctgagttttccgtcggtgctatccatattaatcccagtgttgatattaaaggtaaatctccactctctggcgccagcactaatgccggcgatatcgccccaagtgctttagttcccaatattcactttgttgcgcctatcaacgataaatgggcaattggtgcatcaggtaccactaactttggtttagctaccgactttaaaaaagattacccagcaggtttaattggtggcaaaactgatttaaaaaccatgaacttaaatttaagtgcaggttatcgggttaataaacaatttagtgtcggtttaggcttaaatgcgctctatgctgatgctgaaattacccgccatgtaggtgaagccggtaagctattggnnnnnnnnnnttgggtggtgccttatctcaacatccagatactaactatcagggattag

SEQ ID NO: 317802 - DNA, 216 bp, Proteus mirabilis
atgtctttaattaataccccaatcaaaccattcaaaaacatggcatttaaagacggtcaattcgtagaagtgactgaaaaggacgtcgaaggcaaatggagcattttcttcttctatccagctgactttacctttgtttgtccaacagaattaggtgacttagctgatcatggcatagcagctcagaaactatcggtaaaatcaaatatggcatga

SEQ ID NO: 317803 - DNA, 1491 bp, Proteus mirabilis; identical to SEQ ID NO: 307542

SEQ ID NO: 317804 - DNA, 204 bp, Proteus mirabilis
atggatcatggctatcttattaaagagcaccaattaattaacgacgagtcaatttttctaaatcggcttcaatttcagcaattttattggcaacaacgtgctcaaggtgacgtaaatcatcgaggattttatgtttcaaatccacttccacttgatcttgctggcaaatttgatctaattcttcaatcacataacgtaagttag

SEQ ID NO: 317805 - DNA, 447 bp, Proteus mirabilis
ttgcctcaattaagtgatgcgatggcagcacaaaaggttactttgcatgccagtcaacgcgctataactgcattgaaaaagggacgtgcgacggtcgtcgatgtgacggaagcagattattgtgatgaatggttatcactggatctgaatgttgaagtcgttaatgatttaacagcggcaattgctcatattcgccaatatggtaccgcgcactcagatgctattttaacgcaatctatcagtcatgctgatcgctttgtacgccaagttgattctgctgcggtatatgtgaatgctagtacacgttttacagatggtggacagtttggcttaggtgctgaagtagcggtgagtacacaaaagctacatgcacgaggccctatgggattagatgctctaaccacctataaatggattggttacggcgacaatacattacgtcgctaa

SEQ ID NO: 317806 - DNA, 318 bp, Proteus mirabilis
  misc_feature (298)..(307): n is a, c, g, or t
atggctaatgaaaaagtcaccttatatggtttacctattgtggcctcgcgattagtaaattatggcaaaatcgatccactattatgtcgagagctatttattcgccatgcgttggtagagggcgattggcaaactcggcatgcttttttccgtgaaaatttaaaattacgtactgaggttgaagagttagagcataaatcacgtcgtcgcgatattttggtagatgatgaaacgctgtttacattctacgatcaacgaataccacaagatgttatctctacccgccattttgataaannnnnnnnnnaaacgtgttag

SEQ ID NO: 317807 - DNA, 213 bp, Proteus mirabilis
atggtgatcacatcggtgctttctattcaagatcctcgtgaaagaccgatggataagcaacaagcatcagatgaaaaacatcgtcgtttccaagataaagattcagattttctttcattactcaatttatgggactatttaaaaactcagcagaaagagttgagtcactctcagatgtctatacgcaactacgtcaagttgttaaagagctag

SEQ ID NO: 317808 - DNA, 201 bp, Proteus mirabilis
atgaaattaacagagtttcaagaagggattatttatgcagtggttttgctacaaaaattacatgatcaaccaacagcaggatcagatattttaaaagagtcaggtttagataatatcgactgttctaattttgacgactatgacaaagaagcattgagagttattaatgataactacggcatgagcctaaagggattgtaa

SEQ ID NO: 317809 - DNA, 237 bp, Proteus mirabilis
atggacattgttattcaggctgatagagatcagttcagagaagcaggacaatggcttgaccaacctctacataagagtgtgcttttctccaagtctagtgaaatatgggaaagtatcagggggatttttcacggcgaattttctgaattggtttatgacagtgatcttccctctgatgatgaagttttcagcttactttcctcagtggccagtcttttgcaaaaatggtctgattaa

SEQ ID NO: 317810 - DNA, 1305 bp, Proteus mirabilis
gtgacgctaccttcaatatctttaccaacaagaattgaccaagcccgactgaaatggacgtcgttacagcaacaacatctctattttgcccctgtacgccaccatagcccagcttgtgcttatgcagttttatcattaattgattctgtaaaacctgattatatcttaattgaaggtccggatacctttaattcgcttattcctagcctaacggataaagatactctccctcctattgctattatggggcaagccgaatattgtcatcatgatagtggcctagaagagcgtgaaaaatcgctacactctgcctatttcccattttgtgaatattcccctgagtggcaagctttgcgaggtggtttacgcatcaatgcaacaacacgttttatcgatttaccttgggctgctcaagtcaataacgaagagtatagcgatctacaaagccgtagcttacaaaaagaacgttatttagcccatagccaatttattgcacaattagctaaacaatgtcattgccgtgatcatgatgatgtttgggagcatctttttgagttacgcagtattgaggcattagcagattggcaaactctgtttaatgacatttttatttggtgtgcacttgcacgccttgactatgaacctgaagtacttgcatctgaaggctcttcacaacgtgaagcacatatgctcactcatataaaaaccatcaaacagcacgagcctaatgccaaaatattaatcgtcacagggggagcccacacccttgcgctaatcgaaggcttagcttcttcacaaccccactctttcgctatttctagctcagaacaaaagcactttactaaaatgcaaaaaatgggcgaaaaagagcaagcttggcttattcgctatagctttgacagattagatgcacttaatggctatgcatctggtatgccatctccggctttttaccaacaagcttggcaaagcttaatgcaacaacatcatgataaattagaaaacaatgaggcggcaaaacagccaacgcaagtttatcgcaataaaatgggcatcgcctttttaagctcagtggttcagactatcagagaaaaacaatttgataatccccccagttatttaaccgtaaaactagcagccgagcagagtttacgcctcgctttactaagagagcacactggtatggggcgttatgatttgcttgatgggttacaaagcgcctttattaaaggcagtttagatgacagtcaaaacgaattatgggacgaaatcaaaacctgtttttcaggttatctattaggataa

SEQ ID NO: 317811 - DNA, 201 bp, Proteus mirabilis
atgagcttagatgcacgaaatatgacacaaggtggtcaggttatcaaatacatgctcagtatgtttttgcagataacaaaccttattgtgtattggacaaccattcttggtgttataacatttttttcatatttgctttcaataatgaaatggatagcaaagaaaatatatataaaaatgaatatgttgtttcagtgctag

SEQ ID NO: 317812 - DNA, 354 bp, Proteus mirabilis; identical to SEQ ID NO: 296310

SEQ ID NO: 317813 - DNA, 243 bp, Proteus mirabilis
  misc_feature (222)..(231): n is a, c, g, or t
atggatattgttgattcacatcgtcgtaagtggttaggccttggtatggctgctgttggtttaggtttacttccctcacatgcatttgcatcattagcaactccccgaccgaaaattcttcgctttaataatttaaatactggtgaaactattaaagccgagttttttgatggtaaacgttataataaacaagagcttgctagactaaatcatctttttagnnnnnnnnnnagccttatttga

SEQ ID NO: 317814 - DNA, 444 bp, Proteus mirabilis
atgcgttttttaaaattaccttttatttattggctgctactcaattgcatcccatttattggctttgaactacactcaggcaatataaaacccggtgtttttttctatttaggtgccctaacgatcatcacttcagggatttggctatttttctgcctttacttttttatcaaacataatacatcccctaaccctcaccagacaccgcgccagttagtcaccacaggtccatataaaataagtagaaaccccatgtatcttggctttctcgatattagtattgggctgttttttatttttggtaactggggatttttaggggctgcgcttgccttctactttattaccgatcgctatactattgtgcaagaagagaaaatattaagtgagcggtttccacaagcgtggcgacaatattgccgccacgttcgacgctggatataa

SEQ ID NO: 317815 - DNA, 750 bp, Proteus mirabilis
atgttttataaaaaattgccatcattaaatcttctagttatctctatttcatttgcttttatacataatagtgcagtagccaataacgttattgtagatgcaggaaaatctgcaaacacaacagtgagcaagaatggagatggttcagaaactatttctatcaacaaagcaaacgatatgaatttatcagttaactattttgaacaatttaatgttggaaaagaaggcgttaatattgataatagcgaggcaaaagcaaaagttattcttaacgaagtgacttcaaaaaaaacgagttcattagagggtaaaatctctgttttaggacaaaatgcagaattgattatcgccaatccaaatggaattgattgctacggatgtcaattttcaggttcagataaggtgatgttaatttcagggaagttagatagtattacaggcaaaaaaatttacttatcagatggttatgttaatctaaagaatgttaataatttcaatgaaaaacaaacaatcaatgttttttctaatcgtattaatatattgggtaaaaataaaatcccagtttttaatgtgatcaatggctatgaaacggttagttttgttgattatgattggaaaggtgaccaaggaaaagagctatctaaagataaccaagaaggtctctctattttagaaaatagttcattaaaaacagatcttttctctctacaaggtggcatttttaatcttgatggggatttaatcatttag

SEQ ID NO: 317816 - DNA, 324 bp, Proteus mirabilis
  misc_feature (308)..(317): n is a, c, g, or t
atgttcatgttagcatctatgaagttatattttcttgaaatagatgcaaaaaaatcagctgaaatagcattagaattagaggcattagaagaaaaaataatggagttagagcctcataatatacataaaaatagactaaagaaaataaaagaactagctactgaagctaggagagttgctgatcaacagcaagcagaatataacaagatccagagtgctgttcttaaaatcgatgaagctaaacaagcagaaaaaagaaagttggaggctgagggtaaagaaataggatcagcacttcaatatatagnnnnnnnnnntatatag

SEQ ID NO: 317817 - DNA, 390 bp, Proteus mirabilis
ttgcaaccttcacaagcagtgatggtgatagtacccgatactcagcataatgttgctgaggtgaatattctcaataaagatattggttttatctatccaggtcaaaaagcggtgattaaaattgatgcttttccttatacccgttatggcaccattgaaggcaccattgtcaatatagcaaaagattccatacaacatgaacaattaggcttagtttatcccgtcctgattgaacttgataagcaagtaatgggtgaagatgaggcacaatataaactggccacaggtatgtctttagttgccgatataaaaattgaaaaacgtcgagtgattgattatttactcagtccaatagaagtttatcaacatgaagcattaagagaaaaataa

SEQ ID NO: 317818 - DNA, 225 bp, Proteus mirabilis
atggcaattgactacattagctcagctcgtgctcactttggtatgaatcgagaggaagccgaacagttaaccatgactgaatttcagatgatgctcaaagctaaataccctgatgagaaaggcttcactaaagaagaatatgacaacatcatgaagcaagatgataggcgtaataatgagttaatcagtggtaagcgcagattggtgagcagaaagagaaagtag

SEQ ID NO: 317819 - DNA, 321 bp, Proteus mirabilis
atgaacgtttctaactcataccctaccgataaatacccccaattaacatcaccgtcattagcaaaaaacagagaggaagctctggctcaagctattgcaatgattgagggatgtttgccaaatacgagtgcgccagacagggaaaaacgattagcaatggaactgctacacatgaacttggacgcatcgaaaaatcaccctcctctacctgctcatattcaggcattacgtgatgcggaaaggaattctgcaccgagtaataagtttgaagtcgattactacggaagcgatcgccgtcagggtcaatatttaggggattaa

SEQ ID NO: 317820 - DNA, 213 bp, Proteus mirabilis
atgcagggaactaattgggttaaggtgagtgagcgcagaccaagaggaggcgaacaggtgatagttgttgatatggatggcttcatgcatttagcaacgcaccagtacaacgcgttccaaatcattatcaagcaagatgacgagctaatcgaaacagtagctagattcgtaacgcactggatgccactcccaccaatgccagagggtgaatga

SEQ ID NO: 317821 - DNA, 615 bp, Proteus mirabilis
atgagtacttctacatatttaaaaaaaatgagagtaagtttatacacttcactagatacagagatcattcgacatttgacatatattccacatatatatcaagagcattcaaaaaaagtagcagaaagtttatgtgaacaagtagaaaataactcttctttaagctctaatgagaaatccatggaaatagatcatatagaaaatgaagttttcaatgctgggaaagccattgagttatataatgaattgtcatttatcgctctatacaaaacaatggaaataaatattaaaaatgcagcagtttattccggacttttcactcaagaacaaataaaaaatttttttaaaatagatgaattaataaaagagtttaaaaaaataaaaattgaaataaaaaagattgaaaaatactcatcctttaatgaactacgagtattaaataattgtataaaacattcaggtctagtaactaaaggactagaaaatattgacaatgcttatgggaaaagcggggatacgataaaaatcccttctgataagtttgaacaattattaaatggtaatatggaatttttaagttccttaggctgtgagttaaaatccaaaattaattaa

SEQ ID NO: 317822 - DNA, 714 bp, Proteus mirabilis
  misc_feature (635)..(644): n is a, c, g, or t
atggcaataagtagaagaaaatttattcttggtggcacagtggttgctgttgctgcaggcgctgggattttaacacctatgttaacgcgagaagggcgttttgttcctggtacgccgagacatggttttgttgagggaactggcggtccattaccgaaacaagatgatgttgttgtaattggtgcgggtattttaggtatcatgaccgcgattaaccttgctgagcgtggcttatctgtcacaatcgttgaaaaaggaaatattgccggcgaacaatcatctcgattctatggtcaagctattagctataaaatgccagatgaaaccttcttattacatcacctcgggaagcaccgctggcgtgaaatgaacgctaaagttggtattgataccacttatcgtacacaaggtcgtgtagaagttcctttagatgaagaagatttagaaaacgtaagaaaatggattgatgctaaaagcaaagatgttggctcagacattccatttagaacaaaaatgattgaaggcgctgagttaaaacagcgtttacgtggcgctaccactgattggaaaattgctggtttcgaagaagactcaggaagcttcgatcctgaagttgcgacttttgtgatggcagnnnnnnnnnnaaatgggtatcaaaattttcacaaactgtgcagcccgtggtttagaaacgcaagctggtgttatttctga

SEQ ID NO: 317823 - DNA, 336 bp, Proteus mirabilis
  misc_feature (210)..(219): n is a, c, g, or t
gtgttagaaagtgttccttatcgtggtattaaattagcctcagatgaaagcatgttgccacaaagtcagcgtggctttgctcctgttgtaagaggaattgcacaaagcaacgcaatggtgactattcgccaaaataatagtgttatttatcaaacctctgttcctcccggtgaatttgaaatatcagatctctatcccaccttttatagnnnnnnnnnnatagcgcagagcgaaaaccgacctttttacaagcttctgccatttacggcttaccttataatttttctctttatggaggtacgctactttcagcagattatcaagcttatgcgatag

SEQ ID NO: 317824 - DNA, 1422 bp, Proteus mirabilis
atgtcatttagtcgtcgccagtttttacaggcttcaggcttagcggtatgtctgggctcattatcttcatctgttcgtgcaggatcagttagtgatagaaaactacctattcccccattacttgaatcacgtaatggtcagcctctttttgtaacgttacaaaaagtgcattgggcctttgatggcacacaaaaaacagaagtctggggcattaatggctcaatgccgggtccgacaatcaaagtaaaaagcggtgatgatgtcaaactgatttatagcaatcgccttaatgaacccgtttctatgaccgtaagtggcttattagttccgggaacacaaataggtggagctgcaaggatgatgtctccgggagcctattggtcaccggtgttgcctattcgtcaaaaagcggccacctgctggtatcatgcgaatacgccttttaaaatggcgcctcatgtctataacggattggtaggcatgtggattgttgaagacgaagagagcaaatcgttaccattgcctaaacattatggggtaaatgactttcctattattcttcaagataaacgccttgataactttggaacgccacagtacgacaaagaagccgcgacagagggattttatggtgacacattattagtgaatggctgtgaagatccctatattgaagtatcaagaggttggattcgtttacgcttagttaatgcctcgaatgcccgacgctatgagttatcggcgaatgatggtcgctcactctatctgatagcctctgatcaaggtttgttaacatcaccggtagaattgaaatctattcctatggcaccgggtgagcgacgtgaaattcttattgatctatcagaaggcgaagaagtgactatcactgctgggcaaagtgccggatttatggatagattacgtggtatttttgaaccttctaacttattgcgcaataccaatgtgctaaccatcaagcctactggactgatgtcactggttaccgataaagttccacaacagttggtggtggatgacacacaaattaccacctcaattcaaccgagaacgatccaattacaaaacagtcctcctggtattaataatgcgcgttgggagttatcaaggatcgatcttgtcggtaaacaaaatggctgggaacgttggttagtgacagtggaaacaccacaaccttttcatattgaaggtgcacgttttaaagtgattaatcatgatggacaaaaaccagcgcctgctgattttggttggaaagatacagtgtggatcgaaaaacagagtgaattattagttgagctaaaacagccttcttattcccatttcccttttgtttattatagccaaatactcgaaaatgcggataaagggattgcggggcaaatggaaatcacgccatcagaataa

SEQ ID NO: 317825 - DNA, 219 bp, Proteus mirabilis
atgccacaaaaatcccgttatagtgatgaacaagttgagcaattacttgcagaacttgtcagcgttcttgaaaaacatcatactcctacagatctttctttgatggtattgctgattggccaagtacctttgcaggtcgtctttacgctattgtcagttggatgggccattttagttttatcgtgtttgctatttatatccttattcttttcccgttga

SEQ ID NO: 317826 - DNA, 1806 bp, Proteus mirabilis
  misc_feature (1788)..(1797): n is a, c, g, or t
atgaacaaagaaatagctttaagtcaccatcccattaatcagaaaaaaaataccacaaactctctatttcaactctcccttattacttcggcacttcttttttctggctatgctgttgcatattcagaagttggacaattaggtaataaacaaagttgggaaagccctgaatatcaaaaagactgggggcttgcagccatgaatgcctctagtgcttatgctctgggttttcatggtcaaggtgctaaagtcggggtgatggactctggtgcactgctctcacatcaagagttgagtggatctcgttttcatgcagtaaaagccaaaggtgaatatggctctacgggaatgcgctatccacaagaaatgggcggacattatgaaaaaggccaagtctttgatgttgatggtaattggatcaaaggggtgaatgatacccatggcacacatgtcactggtactgtgggggctaaccgtgatggtaatggtatgcatggtgtggcgtggggggctgatatttatttagggaatactggggcaacagacagcaataactatggcccttatcaagactatacctatttctatactggctggaaagcgatggtcgacgcgggtgcgcaagtgattaataatagctgggggactaacccgcgcattattaatacagataaaacagaggggcctgatggtggtaataccacgatacatatgccagttaacaccacggcacagacagaatacgaatatttctactttaaaaaagtctatggtgataaaccttcctttgttgatgctgcttatgatgcagttaaaggaacgaatgttgttcaggtctttacaacgggtaatcgcgactttgctcaaccttattatcgtcctctttatccttattttaatcccgaagccgaacagcattggattgcggtggcgggattgaagcaaaatgcggataacaccggttatgtattagaaaaagtcttcaatgaagcgggtaatgcaaaatggtggacagtggttgcaccgggtcgaaatatctattctacagtggttgatgaagaggggaatccaggttgggatacctttagtggtacttcaatggccgctcctcatgtgacgggggcgatgggagtattaatgtctcgttatccttccatgaacgccattcaagttcgtgatgtcatgttcactaccgctaaccatcgtgatcctgatggctctttatatgagagctggacggccgcagaaggtactcctgatgtacgttatgggtggggaacaccagatttagataaagggatgtatggtccgggtcaattgctaggtaaatttgaatataacctaaatgcgacaccgcttgatgtgtggactaatgatatttcccaaacagctttagatctacgtaagcaagaagatctcgcatggttgaaagaatataccgaaaaaggtattgcggcaggaggtgattatcatctcggtactgattttgtgattaatgatggcaatcctgatcctacatcgcatattgttagccaagaagatgctgaaaaatggcgtcatgaatattaccaaaaacgcgctgatgctattcaagctaaaattgatgctggcttatatgatggtgctttggtgaagcgaggcgaaggtacgttagtcatgacgggaaataatagttaccgtggtggtacaactgtcgaacaaggtactttatatggctttagcggatcttttgggacgcaagccgtcaatgttaatggtgggaaattaggtattattgagcgttataannnnnnnnnngcgttataa

SEQ ID NO: 317827 - DNA, 1500 bp, Proteus mirabilis
  misc_feature (14)..(23): n is a, c, g, or t
ttgagcgttataannnnnnnnnngcgttataacgatacttttactcaaaaaggccaattaacctcaaaccaaaaccataaagtaaacattaatattaatgataaaggtcgttatttagtgaccgcaggacacaatgttaatattggtaacttagtgcttaatcaaggagccgatattgatgtgggggcggataatgttgggcaactaaaagatatttatcttaataatagtgttgttgtcggtgaggtgaatacagatagtttagttgataatcgcactaaaacgaaaatgttagccagtaaccgtgtggttgcagagtcagccacaaccacgactgtcaccaataatgattatgctttatttgataaacatatcacgataacagataaaaccatcagtggtagtttaactaagaaagaaaatacgactttagccacctttgctgataatgaaaatggtcgtgctattgctaatgcattagataatacaggagatggtgagctatttaatgctgtattaccgatgaatgaaaatgatctgaaaaccacttatcaatcattgggtagtgatatgtatttaaatgccaataatgccagtattgttaatgtattgggtttaactcgtacagtgaaagaacaggctattggtatcggtgatggtcgtcatgcacaactaggtaatagtaatgcgcgtatttggatcagcggcatgggtcagtggggtaagacggattatggccacagtgatatggatgttgatttctatgttgggttattaggtgctgaaattgatgttactgaaaatactaaagcgggtctatttttcgctgcaggctccaccaaatataaaggtaatcaatatggaaagatagatagtaatgatattcatattggtgcttatgggatctctaatctttatgatgttgcctcattaaattatggatttacacatacaaaccaagatagagatgccaaaagaacactctggataggacaaactgcaggttataactcaaccagttacgatgcgaaaattagtcaattctttttagaaggtgcttatactcaattgaatactagccagtactcaattgaaccttatgctggatttagttggttaagagtatccactgataatatcaatgaaaatgtgggtaatatgaagtttaccactaaaacagatgcacaagatattcaagttgctacggttggtttacgtggtggatatccatttatggcaggcaatattaatatggcattaaaaggtgatatatcagcaagccatctgtttggtgataatcgccctgaatcacgtctatggttatccaattcaggtgaggcatcactacgaggtggtaaactagataatttatttggtgttggtctaggtgttgatgcgcagttaagtaaatcaaccactttcggtatctcttatcaaggtcaatataatagtgatatcaattcgagtggtattaatgcaatattgaaaattaatttctaa

SEQ ID NO: 317828 - DNA, 255 bp, Proteus mirabilis
atgaataataaacctgagattgagccttatttctcacattacaactctcccgtcatgcgattggcgaaattaggctacctttctgcactggcctataatgctgataatgtttttaacaaacattcacccatacaaaaacagcaagagcaaaaaataactcatgatttgtgtaaactaatcggttttgaaccagataaagcatttgccgatggcgattgcacgtcatccaaaatcaagagatctggttgcagataa

SEQ ID NO: 317829 - DNA, 849 bp, Proteus mirabilis
  misc_feature (802)..(811): n is a, c, g, or t
atggatggattagtttttacctgtcaatttaaaggaattcctgaagaaacattcactgtgacagaatttcaactgactgagcatttatctgagttatttacactttctttaactgcggtaagttcattaccgtctatctgttttgatgatatgttggggtttgcttgttccttaacggttacgcgcaatggtaaacctattcgtactgtacgtgggctattagctagtgcggagcaacaaaatacagatggtaatcaaacgtggtatcactttattattcgacctgaaatttgggtcatgtctttagggcaaaacagtcgaatttttcgacaaataacggtgcctgacttacttcagcaattattatttgagtctcatattaaagcggattgcaaactctatgctgaggatgcttatcctaagcgtgattatataacacaaaagcgtgaatcagattatcagtttttttgccgtttagctgcagaagagggaataagcttttggtttgaagatgcaggaattgagccacggatgttttacagcgattctcacttaggtatgacggcagatattgacttaatctacaacccacaatatgaaacagatactagagatcatactgcatatcattggcgttatagagagtcactgctttcagataaaattctttacaaagattataattctaaacgtccttcttatccccttgaaagtaaaatagaaggggaaatacataatcagcatccattttatgaaagttatgggcgttttcagacgcaagatgatgcggatcgttataccnnnnnnnnnnagagatacaacaacaacgttgcgtcggcaatgcattaa

SEQ ID NO: 317830 - DNA, 990 bp, Proteus mirabilis
atgacaattaagaaactcgaaaatggtcaatatgaagtggacattagaccggctggccgtcacggaaaacggatcagacgacgctttgaaaagaagcaagaagctattttatttgaacgttattcactggctaatcagcaaacaaaagattgggtagaaacatcaaccgatattcgccctcttagcgacttaattgatatttggtgggaagtgttcggcaaaaatacaccttatggaagaatgacgcatctaagggtaagacgtattgctgaatcactgaataatccccctgtttgccaattaaccgataaacaattggtactctatcgtgaactcaggctcgcttctggcgtaaaagcttcaacgataaatagggatatgtcagcactcggcggtatgtttactgcacttaaaaaaacggatttctttttaagtaaacatcccgttcaaggaatatcacggttaaaacagcaaacgactgaaatgtcatatctaacagataatgaaattcagcaattattagcattattggaaggtgacaacctaaaagttgccgttctctgtttaagcactggcgcccgctggggtgaagcactcaagctaaaacgtgaacatgtgatccaaaacaaggtgagatttacgtataccaaaaccaataagccaagaattgtgccaatttctcaagctgttgcagacatgatttgtacaaagaaatcaggattgctttttactgaaacgtcttatcacatgtttcgtcgagcaatcaaaaaagtgaaaccgagtatggcattaggtcaggcaacccacgcattacgccatacattcgccacgcattttatgatgaacggcggaagtattattacgttacaacgcatcttaggacacactaatttgcaacaaacgttgacctatgcacactttgcaccagacttcttacaagatgccattcaatataaccccttgaaaggtagtacagaattactggtttag

SEQ ID NO: 317831 - DNA, 1875 bp, Proteus mirabilis
  misc_feature (1838)..(1847): n is a, c, g, or t
atggacgggaaaagacattttgagccttatttaccttttattgctcatatttatcgacctggtaatgaagtaccaaatacatctaatcgtaaccgctcttttttagtaaaaggaactctatttccacaacaaacgcatcgtttctccattaattatcgatacaccgatttattatttggcgatattatgccatcacgattaagttgggttcgttatgaagaaaatttagttaatcaatggcctttggcaaatattacacaacaagcaggcacattaacctatcaatataaaccagaagataaaaaaacagatttattactgcgtttatggggaaatttaacgttaggacatactaatactaggggaggaaaaccaagagagcctaaaatggttgattttagagctagcagaaatacaaggtgggatccctctattgatacaggctttttagatacagcttctctatatcaagataataatcgttatggtgttgatttttcatcgttatttaaattatcgcctcagttttctatttctttttccggtcaatatcaattggaaaaattagacagtcatgagcttgaacttcccatgggttttgatttcgtgaccgaggggcgagcagggcaacgtcatgaagtcaatttagcgttagccacagattggaaaccattaccctggtttgcgatgaatattggcggtaaatatcattactatcatctgacggatacctttttaaataataaacggaagaatagggttaaaaattacgagaaaacagcccctatccgcggttatctgatctcttatcgacgagtattaaccccagaagagtatttactctatcgcgcggttaacaaaattgatgtcgatactttacctgacgagttaaaaaattaccgaaattctgctgagctgagtaaaaaaattagagactttcaacaagcggttttagtttaccctgaaggtggcgctttgctagaggaaatcaaggagcaggttgctaggccatatcttcagagaatacagcatgatatggagcatgaagattttattcgtaataaccatggaaagatgcaaataaaaaacgctaaagccatcccgatgaaaagagagtttagcctttggttatttgatgaaaatggcgtactacttaagagtaagaatattttacttaatggttttcttgatatggaggaaaaagtccctcatccagtgacgggtgagttagtttatcgctttgaaaaagatgttattaatcctcaggcattttctctatcagaagatattcaagatccctacgcactggagcctagctatcagcatggcgcattttcccctttaatctctgccaccctttatgccaacgatatggtgcgtttttatggccgttatactgagcaattgcgtttgcctaacttatttgaagataccagtggtttttcaggctctaaagctcgctattatggttttaagttaaagccagagcgtgccaaaagcagtgagtttggtgtggttgttgattttacgcattggttgaatatagagcgccacgctgatattaaaattaattactttaaaacgaacattgaaaatgtatttgatagagatgctaattggcaaattagacagttagaaaaacaaatattagaaggcgtagagttacaagcccgatttgataatggatttattttctttgataccgcattagtgtatagccataaaaataaagtctgtgatgaaaatgctttttatgagcttgatgcatcaggattatcgggtattaaaaactgtatgacagggggataccctggcggatttttgcgcacctcaatgcnnnnnnnnnntatagccccaatttatcttttgaaataa

SEQ ID NO: 317832 - DNA, 510 bp, Proteus mirabilis
atgaacgaacatacaatcagtaatgaatctcttattttttctctgttactggtcttagtggctatatttattagccgaaaagagaaactttcattagagaaagatattatttggagtaccgcccgagcgataattcaactctttattgttggctacgtattaacttatattttcgacgtcgaccatattatccttacatttctaatggtcttatttatctgttataacgctgcctataatgctaaaaaacgcagtaaatacgttaaagatatttttattatctcgtttgtcgctattaccacaggggcattgctcaccttaagtattttactttttactcatgctattgcctttacccctatccaaattattcctattaccggtatgatcgcggggaatgcaatgattgcgaccggactttgttataatcagcttgggcaacgttttgaaaatcatcaacaacagatccaagaaatgttaagtttgggggcaaccccttattgcaggtaa

SEQ ID NO: 317833 - DNA, 300 bp, Proteus mirabilis
  misc_feature (269)..(278): n is a, c, g, or t
gtgtaccgcttccaaaatgattataatgaaattgcacatcctgcggtcatgaaggcaattacagatacagtaggtcaacgttatgatggttatggtatggataccctttgtcatcaagctaaagaattaatcaaacagcgaattaaacaacccgaagcgcagatccatttttttaatggtggcactatcactaatttaaccgctatttctcactttttacgcccacatcaagcagtaatttctgtcagcaccgggcacattgcaactcnnnnnnnnnnccgggcatattgcaactcatga

SEQ ID NO: 317834 - DNA, 522 bp, Proteus mirabilis
ttggcatggttacaagcattcactttaggctatacctacaatgtatttgattttaaagttgaaggtacttgggttaaagcagaaggtaaccaaggttactttttacaacgtatgacgccgggatgggcaacctcgaatggtcgtttagatatctggtgggatggtcgttctgattttaacgccaatggtgaaaaagcattatacgcgggagtgatgtatgatctaaaaaattgggatctaccgggctgggcgattggtacttcctatgtgtatgcttgggatgcaaaaccgagtagtaaccctatttatgaccaaagtaaacgtattagagaaagcgcatggaatgccgacatcatgtataccgttcaagaggggagagcgaaaggtacgttatttaaactccactacactcgttatgataaccattccgatataccaagctatgaaggtggttttggtaatatcttccaagatgaaaaagacgttaaattcaatgtgatcatgccatttacgattttctaa

SEQ ID NO: 317835 - DNA, 918 bp, Proteus mirabilis
  misc_feature (4)..(13): n is a, c, g, or t
gtgnnnnnnnnnngtgctggtgcatttgctggttatcagtacaaccaatacttaggttttgaactgggttatgactggttaggtcgtatggcttataaaggttcatacaacaacggtgcattcaaagctcaaggtatccaattaaccactaaattaagctatccagtaatggatgacttagacgtttatacacgtttaggtggtatggtatggcgtgcagattcaactgcaactattaatgcaacttcagcaggaactcaaaaacgtttctctgaaaatgatactggcgtttctccagtattcgcattaggtactgaatacgcgatcactcctaacattgctactcgtcttgagtatcagtggatcaacaacatcggtgataaaggtactctgaacgctcgtccagacaatggtatgctgagtgttggtgttgcttaccgtttcaaccaagaaactccagctccagttgttgagccagctccagtagttgctccagctccagttgttgagaacaaaacctttactctgcgttcagacgttctgttcaactacaacaaatcttctctgaaagctgaaggtcaagaagcactgaatggtctatacaacgaattagctaacatcgacccaactcaaggtcgtgtagtagttatcggttacactgaccgtatcggttctcaaaactacaacctgcctctgtcagaaaaacgtgctcaatctgtagttgattacttggtatctaaaggtattcctgcaaacagcatctctgcagaaggtcgtggtaaagaaaacccagtaactggcaacacttgtgacaacatcaaagctcgtgcagctctgatcgattgcttagcgccagaccgtcgtgtagaaatcgaaatccaaggtacaactgaagttgttgttcaacctggtcaataa

SEQ ID NO: 317836 - DNA, 207 bp, Proteus mirabilis
atgccgaatagtgaagaaagaaaatcaacctcatactattggatctacggtataatggtgaagtttgtcagtgaaacgtatgatctaataaggctgtttatgatagataaaaaaaaactacatattgctgcaggtgtgatttgtgataagcaaaataatgtatttattacccaacgccctttgacatctcatatgggaggatattga

SEQ ID NO: 317837 - DNA, 315 bp, Proteus mirabilis
  misc_feature (281)..(290): n is a, c, g, or t
ttgtttaaaccacatatcactgttgcttgtattgttcatgcaaacaataaatttttagttgttgaagaaacggtaaatggtaaagccacatggaatcaacccgcaggacatttagaagcaaatgaaaccctgatccaagcggcacaacgagagttatgggaagaaacaggtttaaccttgccggtacaatattttctgaaattacatcagtgggtggcaccggacaatacgccatttttgcgttttttatttttgatagaagcaccagaacaattagccannnnnnnnnngatattaatggctgctactgggtga

SEQ ID NO: 317838 - DNA, 159 bp, Proteus mirabilis
gtgaatgctagtacacgttttacagatggtggacagtttggcttaggtgctgaagtagcggtgagtacacaaaagctacatgcacgaggccctatgggattagatgctctaaccacctataaatggattggttacggcgacaatacattacgtcgctaa

SEQ ID NO: 317839 - DNA, 213 bp, Proteus mirabilis
atgcagcagcaactgcttacatggatacgtcagtttaatgaagagtacgctcaaatcacttctctgttacttgttttattgatcatttttgttgttgctcttgttctccccctaagctttcaaaagctatcagtaaatacgatcaaaagtggcaactctcttttgaaattaataagttattcagtcgatttgcctttcttatccaaggtgtag

SEQ ID NO: 317840 - DNA, 222 bp, Proteus mirabilis
atgcatttgatgtatttgcatgcaacggaaaaagtgctgaaagacgataatttactgcgtttatttgcgatccctgaagtgttatggccccgtatccgcctatcatggcaaaatagacgtcatcaaatgatcactggacggttagatttttgtatggatgagcgcggtatcaaggtgtatgaatataacgctgattctgcatcttgccatactgaagcctga

SEQ ID NO: 317841 - DNA, 153 bp, Proteus mirabilis
atgaccgattatggttggtttgccgctcgtccttcagggacagaagaagcgtacaaaatttattgtgaaagcttccgtggctctgagcatcgcgaattaattgaaaaagaagccattgaaattgttaataatgtttttgccagtaaacaataa

SEQ ID NO: 317842 - DNA, 309 bp, Proteus mirabilis
  misc_feature (241)..(250): n is a, c, g, or t
atgactgatatcttacaaacacatccttcggtgttgcctttaacaggtgggattaactttcgtgatctagggggaaaaaagctcagtaatggcggtattatcaaacccggcttactctttcgctccggttcactggatagattaacggataccgatcaagcgcttcttattgataaaaatctttttcaaatcttagactatcgtgacacaggtgaaattgttgataagccggatcgagtannnnnnnnnngaaggggcacaatattaccatgctccagccaatccattatcgaaagaagtgtcagctaa

SEQ ID NO: 317843 - DNA, 333 bp, Proteus mirabilis
  misc_feature (293)..(302): n is a, c, g, or t
atgagcaaaacatatttgacagaaaagaagttttccgacttcgccttgcatccaaaagtgatagaagcccttgagaaaaaagggttctctaattgtacacaaattcaggcattgacgttacctatcactgtgaaaggtcatgacattgctgggcaagcccaaacaggaacaggaaaaacgttggcgtttttaacctcgacgtttcattatcttttaactcaccctgcaaaagaagggcatgaaaagaatcaacctcgtgcactgattatggcgccaacgcgcgaattagctgnnnnnnnnnngcacaaagcactggtgttaaaatgggtctag

SEQ ID NO: 317844 - DNA, 852 bp, Proteus mirabilis
  misc_feature (830)..(839): n is a, c, g, or t
atgctaataaaaaattctttagcttatgcgattacactaagtttctgcttatccttacccgcacaagcattaccttctctttctcatgaaccttttggcgatctttatctttttgaagatgaaatgccaaataccttgagcacctcaaatgaccatcagctatcactaagtaaagagcatgctaaagatggcgtacagtcactcaaatggcagtatcaaccccaatcaacattaacacttaataatgaagttaattatcaagatgataaaaatacagcaacaccactcacttttatgatgtggatttacaatgaaaaaccacagtcgacgccccttacattacaatttaaacaaaataatcaagtagcattaagttttaaaacggaactgaatttcacgggttggcgaggtattgcagttccttttcgtgatatgaaaggctcagcaacaggcaaattagataaattagtcattactgcgccagatcaagcaggtacgcttttttttgatcaaataattatgagcgtacctttagataatcgttggcctattcctgactatcaaattccatatgttaataatgcagtaaatacaatggtgagtaaaaattggagtgcattattgatgtacgatcaaatgttcacagcgcattatcctacattaaattttgcgactgagtttcgcgatgatcagcctgaagtggcatctatttatcaacgttttgaatactatcaaggtgtcagtcgtgataaaaaaatcaccgctgaaatgatcgacaaaaatttagcattatggaaaaaattagccttagaacaacatgctgatggctnnnnnnnnnncaaaagcccttga

SEQ ID NO: 317845 - DNA, 537 bp, Proteus mirabilis
  misc_feature (474)..(483): n is a, c, g, or t
atgtcagataacagccaaaaaaaagtcatcgttggaatgtccggtggcgtagattcatccgtctcagcctatcttcttaaggaacagggatatcaggtcgttggtctgtttatgaagaactgggaagaagatgacgatacagaatattgctcagcttctgccgaccttgccgacgcgcaagccgtgtgcgataagcttggcatagaacttcacactatcaattttgccgctgaatattgggataatgtatttgaacactttttatctgaatataaagctggccgcacccctaatcccgatattctatgtaataaagagataaaatttaaagcatttttagaatatgcagctgaagatttaggggccgactatattgcaacgggccactatgttcgtcgccgtgatattgatggtaaaagccaattactgcgcggtgttgataacaacaaagatcaaagctacttcttatatacnnnnnnnnnncttatatacattaagtcatcagcaaatcgcccaaagccttttccctgtcggtga

SEQ ID NO: 317846 - DNA, 354 bp, Proteus mirabilis
  misc_feature (20)..(29): n is a, c, g, or t
atgatggcaccacacagagnnnnnnnnnnacaattaattattgaaccgggtgataattctattgcgacatcgggggattatcgtaactattttgaagaagatggcgttcgtttttctcatacgattgatcctacaacaggtcgtccaatcaaacataaccttgcctctattaccgtaattgtacctacttgtatgagtgctgatggtttatcaacagggttaaatgttctggggcctgaaaagggcttagaggtagcaaataaattaaatattcctgtttttatgatagttaaaactgaaaatgggtttgaagagcgttatagtaaggcattcgccccattcttgaaaaagtag

SEQ ID NO: 317847 - DNA, 672 bp, Proteus mirabilis
atgagtgcgacccgaggttttatatggggctgtgtgctcagttgcatactgtttttagctgtcggatttggtgtacatctctatttaaaacaagagatgaatgcgattacttcaatacctgaaggtgcggctgccaaatggttgtttaaaccacagttaaatagctacgagtatcatttagcattattagaaaaacgttctcctctttctaatttacggctaattgatacgatgcaagaaaaagccaaaaacgcttggcctacagatgcagagcaaatttattttacacgtaattggcaaaatctttatcaaacgcgcttagagaatatgccaattaatgatagctggtctgaaaccgcgacattattacaacaactttctaataaaatagttcagcaagaacgaaatagaggcagttttacactctcttatctaaaaacggcaatttatgatattcaaaaacagcacaataaagttgagccaatcgaagaaaaactgcgacaactcgctgtacaaattgaaacagggcaacctatttctcctgcaactctcaataatattgataataaaattaatgggttattagctcgttattatgatttacaaaaacaagctgaacaacaaggtttaaaacccggctcatattcatcttttggattagatcatgagtga

SEQ ID NO: 317848 - DNA, 252 bp, Proteus mirabilis; identical to SEQ ID NO: 312208

SEQ ID NO: 317849 - DNA, 258 bp, Proteus mirabilis
atgtcaattcaacgcaagccaaagaccgcgaacccgcgcgaggcggccgccgaggcgttcgtgacgggcgcacctgacgccgcagcgtcaaaaccgactacctacgagaaggggttgccgaagggcaagaagcggcaaatcagcctcactatcgcgccggagctgctgcgaaaggtggacgagcgcgccgagcgggccgggatcggccgggcagcttttatcagcatggccatcttcaaggcgctggaagaaagctaa

SEQ ID NO: 317850 - DNA, 471 bp, Proteus mirabilis
atgaaagaccgatcccacgatcaggcaatggccgagcagttccgcgcggacccggcctatgccgccaagctgctggctgaggtacgccgcgacggcgacccggcggagctggcgtccaccttgcgccagatggtcgaagcgttcggccgcgccgggccgtggtgggacagcctcaccgatgacgagcgggccttatgtaccgcgcaattcagccgctacgacacggcggactatctcaagaccgagaacgacattgcggcctatctcgatgccgtggcggaggatggcgaccccgcgctgatcgcggcggcgcttggagacgtggcccgtgcccgcaaccttatccagcttgtccgcgatgtggatggcgacccgagcctcgcaaccgtggtgaaagtcgcccacgcgcttggcctgcggctcgctttcaaaccgacacacggcggatcagctccggcagcagagggctag

SEQ ID NO: 317851 - DNA, 195 bp, Proteus mirabilis
atggaaagctcatttacgccaacagaagaactactaaacactcgcgctacacaacagaaatcgcttaacaaagatattccttaccaagaaattttgttaactcgcctgtctatgcacgtccagagcaaacttcttgaaagtcgtaataatatgttaaagtctcagggcattaacgagacattatttatggcttag

SEQ ID NO: 317852 - DNA, 225 bp, Proteus mirabilis
atgaaagtattagccatttaccttagcaatattctgactgtacttgacccacatttaattgttattggtggcggtttatcacaatttgacgcactgtataccttattaccggattatctctcacattgtgtatacggtaatacacaaattccaacaatagaaaaagcacgttatggtgatgcgggtggagcaagaggtgctgcctgcttaaatttattagactga

SEQ ID NO: 317853 - DNA, 438 bp, Proteus mirabilis
  misc_feature (335)..(344): n is a, c, g, or t
gtgtctgaactatctactctatccccacaaccattatgggatatttttgcaaaaatttgttcaattccacacccttcatatcatgaagaagccttagcgtcccacattatggcttgggcgacagaaaaaggtttatctgttgagcgcgatgcggtaggaaatattttaatccgtaaacctgccaccaaaggtatggaagatcgtaaaacagtcgttttacaagcgcacttagatatggtgccacaaaaaaataacgataccgaacacgactttaccaaagatcctatccaaccttatattgatggtgaatgggtaaaagcgaaaggcaccacatnnnnnnnnnnccttagaagtattgttaaccatgacagaagaaactggaatggatggtgcttttggactacagcctggctggttacaagcggatattctgattaa

SEQ ID NO: 317854 - DNA, 480 bp, Proteus mirabilis
atgccaaatggtgttatccgcatgagtgatgatgtggaaggtgtggttgaaacctcattaaacgtcggtgtagtgagtattgttgacgataaagtagaaatcctatgtttaattcgctctctgattgatagtggtaaaacttatgttgttagcatgctgacagcattagccaaacttgctcaagcagatatcgaaaccaaaggtggttatcctggctggaaacctgatgcggattcaccggttatgcacttagtacgtgacacttatcaacaactatttgataaagtgccaaatatcatggtgatccatgcaggtcttgagtgcggtctatttaaaaaaccttatccagatatggatatggtctctattgggccaactattcgcggtgcacactcaccggatgagcgagtacacattaagagtgtaggtcaatactggcaattactgactgctattttaaaagcgatcccagctaaataa

SEQ ID NO: 317855 - DNA, 225 bp, Proteus mirabilis
atgtcaaaaaatagtgatattctcagtaatatcgatagagaggaaaatttctcatcggcttttatctgttttgaagattcacctctgatccatttttgtagtaatggttttgattatctttcttcacaaaattgtccagatacttttactcaattacgtattgaagaaatgctcattctattactttcctccgaacaaggtgccaatcgcaagttgatcgcttga

SEQ ID NO: 317856 - DNA, 294 bp, Proteus mirabilis
atggaaaaaaaccatctaaaaaattggaagctaaaacagtttgctcgcgagtttggtatgggtctcaccacatttaaagagttatttaatcatgtttatggaacatcgccaagaacatggatatgcgaaagaagaattatttacgcacatcaattattattaacaacagaaatgagtattgtcgatatttctatggaatcaggattctctagccaatcttactttacacaaagctatcatcgacgttttaatatgacaccgagtaaagcgagacatcttaaattaaaattataa

SEQ ID NO: 317857 - DNA, 222 bp, Proteus mirabilis
atgttattttctaataaatgtttttttctaaaacatattgaacatatatgtagttttatttttcttgtgaaaaaatactcagataataaatcccaatttatattattgttggataattttaagtttatattttgcggttttttatttattaagaaattaaatagaaaaatatttgcttctttatttatagtgaataaatctagttcatggttaggaaactga

SEQ ID NO: 317858 - DNA, 795 bp, Proteus mirabilis
atgagtatatataaaaatgataatattttatatataaagaaatcggttcagtcaattttaaatcagactcaagttaatctattattgtttattcatattgatggtgaaattgatgaaagtattctggtgtatttgaataaattagcatctgaaagtaaaattattttatctcaatctaaaataaatcaggggttatccatatcattaaacttattaatcgaaaaagttttatttaatcctaaaataaaatttatcgctagaatggatagtgatgacatatccctccctgaaagactttcaatacaaatgggatatctagaaaatcaccctgatatagatatacttggtactgcttgtgaggagtttggttcttcattttcattacaaaaaaaatccttaccttcacatcatgatgatttggtcaaatacagtatttgtcgttgcccttttatccatccaactgtaatgtttagacgaaaaatctttgatgatggtaatcgttaccctacacatactacatttactgaagatatggctttttggttagaattaatatataaaggctataaactacataatttaccagatgtgttgttacaatatcgattagaagacaacacaatgcatagaagaaaaggattatcaaaagcgaaaagtgaattttctttgcgtatgggatatatgttccttctaaatcaagtatcattaaaaaatatattactaattagctctagatatattttccatttattaccacctaatataatgagtaaagcatataaatatttaagatag

SEQ ID NO: 317859 - DNA, 570 bp, Proteus mirabilis
atggctttattagggtatgctcgagtatcaactagtcatcaaaaactaaaccatcaaattaaggaactgaaaaatgccggtgtacgtgaagaccgaatttttacggatttgatgacaggagctacagatgaacgtgaaggattacaacgtttactcgctcgagcagagaaagatgacgttataatttgtactaaaatggatcgcctcggtcgtaatactgctgacatgatccgtatcgttgatacctgttataaaaagggaaccgctattcgctttcttgaaaatggtctcagcactgaaggaacgatggggaaaatggttattcagatactagcagcagtcgctgaagccgaacgtgaacgtatattagaaagaacaaatgaaggtcggattgcagcctatgcggcaggggtaaaatttggacgaaaacatcatcctcgaacgccagctgctcaggagcttattttgcaaggtgaaacgatgagtatagtgacagcaaagacaggtatctcacgggcaacctattttaggctaaaaagaaaaatcaaaatgggtgaaaaaaaggaatag

SEQ ID NO: 317860 - DNA, 1230 bp, Proteus mirabilis
atgtatttaacaaatatccaacatttaggtaaattaagacggatgtataaaaatcgaattagtattttgacaaaaagtgaagtcaatgagctatatcagatcccttcatttaattctattgagaggtctgagtatttttcattagatgttagtctcaaaaaagaaatcaataaaatagttaatatagaaagtagagtttatctaatattgattattggctatttcaggtataaacccgtacttcctgaattaacctcaaaaaacgcaaagaaagatataaaatatataatccaaacttattataaaaatgaaagtactgtgttaaatattgatatccccaaaagcacaaagtctcgtctagttaaacagatgcttacgatgctgggatttgaacaactgacgccaataatgaaaattgaattagctgcacgcctgaatgatgtggccacaattagtatggagcccaaatatatttttgatgagttcctcgctttcttggggcaaaaacgcattgcgctcccagcgtatagtactattcagaaactagtatctaatgcattaaatgttgaaagaaaaagaatacttaatttgctttcaaaaacaatgagtaatacgactgcacagcaaataactgctattttacatgatgatggtagcttaaatgacatcagaggataccatcgcagtgcgagagatttttcagcatcagaaatagaaaatgaattgatatctcataatctaattcagagaatttatcatgaaataaaagactccatcaatgtattaggtatatcacctagaaatatggagtactacgccactatagttaaacacagttcaacttttaaacttaaacgtcaccctaaatggttggggatcctttatttatgctgttatttgtatttcagatatagagaaataaatgacaagataatcaccgcctttcgatatttggttaaaaaacacaaaaatgcggcagctgcctgcgctaaaattcgagctgctgaggaagttgaactgatcaataaaaaacttaaatacgccagtgaaatttttaaagtatttattgacagtagcattgatgacaatacatcttttggtgaaatacgccaaaaagttttttctcttatatcgagcaatgacatgcatcttgttagtcaattctttaataacaacaaaatcgatgttattgaataccaatggcaatatattgggcactgttgcaaatag

SEQ ID NO: 317861 - DNA, 705 bp, Proteus mirabilis; identical to SEQ ID NO: 45284

SEQ ID NO: 317862 - DNA, 687 bp, Proteus mirabilis
atgacacccctgctggggcactcgatcacttaccgtatcgctgtcggttcacaggcggggcgaaaggtgttcactttgcaaactctgccgaccagtggtgatccgttcggtgacgggattggcaaggtagccgggtccagcctgcacgccggcgtggcggccagggccgatgaacgcaagaagctcgaacggctgtgccggtacatcagccgcccggcggtatccgagaagcggctgtcgttaacacgaggcggcaacgtgcgctaccagctcaagacgccgtaccgggacggcaccacgcacgtcattttcgaaccattggatttcattgcaaggctggccgccctggtaccgaagcccagagtcaacctaacccgcttccacggggtgttcgcacccaacagtcggcaccgggcgttggtcagggtggctgatgaaccggcaacaccagcacaacggcgagcgtcgatgacatgggcgcaacggctcaagcgtgttttcaatatcgacatcgagacctgcagcggctgcggcggcgccatgaaagtcatcgcctgcattgaagaccctatagtgatcaagcagatccttgatcacctgaagcacaaagccgaaaccagcgggaccagggcgttacccgaaagccgggcgccaccggctgagctgctcctgggtctgtttgactga

SEQ ID NO: 317863 - DNA, 303 bp, Proteus mirabilis
atggcaattacaggagaagcttcgcaccctctattacaaggctttagctggagtgatcgaaagctacaatttagtgtaagagagccatttccaagtagaacaacaggtgttgcactgacttttggcactattgagcctgactcaccactgcaattaggatctttgatgccagagaatggcgtaattttctctgatggcatcgaagatgactatttacaatttaatgcaggttgtattgctcacattggtatcgctgacatacaagggcaactaattagccaaaaagggcgtcagcgaatttag

SEQ ID NO: 317864 - DNA, 705 bp, Proteus mirabilis
gtgaatgcatttaaaggtcgtcatttcactggtattatcattctttgggcggtacgttggtactgcaaatacggtatcagttaccgagaacttcaggaaatgttggctgagcgcggtgtaaatgtagatcacacgacaatctatcgctgggttcaacgttatgcaccagaaatagaaaagcggttacgttggtattggtgtaatccctccgacctcaacaattggcatttagacgaaacttatatcaaagtgaatgggaaatggacgtacctttaccgagctgtcgatagtcgagggcacaccattgaattttatctctcgcctcgtcgtaataccaaggcagcttatcgatttttaagaaaaatattcaatcgcgttaaaaaatggcaaatccccagggttatcaatacagataaagccgcaccttatggccgagcgcttaaccttctcaaagaagaaggaaaatgccctacacatgtagaacatcgacaaatcaaatttcacaataatgtcattgaatgtgatcatggaaaattgaagcgcgtgataaatcccaccttagggtttaaatcaattaaaacagcacatgcgaccataaaaggaattgaggtgatgcgtgcgcttcgcaaaggtcaagcagaacatttttactatggccaaccgttaggagaagtgcgcctcgtgaatagagtattcggactttaa

SEQ ID NO: 317865 - DNA, 852 bp, Proteus mirabilis
ttgaagacgcagcaatcaaacgtatttcaactcgatctaatcgagacgcttcctcataagccctattgcaccgatgaactcggtgtcacttacatacgcccaaaaagtacagcgattaagaaaaaatatctgcaagtaaaccaacctaagcttgtcacatacctggtgtttgatatcgacagacaaggcggtgtgttgtcttggtatgacaatgatctccctgcaccatactggacaagtaaaaatccagagaacggacatgcccacattgcgtatcgcttaaaagtaccgttctgcacgtctgacattgctcatagtgaaccaattcgttacgcagctgctatccaatccgccatgacggaacgattgaaggctgatagagggtttgcaggactgctcacgaaaaatccattacattcacactggcaaaatgagttttggacagagtatgaatacacgcttgatgaactagctgactaccttgatttaaaaggacatccgttacgtggtagcgaaatatcaggtcttggtcgtaactgtgagttgttcgataacactcgtcagtgggcatatagagcgattcgggaatactgggcgcctaactacaaaagaaagtggaatgcagccgtctacgacaaagtagaaagtacgaatagccagttcaatgttcctttgcccgtgtcagaagtgaaagcgatagcgaagtcgatcgctaactggacgtatcgagaattcacgccagaaaagaaaagccaatggcacgctaagaaaggtgctaagggtggaaaagtttcaaaaggtggaggtagacctagccttaacgaaccggcactgttgcaaatagaatcgtga

SEQ ID NO: 317866 - DNA, 657 bp, Proteus mirabilis
atgaaacaggaaaataaaacttttagagagcaggacttttcacaaaaatcatttcaagaagctatttttgaaaactgtcaattttacctttgtaattttagccatgcagacttaagagatgcacaatttataaattgtaaatttatcgaagcaggagaaaatacggggtgtcaatttgactatgcagatttacgtgatgcttctttcaaacaatgcaagttaggaatggctaattttcaaggagcgaaaggttttggggtcgaatttagagagtgtgatttacaaggggcaagttttgtaagaaccagctttataaaccaaatttcccataaaagttacttttgctctgtatatatcactggttgtaatttgtcttatacaaattttgaaaagcaatgcattgaaaagtgtgatctatttgaaaatcgttgggtaggagcaaacttacgaaacacttcctttaaaggatctgatttaagtcggggagatttttcttcagatagttggggacagtttgatatgcaatattgtgatctcagttattgtgaattacatggtttagatcctcgccgtgttaatttgaatggagtgaaaatttgtgattggcaacaagagcaactattagaatcactcggtgttgttattttaccaagttaa

SEQ ID NO: 317867 - DNA, 2991 bp, Proteus mirabilis
atgccagttaattttctttccgaagagcaaaaagcaagttatggcaattatcatggtgaattaacaaaagaaacactcgctcgttattttcatcttgatgattttgataaagttaatatttcagaaaaacgaggggaacataatcggcttggatatgctgtattattgtgcactgttcgttatcttggtcgttttcccgatttggcgtcaatcattccagatgcagttattgattttttagccgaacaattacacgttgatcatggtagtgaacaactgaatatttataattcagggaagcaacgcaggcaacatattgatgaaattataaaaatttatagttacactgaatttatggacgcccgtgtcgcatttccattgacccgctggctatattctctgtgttggactggaactagtcgcccaagtatcctttttgaccggtgtaccgggtggcttctatcacataaagtattgttaccagggtattctttacttgagcgttatgtagctcgattgcgcagtcgagttgaaaatcggttatggcaatcactggcggcctgtatagattcatctcaagcacaacaaatgctagaacttctttcaattccatccggatgccgctattcattactcgaacagttacgtaaagggcctactaaagttaacgccacatcactggtacaagctatcgcacgccttcaagcgatacgcaacttgggagtaacgttacccgcgattacaccagtatcagatacgcgtatagcggctcttgcacgttatgcatcgacggccaaaacaacagcacttcagcgtttgccaggaaaacgcaaactggcaacgcttgttgctttttcctgctgtatggaggctaccgctcaggatgatgctcttgaattacttgaagtactgctcagagacctgttcaatgaagcagttcaggctgataaacggaaccgtcaacgaacaattaaagatttagatcgttcagcagaaatactggtcaaagcatgtaggatgatccttgacgacaaattatctgataccgatgttcgtgataatatcttcaatagaattccagaggatgtactgaagaatgccgtcaataatgttacatctctcattcgtcctgctaataatgtttacttcaacgaacttgatactaaattcaaaacggtacgccgttttttgcctgatttactttccaaaatacattttgaaggtaatgcctcggcagaggcattaattgaagcactttgctggattgatgttaatttaaaaaagaaaaagaccgataatgatgcaccacgtgaaataatcaataaaccgtggcaacagcatgtggtaagaaaagacggcagtattgattttcacgcctatacgttttgtgcactcaaggagcttcagcttactttgaagaaacgggatatttatgtctcacccagttggcgttatgcagatccacgaacagggcttatcgaaggtaaggaatgggaagctctgcgtcctataatctgtcgttctctggggttatcatcaacaccaggggccacgctgtcagctattacaacagaactggagtcaacttatcgtgatgtgttggaccgattaccggaaaatccggcagtgaggtttgtagaaaacggcgataaaactgagctgatcctgagtcctttggatgccattgaagaaaccccatcgctggttgcgttgagacaaaaggtggctgatatgctgccgcgtgttgatttgcctgaactgatattggaaatcgatgctcggacacattttaccggagcctttactcattcatcagaacaaagctctcgtgtatcggatctgaatatcagcatctgtgccctattaatggccgaagcctgtaataccggacctgagccctatatacgtaacgatgtcgcggcactgaagcgtgatcgtctgacctggacagacagtaattacatcagggatgaaaccatccagacagccaatgctgttctggttgcagaacaaaacgggatccctttggcaaatgcctggggcggcggcgaggtagcctcagctgatggtatgagatttgttgttcctgttcgtacagtacatgctggccccaatcctaaatacttcaaagaaggacgtggagtcacatggtacaacctgatttcagatcagtattccggaataaacgatatcgttgttcctgggactctcagagacagtttagtcattctagccgtcgttcttgagcaacaaacagatcagatgccataccaaataatgaccgatactggcgcatatagtgatgttatttttgggctttttcgcctattgggataccgttttagtccaaggattgcagatacgggaggagctaggttttggcggacagatcctaaagcgaattacggtccgtttaatgctctatcttcacatcgccttaattttggaaaaaaaacagagccacactgggatgatatcctgcggctgatagcctccctcaagcttgggcgactgaacgttatgtccataatgaaaacgttacaaacgggtgataggccaaccagtctggcgcaggctatagccgaaattggccgcgctgataaaaccatccatatgctgacttacctcgatgatgaaaataaacgacgaagaacgttgcaacaattaaaccgtggagagggacgacatgcggtggctaggaatgtttttcatggtaaacgaggagaactgagacaggcttaccgtgagggacaggaagatcagctaggatcattaggtctagtgctcaatatcattgtgttatggaatacgatttatatggatgccgcaatccaacagctcaagcgtgaaggctatccggttcaggatgaagatgttaaaaaactttcgccgctacagtgtggtcatatcaatatgcagggccgctattcctttacggtaccagactctgtcagcaagggggaactgagagctttcaatgaggatatataa

SEQ ID NO: 317868 - DNA, 624 bp, Proteus mirabilis
atgaaaattgctcgtatctatgaacgcgtcagtacgtctgaacaggatttaacccgtcaagctaatattgagaagatggctatagacagtggtttttatatcgcgggcatttaccgtgaaaaagcatctggagctaggattgacagaccagaactcctacggatgattgccgatcttcagcctggtgatgtagtgatagccgaaaaaattgaccgcataagccggctccctcttccggaagccgaaaagctaattgcttccattagagataaaggtgctaggttggccattcccggcatagtggatctttctgaactggttgctgaaaatgatggtatctcgcgtattgttcttgaatctgttcaggagttgttactgaaggtcgctcttcagactgcccgcgatgactacgaaatacggcgagaaagacagcgacagggcgttcagctcgctaaagccgcaggtaagtacgctggtagaaaagccgaccttgtgacccacgagcgtatcattactcttcgacagtcaggattaactattgaacgtacagcaacgctggccggatgcagtataagtcaggtcaaacgcgtctggtcactccataagtcgcaaaaaaattcgtaa

SEQ ID NO: 317869 - DNA, 345 bp, Proteus mirabilis
atgaaaatgtatcttgttaagttggatttttttgaaacttgcgacaatcaaagaatgttcacagatagtaaagattatttgattgtagaaaaatcagaacgggaagttgtgaaaaagtttaacggatttaaaaacgcattgttaatgagtgttacacaatacgatttattcactgaaccgaaaacaatcaagttcacaatgtcagcatacaacgttaatggggatgttgtttttgtcgaaacaacacctattgaagttaaaaatacattgtgtttaatcgaaaaggttaaagagtaccgcagcagagattatttaacagtagattggaaggaggtagacgactaa

SEQ ID NO: 317870 - DNA, 240 bp, Proteus mirabilis
atgaaataccattacacccaactgaccaccgaaaaaactaacacgcaagctaactacattgccgcaagcgaaattttaagaaaaaacaatttaacacctttcaaataccaaactaaaaaacacccttacatgcaaaccacggtttatatttttaaccgagatggcgaaaaattagggttcattcaagaaagcattagcggtactccggcactgttaacgacctacaaaaaaatgaaatag

SEQ ID NO: 317871 - DNA, 252 bp, Proteus mirabilis
atgaatttactagacaccaacaacatcaccgcagaagaaattagaagattgcggaaaaaaactaatatgacacaaaaatcactcgctgaattattaggaatatcgctttcatactggcaaagaaaagagcttgaaaggtcatcaccaaactatcgcccaatatcagcggcggaattatggattttgttgttactggcaggggaacaccccgattttatgttggaaaaaagaaataaagacgttgcaagctga

SEQ ID NO: 317872 - DNA, 264 bp, Proteus mirabilis
atgaaaactcaagagattatatataaaaaaggagataggcgatatttactatcggtggatagtggtaaatatcattttaccaagatgattaaaaaaagattgataaatggggcaacaaaaacaactaaggttatcgtctctgatttttatttttccgacttatcggaaataacatcatctttcatgattgaaaacggcatcaaagaaaatgaatttaacgtaattccgaaaatgcttaattctttatcggaggggcaagaatga

SEQ ID NO: 317873 - DNA, 552 bp, Proteus mirabilis
atgaacgaaaaaccaactttttttgaccaatacaagcctgtttttgatgtagtgtgccgtctgttaggcaaaaaatggcgcgttaatttgctggacgattgtcaatatcgtattaagctgacatcccccgatttaagggggtttattattacggtcagaccggaaaacgggcggatcgtgttaacgggatttgttgattcccgattgtatcggggaacgtattttaaatgcacgttggcacgggatagaaaacccgtttccattgcacagaccattgagcgaaagattttgaaagatgcagccgaagaaatatcaaaggcacgggatgccgaaaaatcgcatcaggacgcacgggaacaggagcaaatcattaaggggatgttgtcccgccttgtgaagctggaaagccattacaacgcctttacgggctttaaatcgggtaatggtttacaggggaatataactaaacggtttgacgggtatgggctgacagttcagggcttgaatgttgagcaattagtcaaattaaccggaatattaaaaacaatttaa

SEQ ID NO: 317874 - DNA, 234 bp, Proteus mirabilis
atgaatttttttaaggttaaagaagaacacttaaatgactggacagatgccatgctgtttttactcaaaacaatggataattatccggtatataccgatgaaattatatcagggcatttttttaaggattggcaatttattgtgactcacaataatgaaattgttttcgcaaatggtgttttacccgctatcaccaaagcagattttttggattttaagaggctgaacccatga

SEQ ID NO: 317875 - DNA, 207 bp, Proteus mirabilis
atgaaattgaaaattattgatattttaaaatgtggtgacggctatcgctattttttaatcgaaaatggcataaaaatttgctggattgaatttaacagcaaaaaagaagtggaaaactccaactttaaaaagggtagtaaagcagaattaaatctcgctgaatttttacacaacgtcaggcgtaacagcctgttaagcgatatttaa

SEQ ID NO: 317876 - DNA, 267 bp, Proteus mirabilis
atgttagagcctttgaaaatgaatgtaaatataaatgatatataccaatataaattaaaaagtttttttaattcacgagccttatcaattaatgaagaaaaatttatatttatagattctggaaaaaataaagagaaggttttatctcttcatataaaaaataatgattttctttttttatatgagtggtgtgatttatttgattttgaaaaaatatataacctgctatctagtagaattgtaaatctgagttattcaattatttaa

SEQ ID NO: 317877 - DNA, 132 bp, Proteus mirabilis
atggcaaccacttttctacctattggtctttttgggccattaaaccctattggtttgggcggtattatgtttgaatttttcgtaaatagtagctcatcaccattctatattaatagtaagggatatttatga

SEQ ID NO: 317878 - DNA, 798 bp, Proteus mirabilis
atgatttttacttatatagtatataactcaattcttttatttagttttttattttcttatattgctgaatattgtaaaaacaagaaactctcaatcatattcttatcaggctctttttttataatcttttttattgctgcaataaggtataacataggtaccgactataaaaattatgttgaaatatttaaaaacctaaacacatcagatcaatatttagagctttcatttctattcataagctcaactattaaatcaaatggcttagatgtacaatggctatttgtagttttttcttttatatcacttttatttatatatattacagcctttaactataataaggttcttttcattatttcttttatcttaatactttatttacaaaatttatccgcgataagacagatttgtgcgatatgtatttctttttatgctattcataaattaatgaataatcgctctatgagtttcgtattgtggatcttgatatcttccacattccattcatcaacacttattttactgccatttgcattacttaaaaaaatacgttgtaataactttttattttttataattacacttataatttctgtattaatatttcaatttgacctagcaagcaaaatattatctatcgaatttatatcacaaacaaagtatgcaaattatattaatggaaaatttagtagtgaaaccaagcttggttctgggtttggcgtaatactaaaagttatttatccatttattatattattatttacaatgaacaatagccgcctgcggcggagctaa

SEQ ID NO: 317879 - DNA, 996 bp, Proteus mirabilis
atgaataaaaaaattgattttgtcattccatggttagaccctacagatcctgaatggattaagtcttacaatgagtattctattgatgataaaattcttgaagataatcctagatttagagactgggacaatttacattactggtttagaggaattgatagatttgctccatgggtcaataaaattcattttataacttacggtcacttgccatcttggttaaatgtgaatcatcctaaattaaatattgtcaatcatactgattatatagatccttcgtatttgccaacttttagctcacatgtgctagaattaaatatgcataacataccagatttatcagagaattttgtatattttaatgatgatacatttttaatcaatgatatttcaccttcattttattttaataagatgggaaaccccaaagatgcttgtatttttaatctaattgttgacgatggagaattgtcattctacatacttaataatttaaaaattattgaaaaacattttaataaatggcatgaattaaaaacaaaaccatttaattattttaatattaaatataaatcatcccaaataaaaaacttcttattattattctggaaaaatttcactggatttcaaaactttcatttaccacaagctttcaataaaaagacatttattgaactatggatagccgaaaaagaaatcttaattaatacttgtaataataagtttagaaacagatatgatgttaaccaatatctatttagatattggcaactattaaaaggtaattttgaaatttcaaatatttcatctacaggtttatgcatatcaccaaccccgaacaacttcacaaaaataaaaaaaatatttaactctaaaaaaataaaagttgtatgtattaacgacaatgaatcaatatcaaactttaatacttctaaagaatttattaattcattgcttagaaaaaaacttccaaacaaatgcacatttgaaatttaa

SEQ ID NO: 317880 - DNA, 201 bp, Proteus mirabilis
atggctttacaagaatataaatttcctaaaaatataatatttcctttaaaagaaatagttttcgaaggaaaaaaatatccatgtcctaataaaacaaaagaatatttgatattactttatggaaataattttatgaccccccctaataatccttatcaacatggaaaaattaccaagctttatgataaagaatatgaataa

SEQ ID NO: 317881 - DNA, 561 bp, Proteus mirabilis
atgaaacgagagcaaatcacctttcttcgaaccttgaccaataaaattgtgaatcccgttcttccaggtgaagaagagttcagttatatcccaactcaggtaattgccgagtacctagcaaattcacctgaacttaatctcgatggtatcctatatccatcggtacaacaatcagcatcagatactctctcgaattttaatgttgttttattccacaaagcttcccgtgtaaaatatttagaactaccagctaaagaagagtgttatgttaattactggcaacaatatgatgaaaatgacgatgaattagacatttgtgtgattcaaaaaaatgaattaaaaaaaaccgctcccttatatgatagtgatacaaaaaataaagatgagcgagaaccatccttagaaatagagctcaaaactgtcgaagtacacactataaaaagtgcaaactttaattacacatcaaatccagttaagcgtagaaaatttatcacaagtgggtcaataaacaatcaaaacatatcaaatgagaaatgtaatgatttagattttgactcataa

SEQ ID NO: 317882 - DNA, 1251 bp, Proteus mirabilis
gtgaatggctgtcctcagcaaccgtctcccgctataattccgtgcatgtatattccccgacccgcaaaactcctctttcagattgatgacggctggaatcgccttctcatcaatcgcggtcatactatccccgaatggaccaaactggtcattgagcgcatgctcgcctgcggcaccggtgccatggggatacgccgttattgctgtgagtctgctcactgcacccacaccaaatatttctgtcagagctgcaaaagcaaaggctgcagtgcctgcggtatgaaagccaccgaacagtggatagctgagcaacaacacatcctgcccgactgcgaatggcagcacatcaccttcaccatgcctgataaactctggcctgcctttaatctcaactggccgttactcaatcagttgtttgcctgtgctgccaacaccctgctgaaatgggctgataacatggggatagaaatcgggctgtttgtcgctctgcacacctacggcaggcaacttaatcagcatccgcatatccatttgtcggtcacccgcggcggactatgtcgtaaacacggcgtctggcgctcagttttctttaaaaagaaggtggttgagcggtactggcgtcaggccgttaccgccctgttacgtcagcactatgcttcgctgaatttatccggcgccggttacaggcatatccgcgactaccgggaatggtgtcagtttctggagtcgcagtaccagcggcgatggaaaattcactttgccaaaaagacaaagcacgcacggcaaaacgtcaattacctcggccgatacctgaaacgaccaccggttgcggcatcgaagttacgtcattacaacggtggcaccgttgttcaccattactacgaccaccggacggggcagcacaaaacacagcatctgagccaggaagagatgctgatgcgctatatcagccatatcccgtcacggcattttaagatggtgcggtattacggctttctggccaaccggaaacggggcgttttattgccaaaagtgtatgaggcactaaacatgaaggtgaaggaaaaaccaccaaaacccggctttgcgtcgctgatgaaacagtttacccggacagatccgtaccagtgcgtgctgtgtggcggcaggatggtgtttaacagcgcggaagcgggtatcagggcagaaagattgctggagatgcggcgtcaagaatttaagaaacaacgatggctgcggcaggcagcatag

SEQ ID NO: 317883 - DNA, 246 bp, Proteus mirabilis
atgtctccggttattccaaatggttcaacagtgaccgttgatacaggtaatacgcggattgtggatggcggtatttatgctatcgaacaagattcattatttagaataaaattgctctaccgtcagccaggcggaaaattaattattcgtagctacaataaagatgaatttcctgatgaatttgcagaaattgactccgttaaaattatgggacgcgttattcactggtctgtgatggcttggtga

SEQ ID NO: 317884 - DNA, 675 bp, Proteus mirabilis
atgcacctgctgggcttccgtttcgcgccgcgcatccgcgacctcggcaaaaccaagctgtacgtgccgcagggcgtgcagacctacccgacgctgcggccgctgatcggcggcaccctgaacatcaagcacgtccgcgcccattgggacgacatcctgcgcctggccagctcgatcaaacagggcaccgtcactgcctcgctgatgctgcgcaagctcggcagctatccgcgccagaacggcctggccgtggccctgcgcgagctgggccggatcgaacgcacgctgttcatcctagactggctgcaaagtgttgagctgcgccgccgcgtgcatgccggcctgaacaaaggtgaggcgcgcaactcgctggccagggcggtgttcttcaaccgccttggggaaatcagggatcggagcttcgagcagcagcgctaccgggccagcggcctcaacctggtgacggcggctatcgtgctgtggaacacggtgtacctggagcgcgccacccaggggttggtcgaggccggcaagccggtggacggcgagctgctgcaattcctgtcgccgctgggctgggagcacatcaacctcaccggcgattacgtctggcggcagagccgcagactggaagacgggaagtttcggcccctacggatgcccggaaaaccttag

SEQ ID NO: 317885 - DNA, 123 bp, Proteus mirabilis
atggctacctcaaaaaaagaaagtaaagaaaagataactgattcagatagaaataaagaaaaagacttgcttcgtaattatgcctattgcggatcaccccgattacgaaaaagggcattttaa

SEQ ID NO: 317886 - DNA, 993 bp, Proteus mirabilis
  misc_feature (933)..(942): n is a, c, g, or t
atgagtgaaattaaatatattaaagaaaagcagtacttacaaaaactgttcagtgagtatgcagataaagcgccacatttagcgagcgtacttgatcctcaagatccacaaacaagttatctcttagaaggctttgcttttttatctgctcgtttacaagataaaattgatgatgcttttcctgagatcacattacccctactgcaacgactaaattcccaagccattaaaggcctaccatcaacaacaattatccaaattgaccaaagtgaaattctcccctatcccatggagattaatgaaaaacatttggtgattggcgacaacggggcacaatttagtttctgccataatttcaccatcatgccttatagcattttggatagaaaaattactcagcatccaaaccactcttgtatctctcttgaaatattatatcgtggtgatgtggaattaactcaaacaaatgcacttaatgtttttttaggggaaaataaaaccacctcagacattttattactcgcatttagtcaatattttgaaaaaattgaggtggtacataacggtgaacgttatgaaggcgatcctcttaattatgcttttgaacccaaaattggcaatgactataaaatcttcccacagaaaaataactcattttctgcaccacaacgtttattagaaggtctttatttaccccatgttcaccattttattgagttagatataccacaaatagtgactcaattagattggaaacaacagcagcggtttgttgtgaatatctatttcagtcagcaacttcctttaactcaagaagagtgtaatcagagcttttttttaaactgtgctccagcgattgatagtgaagcaaaacatacacttttaattgattttaaaaagaataaatcaagttatttactccctattccaacnnnnnnnnnnttccaacccatcactatttggccgatcttgataaaattgagttatcactag

SEQ ID NO: 317887 - DNA, 795 bp, Proteus mirabilis
ttggccgatcttgataaaattgagttatcactagagcctcatgagctagcgcgtggcatatactgtcatttttatcctacgacagaattaaccgccgcctctcgtttaatgccccaatttcataaagccattttctattcattaacaatggagaaaaatattactgggcatacactttattatttgaatttctttgataataaaggtgatcctatggtcacaccgcctagtttacattttgcatgtgtttatattggctttgaacaatataaaagaaatgagttaggtctattaaataaacacagcgaaaaaatgcctgatgcagtaaaaacaggaaatatcacattattatcatcttgttatccacctattgtaaataatcaccatttttggaaattgttatctcattacagtgctaatggttcaatgttaatgtcattagatactattaaacatatgatttctgattatattctttaccgagatactgataggcagatcactcgaaaatgtgagcgattattaaatggactcgttgaactaaaaacacatttatatgactatattttaaaaggtaaaccctatcgttgtttatctttatcgctattcattgacgaaacacaatatgaaaatagaggtgaagcttttgtctttactacacatctttaccattttttcccgttctgtttatctgaaaatatgttattggaaatgtcagttacactcaacgatcagaaaaacaccacttggtatttatctccctcaccactaaggggctataaatcaatgatttaa

SEQ ID NO: 317888 - DNA, 126 bp, Proteus mirabilis
atgttattagcatctaaaaatgattatttggtttctattataatgccttgctttaattcagctaattttatactagactatctctatgatataaaagtcattatttgctctgctttatacgattaa

SEQ ID NO: 317889 - DNA, 189 bp, Proteus mirabilis; identical to SEQ ID NO: 300520

SEQ ID NO: 317890 - DNA, 210 bp, Proteus mirabilis
atgattcacgaacttaacttaaaggctgttgcaaaaaaaagtgaccatttaaacgcactactgtttcagctaaatggcatattacttcaaaaccaacctgatgttatgagtttaattgagttagcttataatttatctagcgatatatcgaattggctaatcgaagaaaatgcacagagagataatgatcatgacaaaagaaataattaa

SEQ ID NO: 317891 - DNA, 270 bp, Proteus mirabilis
atgatgctgtcttacagcagtaataataccgttcactataaaaacaaacaatttgatgcgtatatgaaagaatctttacgcgtgaaatcggatgatgaacgtgcagaaatttatcaaaaagcagaaggtgtattagataaagattctgccattgttccactttactactacgtaaacacccgtttggttaaaccttatgtcggtggttattctggtaaagatccactggataatttacatactaaagacttgtatattattgctaaataa

SEQ ID NO: 317892 - DNA, 390 bp, Proteus mirabilis; identical to SEQ ID NO: 306291

SEQ ID NO: 317893 - DNA, 135 bp, Proteus mirabilis; identical to SEQ ID NO: 313129

SEQ ID NO: 317894 - DNA, 339 bp, Proteus mirabilis; identical to SEQ ID NO: 303443

SEQ ID NO: 317895 - DNA, 348 bp, Proteus mirabilis
  misc_feature (334)..(343): n is a, c, g, or t
atgctgacagcatctggtgctattgcttatagtgatggattatttgctacttctcctgtggagttaggagatactttcggtattttacgtgttccaggacaatctggtattttagttaactctatgggtggtggtacgacaataactaatcactttggtaccgccgttattcctaacttacctgtaaataaaaaaacaactgttctattaaatactaaaaatttaccactcaatgttatgttaggcacaacatcctttgatattgcattggcaaaaggtactgttttttctcgtgagatccctgtcaatacaatgaagcaagttttattagaannnnnnnnnnaataa

SEQ ID NO: 317896 - DNA, 3636 bp, Proteus mirabilis
atgagcaaaaaagtcgtaggaaataagaatgctgattactgtgtgattgctacaggacccgatgtttgccaagtgggtaatgcgattgtaccgtttgatagttttcaacaactcagcgctgaggcaagctatgtttcaacggtgcgtgtgaatggcgtccctacgttaacagtaggtagcgttattaaaggaacacaaggaaatgcaggtagtggtcttatttcgggaacaagcttaggtgctggaaattgtattattacaagtggctcgccaacagtgcgtttctgtggacaatctgcagcttaccatggctcagatgtcatgatgaataataataatgtgccggggcgcctctattctgaagaaaaaatatcaccaaaagccaatgatgcgataaatattcctaaggatattccggaaaaaaacaaacttacggaagaaatgtcttatcaagaaatgatgagaatgggaaatgaatcttatcatgaggcagaattaataggaggtgaaaatttacctgatactgtgataggtggcggaaaaaactttgttaatagcttgattagtctgagtgaggcttatgctagatcaaatgcggtaagtacatcttatcaactagaggcacaagcttatggacctgcaacatggttgatgtctgatgaaggtaaaaaacgatacgctgagaatatgactgcactggcacaagagatgcgaaaggaagagaatctcccccagtttgagcgtttaaaatacgataatcaagctcaagagtcaggggctatattagaggaaataggcgagtatgctcttggcgctaaagctgttgccagtttattaactcatggtattaaagcattacccagattgattaaaaaggagacaccaccgcccaaagaaacaccactattaaccaagccccaaggtgaaaatagcacgaatattaaacccaataaatcctctaacaataaagcaatatgtgaatcagatccggttaatgtggcaacaggtgatttcattcaagtatggcaagttctttttttacctggactattacctatttcgttacaacgagcctatcattcaacaagtactgcttcagggttatttggtcctaaatgggtagataactggtcaatatacttagaagtccaatctgataatattatttatcacaatgaggaaggtgcggagattacctatccttatacaaagaactctctcagtattcgtaatgtgtattacccacatgttctactctcaggcgatatcacagcagacatatgtctattcgataatcgaacacaattaacttaccattttaattatattgatgggtgctatagacgtttgtctgctattacagatcgtaacaagcaatgtgttgattttatttataacaaacaacatcaattgataagcttatctcgtaatggtattgagacactatttttacactatatcgattctcaattaagtcaaataacgttagccaatgaagttattcatcaaccactcgtcacttgtcggtatgataagcaaggttatttaagtgagtgtgacgcttaccagcaaaatcatttgtggcacgaatatactgccgaagggttcatgtctcgctggcatgatacagaccaaaccgattattaccttgaatatgacaaacaaggtcgtactataaaaaatagctcgccatcaggttattggtgtggagggtttatttatgatgatgttcataaaatgaccacctatttcaataatgaaggtgaacaatcttactactattataatgatgcgggattagtcacccatgcaattgatgcgttggggcgcgaaatacacacagaatggcaaaataatcaaaaaattagtgaaaccaacgcccttgggcaaaccacttattatctttatcatcatgacggtaatattgcgcaaaccattttgccagatgaacgttctattgagtaccaatataatgagtatggtcaacttgctagcttcacatctccctctggcgatgaatggcagctaagctatgatgaaaatggcaatttaaccatagtgacagatccgcaagggcgtcagcaggtctatgaatatagccaacatggtgagttgctcaaagccattacgcccaatggtgcgcaatggcaataccactataaccctgcacatcaactgattaaaaccaccaatccttatcaacacagcacagaatatcatagtgatgaattggggcgtttactgcactacactgatgcgttaaatcacaccacacgctatcaatacagcactgagcatgccagtaccaacggcagtctcagcaagattttattacccgatggggtagagcaacagatagactatgacagtgagcgccgagttatcgcggtgacggatggtgaaggaaaaaccacccgttatcgttatgggccttttgatgtcttactggcaatgatacgccctgatggcagtgaaattcgctttgaatatgattcactgacacgacttaaaaaagtggtgaatgcgaacggggaggtttatcgttacgaacgggataaagcgggacaaatcattcgtgaagttgattttacggggcgtgagatttgttatcgctatgaccgactaggacgtcgcattgccactcgctatccggataaccatgaactgcgttggcgctataatgaaagtggcttagtggttgaacaaagcgaatggtttgaagatgagcaagaaagccgctgcttatccacgactcaatatagctataacgcacgtcaacaattgataaaagcgactaatcctgactcggtggttgaatttgagtatgacgaccaaggtcgtttatgcagtgaacgtattaatggacaagagattgttcatcaatggaatgaagctgataatacgctggcattgacttgttttggtgagcgggagttgcattatgcttttggggcgctgggggagttaacttcactgcaagtcaatcagcatgcaccacttcaattcagctataacgcggtaggacaagagtatttacgccgtagtcacgccggatttgtcaattccagtcactatacggctaccggtttactggctcatcaacgagcagggcgaggcaccgaacagtttttacaatcgatacaagcccatccccaacaaccgccattttgtacggatgtgcaccgcagttatcaatatgatcgcgcttataatgtggtgggtattgaagatgatcgctggcgacagacacgttatcactataatgccaatgaccaaatcactaagacacaatacagtccacaatggggtaatcaggacgaaaaattccagtatgataacaacctcaatatcacggagcacttaacaacgccgtcctcgtcgatggtgccttcagaagcacaaggggcgatgctacagctatttcagcaacagcaagcaggacgggtgactcgccgttacacagcgaagggatatcaagattaccattatgatgttaatgggcgattagctaaaaaaattgtccatacacgcggttttcgtcccagagagtggcgctatttattatttatggaacacacaaaatcagctaaccgcatgctttacaccgaaaggggattgttggcactatacttatga

SEQ ID NO: 317897 - DNA, 474 bp, Proteus mirabilis
  misc_feature (400)..(409): n is a, c, g, or t
atgttagaacaaatgggaaaagcggcgcgagaagcttcttggcacttagctcagctatcaaccgaacaaaaaaatcaggcactgttagtcatcgctgatttattagaacagcaagaagccattattcttgctgctaatgaaaaagatatggtggcggcacgagagtctaatattaatgctgcaatgcttgatcgtttattactcacatcagaacgtttaaaagcgatcgctgatgatgttcgccaagtttgtcatctagaagatcctgtaggtcaagtgatcgatggtcgtttattagacagtggcttacgtttagaacgccgccgagtccctttaggggttgttggcgttatttacgaagctcgtccaaatgtgactatagatgtagcatctttatgcnnnnnnnnnntctttatgcttaaaaacagggaatgcggctattctccgtggcggaaaagagactcaccatactaa

SEQ ID NO: 317898 - DNA, 159 bp, Proteus mirabilis
atgacgaattcgacggattctaaatatccaactaggtctgacttagctaaagccagcccttacgctgagcgcgataaattgtcagaagaagagcgtgaagaaaggagtcggaagtttaatgattctctatttttcggtaatgggtatttcaaactttaa

SEQ ID NO: 317899 - DNA, 570 bp, Proteus mirabilis
  misc_feature (541)..(550): n is a, c, g, or t
atggaaaatattcaatcaaaaaaagaaaaaatcatgcagttagtgatggtttatacaccttggatcactgtgatatgtgttgttgcgtttattggtatagcgactgcagattgggatcgctggtggagtgatgctcgttatcaaacaacagataacgcttacataaaagcggactcaacgatattgaaatcacgaatgactgggtttatttctcagattaataaagaggattaccaagtagtaaaacgtggtgaggtcattgctgaaattaataagaaagaacaaatattaaatcggcaagcggcattagcagagtatcaaaaagcccaattagctttagataatctcactgaagaaattaaagaatatcaattaaatattgagaaattagctaatcgttatcaagcatcagttattgatgttatccaagctaagcgtagtccaatgttgcgtaaagatttaattaatagtggggcaatcacacaacaaaattatttagatgctcaatctgatttgcaacgtttaatgaaattacaaagtnnnnnnnnnncaaagtgctgcgaaaaatga

SEQ ID NO: 317900 - DNA, 306 bp, Proteus mirabilis
  misc_feature (273)..(282): n is a, c, g, or t
gtgagggcacaagccacccgagcttcacgtattgaatgggaacatatcgtccctgcttgggtttttggtcatcaacgtcaatgctggcaaaatggtgggcgagctaactgtgttaaaaacgatcctatttttggcaaaattgaggctgatttacataatctagcgccttcgattggagaggtgaatggtgatcgcagtaattttagctttggtcaattatcatctcaagcgccttatcaatatggccagtgtcgcagtcgggtcgattttacnnnnnnnnnncctttgagcctcgtaatgaggtga

SEQ ID NO: 317901 - DNA, 243 bp, Proteus mirabilis
ttggggaaaggacttattcctgaagcagtgaaagcgcttatttgtcatagctttgagactctacaattagataatctatggtgtggttattttgcagacaatgtaaactcgaagcgagtacaagaaaagtgtggatttaaatatcatcacataattaaagatcagtatgtggagtatttagacgaaataagaacagaagttatttgtcgtttaaccaaaagtgaatggcaaaaacaacaataa

SEQ ID NO: 317902 - DNA, 159 bp, Proteus mirabilis
atgtcatggaaacctttaattatcattatcagctttatccttgcattactcattacggttgctggtggcatttatctcttgattgataactcatgtactaaagaccaagtgagtttagaaaaacgctgtcagattgcactctcataccatcggtactaa

SEQ ID NO: 317903 - DNA, 270 bp, Proteus mirabilis
atggaaagctcaacacaattaatcttgatcctagctcttgccacattggctccttttattattgctgcaggaacttgttatttaaagttttctattgttttagttatgactcgtaatgcattaggtgtgcagcaagttccttctaatatggtacttaatgctatcgctttaatgatggcgctttttgttatgacaccaattactaaaaatatttgttactatgttattgaaaataaagtggatatgtcatctcagatcctgatttattag

SEQ ID NO: 317904 - DNA, 834 bp, Proteus mirabilis
atgttttcttctaatattgatgataatgaaataaagaaaagaattgaaaattttagaagtaatatagagaaaggtgtacttcaagataatattattcctgaacttacatctatatttggagatttatactcatgcccaacagagatggggtgctatgagataggaaccactttttatagagttcgtccaatacctttagatgatactataattccattaaagactattggtaaaattgaagatgcttgggagcctcctacaggttgtataaaagtacaaggtcgattgaataacgtaaatgaaagtattttatattgttgccctaacgattttgagttagcaattgatgaagctagagctaggaataataaatatgttgcagtcattgtatataaatcttcccgcccaatttggtactcaatgttagggaattatgaaaattcaagattacctaaagatgataaaacaaagttattttattcatttttaaatgatgaattttcaataatagttaatagtggtgaagaaaaccgttattcaattactcgtgcaattgcaactacattctttaatctacccaatcaagatgcttggtgttatcgttctgtacaatcatcagaaaaattcaatgttgcatttttaccaggaaaatcaaaggattgtattgagctcgttggtgtgatgatttgtactccaagtagttcggctgacgggacattaaaggttttttatgtggttgattttgatgaagaaagtggtgttgctcgttaccattctctgggttccgaaaagcaaaaggaattatttcctgaaattcaacataatgggaactag

SEQ ID NO: 317905 - DNA, 198 bp, Proteus mirabilis
atgagtactgctaaattagtcaaatccacaccttcagccctgctttatacccgtaataatgttgatgacagtgttaaactgcatactatcgaactactgcagcaaatggtgactcagtttatcgatttgtctctcattaccaaacaagcacactggaatctttattgccgtacacgaaatggtagatggtttccgtga

SEQ ID NO: 317906 - DNA, 426 bp, Proteus mirabilis
  misc_feature (338)..(347): n is a, c, g, or t
atgcgtgactatggaaaagtttccccacaattttggataggaaaaacaggtaaggaaataagagaaaaagggcatgaagcacttattgtctctatgtacttattaaccaatcctcacgccaatatgatcggaatgtattacctacctattatctatatggcgcacgaaacagggctaggtttagaaggggcttctaaggggcttctaaggtgcattgaagcaggtttttgccactatgatgaggatgctgaagttgtttgggtgatcgagatggcaaaatatcaaatagcatcatctttgaagccatcagataaccggtgtatcggtatacaaagagnnnnnnnnnncaaagagagtatgactctcagcctaaaaatcaatttctatcaatgttttatgataagtataaagatgcttttaatttaa

SEQ ID NO: 317907 - DNA, 2214 bp, Proteus mirabilis
  misc_feature (2074)..(2103): n is a, c, g, or t
ttgtatctttatattgaaacactgaagcaacggctggatgcgattaatcaactcaggctggaacgtgcatttgcatcgatgagtgatgtgtttaaacaggtgtatggtttaattcctgttttactgcattaccaccaccctcagttgccaggctatattcaaggaaatgtccctcatggtacatgtttctttgaacctgatgacgtgcaacgtcaatgggttaataagctgactaatgcatcatgtgatgagccaatgaatggatacaccagcggagagttacctattacgggtatctattcgatgggaagtacttcctcgattgggcaaagtcactgctccgatattgatatttgggtctgtcaccaatcttggctggaccaagatgagcgtgcacgtttacaacgtaaatgtttactgatcgaacaatgggcgggagaattaggtattgatgttacttttttcttaattgatgagaaccgcttccgtcatcatgcaagtggtagcttaggtggggaagattgcggctcaactcagcatatcctgttacttgatgagttctaccgtacagctgttcgccttgcaggtaaacgtttgttatggacgatggtaccagtagaagaagagtaccattacgatgaatatgttaattcactctatgcccaaggtgtattaacgcccaatgaatggcttgatttaggtggattaggtgagctttctgccgaagagtattttggtgcaagcctgtggcaactctataagagtgttgattcaccttataaagccgtattaaaaagtattttattggaagcctattccgcggattaccctaatggcaaattgttggcattagaaatgaaacagcatcttcatcgtggtgaaatcgtaaattacggtttagatgcatattgtatgatgcttgagcgcgtaacccgctatttagtttcgattaatgatttaacccgccttgatttaatccgtcgctgtttctacctgaaagtttgtgaaaaattatctaatgaaaaaaatgagaatgaacctgcaggttggcgacgccaagtattatctcagttagtcacgcagtggcagtgggatcacgaacgtttagcgatattagataatcgtgatagctggaaaatagagcgcgttcgtaacgcacataatgaattattagatacgatgatgcaaagctatcgtaatcttattcgttttgcgcgccgtaataacttaagtgtcagtgctagtccacaagatattggtgtattaacacgtaagctttatgccgcttttgaagcgctaccgggtaaagtaaccctggttaatccacagatttctcctgatttatccgagcctcatttaacctttatctatgtgccaccgggacgcgctaatcgtagtggttggtatctttataatcgggctcctgattttgcacatattgttggtcatcaaccgttagaatataaccgttacttaaataaattagtggcgtggtcttattttaatgggttacttactaaagattcacaggtttatattcatcaaggtgactcctcttgtgatgaaattaaacttcatgaattagtgcgggatatctcgagtcattttcctattcgtttacctgccccgacgcctaaagcactgtatagcccttgtgaaattagacatttagccattattgtcaatttagaagtcgacccaacagagcgtttttctgatcaagtggtgcattttgattttagaaagttggatgtatttagctttggcgaggaagagcaatgcttaattggcagtatcgatttgctctatcgtaactcttggaatgaagtgagaacgctgcattttaatggtacgcaatcgatgttggaatcgttaaaaactattttaggtaaaatgcaccaagatgcggccccacctgcatcggttgaagttttttgttatagccagcatctacgtggtttaattcgcacccgtgttcaacagttagtctcagaatgtattgaattgcgtttatcaaccaatagattagagccagggcgttttaaagcattacgtattgcagggcaaacatggnnnnnnnnnnnnnnnnnnnnnnnnnnnnnnggggattgttctttgaacgtcttaatgtttctgtgcaaaagttggagaatgccattgaattttatggggctatttcatacaacaaattgcatggattacccgttaaattag

SEQ ID NO: 317908 - DNA, 219 bp, Proteus mirabilis
atggttgatagtgagcaacatcgtgccattatcccccctgaagggcctttagataacttagttgatgattatgagcgtcgcttaattgaagatgcactctatttatttgctggccgtgtgagcgatgtggctgattatttaggtatcccacgtaaaaaactctatttacgcatgaaaaagcatgaactggataaagagagttataaacctaaggtttga

SEQ ID NO: 317909 - DNA, 327 bp, Proteus mirabilis
  misc_feature (312)..(321): n is a, c, g, or t
atgtcttttaaattgcccattgaagccgctatttttgatatggatggtttgctaatcgactcagagccgttttgggcacaagcagaacatgaggtctttgcacaattaggtgtcgatttatcacttgctgacagcatgcccgacaccgtcggcttaagaatagatcaagttatcgaactttggtatcaagtatcaccttggcaaggcgtaacacaacaagaagctaaagagagaatgattgctcgcgttgtacaacttattgaagataaaaaaccgttgctccctggtgttgaacatgccctatctttatgnnnnnnnnnncattag

SEQ ID NO: 317910 - DNA, 735 bp, Proteus mirabilis
  misc_feature (705)..(714): n is a, c, g, or t
atgctgttaaaagcagaagattctactgcttatttcgaaacactcgctgatacattacaacaagcagagataaaaacttatcctgttgtaggtgcctatcaagctgaatctaatcaaatttattggcaagaaaatgtagaaggctcattttcatcatcagaatctattgcttgttgccaatggatagagccagaacaactttttggttcattttattatcataaagataagctcctcgttaacccaggactgttgcataaagtcaatggtggtattttagtcttatccattaaaacgctcttagcacaacctttaatgtggttccgactgaaaaagatggttgaagagcaacgctttgaatggttagtgtggaatgaccatcaagcacttcctttgcctattgaagccatgccccttcacttgcgtgttattttagtgggcgatcgcctaagcttagaagagcttgagtttatggagcctaatatcagcagtacggcactatatggcgaatatgaatacgatatgtatttagaagatgaaaccgccctgagccaatggtgtggttttgttaatggactttgccaaaaatatcgtcttccttcattatctgctgatgcttggcaagtattactgactcagggcgcaagagagcatgaagatcagcttatcttatctctcgatcttgaattcatattacgccaattnnnnnnnnnngcgttatgccatgcgttttaa

SEQ ID NO: 317911 - DNA, 264 bp, Proteus mirabilis
  misc_feature (228)..(237): n is a, c, g, or t
atgaaaaagacagctatcgcattagcagtggcagtggcagctttcgcaactgcagcgcaagcagctccaaaagacaatacttggtataccggtggtaaattaggttggtctcagtatcaaagtactggtaacaattgggacggcgtgaatatcggtaacggtagcacacacaaagaccaaattggtgctggtgcatttgctggttatcagtacaaccactacttaggnnnnnnnnnnctggttatcagtacaaccaatacttag

SEQ ID NO: 317912 - DNA, 174 bp, Proteus mirabilis
atgagtaagcagatggttttagttgcaagaacaaataaggttggctctgactctgaatgtgggttgggtattactgaggacgaatgggataaattaaccgaagaagaacaaaagcagattattggcgagttcatgggtaatgtttgtgggctgtgggtgcaagctgaggaatga

SEQ ID NO: 317913 - DNA, 1491 bp, Proteus mirabilis
atgatacccgttattgccttagtagggcgccctaatgtgggaaaatccacattatttaaccgactaacacgcacaagagacgcattagttgcggattttcctggacttacccgtgaccgtaaatatggtcgtgcagaattagacggtgaagaatttattatcattgatactggtggtattgatggtgcagaagagggtgtagaaacccgtatggcatcacaatcactgcaagccattcaagaagccgatattgtgctatttttagtcgatgcgcgagcaggattaatgccagccgaccaaggtattgctaaacacttgcgtggtgttgagaaaaaaacctatttagtggcgaataaaacagatggtatcgatattgataccgctttggctgatttctactctttaggattaggggaaatattccctattgctgcttcacatggtcgtggtgtttctcaactgattgagcaagcgttgttacctattgtgggtaaagtcgtcgaagaagagaaagaattaacagaagaagaagagaatgccgcttattgggctgctttagaagcagagcagaaagagcaagaagaagaggaagaagaggatgatttcgatccgacaacacttcctgttaaattagctattgtaggccgccctaatgtaggtaaatcaactctgactaaccgtatgttaggtgaagagcgtgttgtagtttacgatatgccaggcactacccgtgatagtatttacataccgatggagcgtgatggtaaggagtatatccttattgataccgctggcgttcgtaaacgcggaaaagtaaaagaaacggtagaaaaattctcagtgatcaaaacattacaagcgattgaagattgtaatgttgcactacttgttattgatgctcgtgagggtatttcggatcaagatctctctttattaggttatattcttaattctggacgctctttagttattgctgtcaataaatgggatggtatgacccaagaagatcgcgaacaagttaaagatatgcttgatctcaaattaggttttgttgattttgcccgcgttcattttatctcggcattacatggtagtggtgttggtaatctgtttgagtcgattcaagaagcctatacttgcgcgacacgtcgtgttggtacatcaatgttgacgcgcataatgaagatggcagaggatgatcaccaaccccctcttattcgtggacgccgtgtaaaaatgaaatatgcccatgctgggggatataatccacctgtcgtggttattcatggtaaccaagtgtctgatttacctgatagctataaacgctatttaatgaattatttccgtcgcacactacaagtgatgggaactcctatccgtattcaatttaaagaaggggaaaacccttatgcggataagaaaaataaattaacagcttcgcaaatacgtaaacgtaagcgtttaatggctcatttaaagaaatcaaaataa

SEQ ID NO: 317914 - DNA, 867 bp, Proteus mirabilis
  misc_feature (809)..(818): n is a, c, g, or t
atgaatgataataaaatgactccattagagcgcaaagcgacatggggactaggagctgttttctctcttcgcatgcttggcatgtttatggtacttcccgttttaaccacctacggactgcaactacaacatgcgacagaatcgctaattggattagctattggtatttatggattaactcaagcaatcttccaaattccttttggatttttctcagacaaatttggccgaaaatcaatgattgttttcggcttaattatttttattgttggtagccttattgctgctttaagtgacagcatttatggcattatcatcgggcgagcattacaaggtgctggagctatatctgccgcagtgatggctctgttatctgatctgacccgcgaacaaaatagaaccaaagcaatggcctttattggcattagctttggtattacgtttgccttagcccttgttttagggccaatactcacacatatttttggcttacaaggtctattttggggcattgccctactcgctttcggcgggattatgatcaccctcattaccgtaccgaatagcgaacatcatatacttaatcgagaatcaagttttgtacgaggaagtgtcaaaaaagttttatttgatgcgcaattattaaagcttaatgtcgggattttttcactacacactttattgatggccgcttttgtcgcacttcctttgatcatgcataatgccggattagttaatgagaaacattgggttgtctatctagtcactatgctgattgcctttatttcagtattaccctttattatctnnnnnnnnnnatattctttattggttttaatattatggaggcactgctaccttcattaa

SEQ ID NO: 317915 - DNA, 579 bp, Proteus mirabilis
atgatgctggaagtgggcgaaaaagtggcgattttaggcaccaatggtgtgggtaaatcaaccatgatcaaaacattagtgggtgaattaacgcctgataatggacgcgttaaatggtctgaaaatgccactataggttattatgcacaagatcatgccactgattttgaagttgatatgaccgttttcgattggatgagtttatggatgaagccagaagatgatgaacagtcggtgcgtagtgtattaggtcgccttcttttctcacaagatgatattaaaaaatcagtcaaagtattatctggtggtgaaaaaggcagaatgctgtttggtaaattaatgatgcaaaaaccaaacgttctgattatggatgaacctaccaaccacttagatatggaatctattgagtcactgaatatggcgttagaactctatcaagggacgttaatttttgtttctcacgatcgtgaatttgtcagctcattggctaaccgcattattgaaattacgcctgaaaaagtgactaatttccaaggcacttatgatgagttcttggctaagaaagggattgatggttag

SEQ ID NO: 317916 - DNA, 1629 bp, Proteus mirabilis
atgacttgccgaggggttgcctattataatcaaaataatagtgccgaatttgccaaaagcctcgacgttcgccaaccaagcatatcagatgaatgtcctgaaaaagtctttcttccagtcaatgatggccgcctaatcgcagttaatgcgcaaacgggtaatgcatgccgtgattttggtcagaatggagaaatcaatctgttagcttctatgccttatgcttatttgggtggatataacccaacatctcccccaatcgtcaccggtaatactattatcattggtggctctgttactgataacttatcaactcaagagccttctggtgtgatccgtggctatgatgttaatagcggaaaattaatatgggtatttgatactggcgcagaagatcccaatgcgatgccaggtaaagagactcaatttgttcataactctcctaatgcatgggcgcctttagcttatgatgcacaaacggatgtggtctatattccgacaggagtaggtacacccgatatttggggaggcgatcgtcatccattaaaagagcgttacgctaattcagttttagcactaaaagggtcgacaggcgagctattgtggcatttccaaaccacccatcatgatttatgggatatggatgtaccttcgcaaccatcactggttgatatcaaaactgataaaaatgaaacaatacctgccatttatatcgtcacgaaaacagggaatgtgtttgttcttgatagaagagacggtacacctattgttcccgtaacagaaaaacccgttcctaccagtgtcaaatatggtccacaaacacaaggtgagcattactcacccactcagcctttttcagcacttaatttagcacctaaaaataagttgcaagattcagatatgtggggcggcacaatggcagaccagctgttatgtcgtatcgccttccatcagttaaattatgagggaatttatactccaccatcagaaaacggtacgcttgtttttcctggtaacctcggtatttttgaatggggcggtatttctgttaatcaagatagacaagtcgcggtaatgaactttattaccttgccttttatctcaaaactttatttaaaagatcctcaagacagtcaagcaattgacgcaggccacggagagcaaggtttacaacccatgacgggaacaccttatagtgttgatattcatccattcttatcaccactaggattaccttgtaaacaacccccttggggacttgttgctggtgttgatttaacaaaaaatgagcttgtttggcaacaacgatttggcaccattagggatagtttgcctaatttagtggaattaccaccattaaaaattggtgttcctgggctaggaggcgctatctcaaccgcaggtaatgtgatgtttgttgctgcttctcaggataattatattcgagcatttaatgtgacgaatggcaaaatgttatgggaagcacgattacccgcaggtggacaagcaacgccaatgacctactctattggaggcaagcaatatgtggtcattatggccggcggacatggttcatttggtactaaaatgggcgatagcttagtggcctatgggttacctgataatttatag

SEQ ID NO: 317917 - DNA, 1518 bp, Proteus mirabilis
atgatcaaattaatcattgaagaaaatcttacagataaaccttttttgcgtgcccataccggagcggtgtatttagtcgatgaacaacaaaaactactacgtgattcagctagtgataaagatagctatttagtctttgataccctaactcagcaaattgttcgccatgatacccccaatattgtaccggcgttaactcatgatgaactgccaaataaaataaattacaccaccgtttttgaacaaatctatttacaagctaaaccctggactatcgaaaaaaccagtaaagaaacagatattccacaagagactattattcgtttagctcgagactacgcgacaataaagcctgcaatgattgtacaaaatatgtctggcgcacaacgcactgaatttggtgcctatgttgcggcaagccagttttatcttgctctattaaccggcaatattggtaaaaaaggcgcgggtatttgtgatgccggtggcgtgcgtcagatggcaaaatttaatcctattattcccccagcaccaaatgttaaacccattaatcccattcctgttgcaaaagtgggtgaatggatagtcaacgaaagaccccacccgattaatttatggtggatcatgacaatgggggtgatgacacaattacccaataccaatatggtacgtaaggcgctaaaaaaagttccttttgttgtcgtagctgataatttaatgtcatcaacagcgctttatgccgacttagtacttccagtgacaaccatttttgaagatacaagtttaatggctggtgtgcgtagccaatatgttcaattaatggaaaaagccgttgaaccaccaggagaagcaaagcctgattattggatttttgcccgccttgctgaacgctttggtttcggtgacgtatttaatcaacctattgagcactatattgatacttgcctcgcgggatcggggattacgcgagaaatgctagaaaaagggcctgtacgacctgtagaaggcgattggatcccatttaaagacggaatatttcgtacatcaacccaaaaagcacatttctttattgaagaatggcaagataaaaactactcccctatagtcacttattatccagtaaaggaatcgacaacaggctcccctgaattagcgaaaaaatatccgttaatggctgtgcaacgtaagctagcacgtagtgttcattcaagccatgggatgaatgaatggattttagaagtacagcgtaatcaacccaatattttaatacatcctaatgatgcgttatctcgtggaataaacaatggtgattgggtgtttgcttttaatgatagaggtgaacatagagcaatagccgttgtcaccactcacataaaacaaggtgttgtttctcttgataatggttggtgggaacaacaaggggggagtagtagccatgtaaccaatgaccatgttgaacctttaggtaatggtcattgttgtaacagtaccctagttaatgtaagacgggaggcataa

SEQ ID NO: 317918 - DNA, 255 bp, Proteus mirabilis
atggaattaatcgcaagagaaaccaagaaacgtaatatgattactgtggttgttgttcacgatattaatattgcattacgccatggagagtatgtattaatgcttaaaaatggggagttagttgccaatggtttaccaagtgaggtgatcacaccagaaatactcgccgatgtttatcgcgttagcgcccgtattgaacgatgctctagaggccatccccaggtattaattgatgggatgataaatgatatatag

SEQ ID NO: 317919 - DNA, 246 bp, Proteus mirabilis
ttgcgacctcaagatatcgccttgcctgagcatactgcggatactttatttgatgaagatttgcttgaaggctcgttagatgaaatgactaagcgatttgaagcttctattttaaggcgtctatatcgtgattatccaagtacacgtaaactggctaaacgtttaggtatttctcataccgcgatcgcaaataaattacgtgaatatgatttaacaagtaaaaaagcggataaaacagagaaataa

SEQ ID NO: 317920 - DNA, 1590 bp, Proteus mirabilis
atgtctaatcctatttttcagcaagaagttgctcgccgtagaacttttgccattatttcccaccccgatgcgggtaaaacaaccatcactgaaaaagtgttgttattcggacaagctatccaacgtgcaggaacagtaaaagggcgtggctcaaatcagcatgctaaatcagactggatggaaatggaaaaacaacgtggtatctccattaccacttctgttatgcagtttccttacgctgattgtctagttaacttacttgataccccagggcacgaagacttctctgaagatacttatcgtactttaactgccgttgactgttgtttaatggtcattgactcttcaaaaggggtcgaagatcgtacccgtaaattaatggaagtgactcgattacgtgatacgccaattttgacctttatgaataaattggatcgtgatattcgtgatccgatggaattaatggacgaagttgaaactgagctaaaaattgcctgtagtcctgttacttggccgattggctgtggaaaactgtttaaaggggtttaccatatcttaagagatgaaacctatctttatcaaacaggccaaggtcatactatccaaaactcacgagtgatcaaagggttggataatcctgagttagatgaagcgattggtgatgatttagccgttcaattacgtgatgagctagagttggtgttaggtgcatcacatgagtttgatcatgaagctttcttagcgggtgaattgactccggttttctttggtaccgcattaggtaactttggtgttaatcacatgcttgatggtttggtgaagtgggcgccagcgccaatgcctcgtcaaactgatatgcgagaagtgacagcggctgaagagacattcacgggttttgtctttaaaattcaagctaatatggatcccaaacaccgcgaccgtgttgcttttttacgggtggtgtcaggcatgtatgataaagggatgaaactgcaccaagtacgcacgaaaaaagatgtggtgatttcagatgcattgacctttatggcaggggatcgttctcatgttgagcatgcttatcctggtgatattattggcctgcataatcacggtaccattcaaattggtgatacttttactcaaggtgaaatgttaaaattcaccggtattcctaacttcgctccggaattattccgccgtattcgtctgcgtgatccgctaaaacaaaaacaattgttaaaaggtctggtgcaattatctgaagaaggtgcggtacaggtgtttagacccctagctaataatgatttaattgttggcgcagttggggtgctacagtttgatgtcgtggttgcacgcttaaaaggtgagtataacgttgaagccatttatgaatcagtgaatgtatcgacggctcgttgggttgaatgtagtaacgaaaagaaactcgaagaatttaagcgtaaaaatgagcaacatctggcattagatggtggtgataacttaacttatattgcaccaacgatggttaacttaaatttaacccgtgaacgctatcctgatattgagttccatcaaacgcgtgaacactaa

SEQ ID NO: 317921 - DNA, 429 bp, Proteus mirabilis
  misc_feature (410)..(419): n is a, c, g, or t
ttgaacaaatcactctctttttctggaggaaaagattctactgttctttttcatcttgttgccgcacaagcgcgaaaacaacatagaaaatttaatgtgatgtttcttgattgggaagttcaatattctgcgactatagatcatattataaaaatgaaatctatctaccaagattgtattgaacggttttactggatagcactccctatcaccactgaaagtggcatttctcaatatgaacctacatggacagcatgggagtctggtaaaaaatgggtaagacaaccgccagaagatgcgataactgaccctcactttttccctttttatcacccaaatatgctttttgaagattttacccctgcatttaaccagtggatcaccggtaatcatcgcagttcgattatccnnnnnnnnnnttgccattag

SEQ ID NO: 317922 - DNA, 285 bp, Proteus mirabilis
  misc_feature (32)..(41): n is a, c, g, or t
atggtcacggcaaactatatgaaaacgatggnnnnnnnnnngttgcaaggtaagcaatatatgatctccgtgacttggaatgcccctattgaagctttcaatgaatttggtaatttctttgatgggcgaggggttgatggtgtctattttgcttttcataaatcacaacaatttcttggtttatctcagttgcctacttttatgactaacaacgtcattaaagagcctaatattgagaaagatattgtagaatataaagcacatctaaccaaagtctttggctaa

SEQ ID NO: 317923 - DNA, 177 bp, Proteus mirabilis
gtgattgttaacggtgatattacgcaatgcgatttacctgccaatgtaaactcaggattagctgatgcactaagtcgttttcaagctaatgagcgtgttggtgtcattaaatttaatgaagaagattgtgtgcgttccagtctatgtcagcatgtattagcagcatatagtgattaa

SEQ ID NO: 317924 - DNA, 351 bp, Proteus mirabilis
atgttggcagatatgaaacattgtatagaaaaatacattggcgaacgatacgggctagaagtaacagtaaaagaaccaaaagatctaaagcaagatcctaaatattctgaattgagcattgataagtggcaaatagcagtagtgacttctcctgagagaaaagatctaccaaaacaaaaaatcaaagtagaagtggcaaacattccagcctatacaagagagccccaacctctgcaaataaactatgattttttgcctgatggatacagtgatatgctaattttgacagaaagtttggatgaaatcatggcggataaaatccttcccgccagcaaaatccaggggatttag

SEQ ID NO: 317925 - DNA, 756 bp, Proteus mirabilis
atgttgctattaacaaaagtttataacagcaccttcttaccttggaatcaaaataaatacgataattcagcgatgattgagcaagctgtacgtgatgttttggaaaaaggtttagtattccgtatcgatgaagcatcgcttaccaatagcagtggcgcaagcaagctaaactttaagttagatttaaatgcgttcaatgctgatgcactgaaaaaagaagacaaggcgccttcagttctgtttaatgaattgtttaataatatcgattttaatatcgatctttctgtaccaatgctaacggagttccgtagtaccacacaataccttgatgttatgcgttattctgaaaaaggcttaacagacgaagataaagctgaaattcagaaaacaaccgctaacgacatggcacagttaaaaactgaattacagcaaaatatcaatcaaatttctcaagacgagaaagatgctctgccattgatgctgttatcacaagacggtaataaactgtctttaaacctgaactatgctgctgataaatttactatgaacggtaaaacttacagctttgatgagtttatggaagtaacacaagcccctcaaatgttaggtttagcggcgatgttattcggtgcgggtgcttcttcttatgattatgatgactctgattatcctgaatattcagaagagccagatcaaaatgatgcaatagaagagccacaagttgagatcccagcagcacctgctgaaaacaattaa

SEQ ID NO: 317926 - DNA, 222 bp, Proteus mirabilis
atgcagaaaaaacaaatctactttctagagcaatttcatatcactatcgataaattagacaatcttggttactttgctgaatttgctattatgactgatgatgagagtaaacttgctgactataaattacagttacataacttagcatatcaatttggctttaatgatagtgagcaagagcatcataactataaaacaatacttttaagtaagttagcttaa

SEQ ID NO: 317927 - DNA, 549 bp, Proteus mirabilis
atgcaatgcgcacgctccagtgcgggtgattgccactcttgtgagtggctttctcttgcttattccgaacaaattaatcaaaaacaacataatctattagacttattgcccaaaaactacgcgtttactcaattagcgccggtagaaagccaacaagttcaatttcgtaataaagcgaaaatggtggtaagtggtagtgtcgaaaaaccgattttagggttacgtaaaccagagggggaaggtgttgatttatgccaatgcccactctatcccgcttcctttgaaccggttttcccaatattaaaaacctttattgccaaagcaggattagtgccttataacgtggaacgtcgtcgaggcgagctaaaatttattttattaacagaaagtcgccacaatcacagcatgatgctacgttttgtgctgcgctcagaaaaaaaagctggcgcaacttcgccaagcattaccatggttacaggctcaattaccccaattagccgttatttcggtgaatatccaacctgtccatatggcgatattggaaggtga

SEQ ID NO: 317928 - DNA, 288 bp, Proteus mirabilis
gtgactaattcagataaagagaatagttttctaattcaatcatgggtatctgataatcaaggtaataaaaataatgattttattgttacccctcctttatatattcttgacgctaataaagagaatgctttaagaattatgtatacaggtgaacctttacctgcagatcgcgaaagtttattttggatgaatgtcaaagctattccttctttagatgaaaagcttgctaatgaaaatacactacaaattgccatatattcacttaagtcaaatttacaaaaattataa

SEQ ID NO: 317929 - DNA, 1611 bp, Proteus mirabilis
atgagaaatgtggcaaggaaaggtgatccgactagcacgggtgggatgatccaagagggagacagcagttggctcagcgaaggctatccaacaacatatatcggaatgatagcgacttgccctgcttgcaaagtaggacagggccctatcgttgccgttggccctcgctccatcatcggtccaggtgggcctgtggcgctgcaaggagactatgttgcctgcggttgcccatcaatgagcaatgtaattcttccagcacaaggaacaaccgttggcgataatatggggccccgacccaaaacagccagcacaccagtagaaccaccggcttccacactagcagactcacagccagcttctgcactcgctgactccgtaacaactcctctcgttctgaaaccccttccgctggtggatctcttagagacccggatcggcgtctttttcgatggcacccagaacaacatgcacaacagcaagctcagggagcaatgcgagagagccagtgatgccgtgtgttcgtcaatagagaagttgattggcactggaacgtcatacgataacggccttaccaatgtggcacgtctacacaatgcctacacggggaaggccatctacatcgaggggatcggaacccaatccggtttggcggacgacacaaagggcctagctcttggtatcggtggaaccggtgtgatcatgaaagcgcaaatgggcctggatcagctcactgcccatgttcaatccctcccccacggcagtgttgtcgttgatgtattcgggtttagtcgcggcgcagccgctgcgcggcacttcatcaacaagctgctcgcactaaacctgggaaggcctcttcgagtggggtttgtcggcctgttcgacactgtagcggctatcggctctgcggcagatggtctggatacctccgatgacaacaatttgggggtgtcactctacctggcccccggatgtgccgatcaggtggttcaactcaccgcgcaccacgaataccgggtcaacttcgccctcaactcaatcagctcgacccatcgtgagatccctctatacggagcccatagcgatataggtggcgggtatcttgccggtgaagagcggatccccatagctagaccctatgaggtcactatgatggtgggtgatcaagaagccttgaaggcattcaagtccgaagcctccaagcgctactatgaagctcagaaggtctatcaggcctatctggcaacaccgtcacaactcaaagacgagctccaccaatactcgatccctacaccgtcgggcggcagaactggctacattgcaaacacggttatgacccggtacgtcaaaccagagctgcaattgcttgcaggccacctcatgcgacagcttgccgcagagtcaggcgttccgatcctggagcttacggaaaccattccagacgagcttgcggcaatatttactgcctaccaggcagcggctacaacgggtgggctgccgacgctgactccagagcaggaacacctgatcatgactcagtatgcccactgctccgacagttgggttacatggggtcgtctcagaattcggaaaataaagcacgctaaggcgtag

SEQ ID NO: 317930 - DNA, 939 bp, Proteus mirabilis
atggagtttcgctatccaacggcagcggcagaagttaatgcagccaagctgaaatatctgacaaagaatttgagcgaccctatctcgggaaaaaatgaatttgagcgcctgacgaaagaactgggtaactcaatagacggatatgcgacttggcatccggtgctaacgatccctagagatagactaaggccaaatgaagatcgagctggtgatttgttccgtctatacaaaggcctcgatcatgtagtcaagttcgtcaaaggctttgtttcatgcccttatagtgaagaggctgcaaattcgctagtagagcaagtgcgcaatgttccaggtttagatgcgtatcgtcttgataaaccactttaccatgacaacgcttatccggtcgttgtggtggcgaccgaagtcacccttgaggcggatggaacaatccgcagtcgtgatgccatcgcatggtgcgttcaagagctagttagaaatgctcgccaagcagaagtggctgaaacatggtggaacctcaaaggtgaaattcttggtgaaccacatggttcgcgttcatcactgctggttaatcagttcactggtgggcacatgcgaaaaatcttggacgctttaaacagcagtggtatgtacggcccagttaaagaatggtctctggaaatgctctcgaagaaaaagagagttctgatagctgagaccctgctccgcacagcactcaaaaactatgatgtcaatcaccaagcatttgaatttgaactaaatggagaggtatgccaagccgaagtgcgagacacatggagtgatggcgccgaattgtttattcaggtcacaattggtaatagtgacctagtagtaagtggcttttactaccgggaaaatgactgtttggaatcatcggatcccaaaggaaaaagagctattgcggaaaaattcttatag

SEQ ID NO: 317931 - DNA, 495 bp, Proteus mirabilis
atgagcgaagaaaacgattttggtgaaagcatcaagttctactctgatgggcaacaggatccagtcaagcggacaggcctgaacgcccagtacaccatgacgaaggcgaactacccgacagtcagcatcgaggttgctccgatctcgaagccacgttcttccccaaactgggagaaaaaaataacagtgcagcttaccaagggagagttgaacgccgtctgtggtgtgttgtttggtctccgaaaggaggctgctgggtcttaccacggggacgccaataacaagagctttgcggtttacaacaatggtaaagcaggggtggctcttattgtgagtcagcgaggagagcagcttcaccatttcctgtctgccgatgatcggatggaggccgccgtattttttatccggcgtttggcggaagcttggaaagtgagctcatctgatgcgattgcgttgttacgacaggcggcctggatggataagcacctcatttaa

SEQ ID NO: 317932 - DNA, 858 bp, Proteus mirabilis
atgggtaaattaacaatatcttgtatgagattacttactaagcactggcaacgccccctgggcagcaccccaacaagccatatttttaagctacccattggtaagattgttcaaaataacatcgatctcagtgagagttgtgagaatgaatggctctgtttgcgcattgcaaaggccttcggttttgacgtcgccaatgcggacctagcaacgttcggcaagaagaaggtgcttgtcgttcagcgttttgaccggcgctggtctaaatccggcgaatggcttctacgattgccccaagaagacttctgccaagctcttgggatcgctcctgcgctcaaatacgagtcacatggagggccaggtattgctgacgcaatgaagttgttgttggggtccagacttgcggctaaggatagagagcaatttttcaagtcgcagatcctattctggatgttggccgcgattgatgggcacgggaagaacttctccatcttcattgagcctgcatcgtcatttaggatgacccccctctacgatgtcatgtctgcttttcctatcttcaaaagcgggggaattgctgctcaaaaggcaaagatggggatggcgctccaaggcaaaaaccgccaataccattttgcgatgatccagcctcgtcattttatcagtaccgccgcccatgtcgggttcccacaagataccgccgctcaacttatgttcgacatggctaccaagacagaggaggtggttgccacagtagcggctgagctgccagccggtttcccagagcacatcagtagcgccatcttcgaggggctgtccagccaggcggctaagatcttgaagggagtagccaaatga

SEQ ID NO: 317933 - DNA, 594 bp, Proteus mirabilis
atgtcatctagtcactcaaagactttaggctataagaggctgactaaaagcaatccaatctcatgccaaattctattgtataaatctcgctctaaaggccgaaaaaatcagcgctcgacacggactcattgtcaccacccgtcacctaaaatctactcagcgtcggcaaaggagccatggattctagcaactaacttacctgttgaaattcgaacacccaaacaacttgttaatatctattcgaagcgaatgcagattgaagaaaccttccgagacttgaaaagtcctgcctacggactaggcctacgccatagccgaacgagcagctcagagcgttttgatatcatgctgctaatcgccctgatgcttcaactaacatgttggcttgcgggcgttcatgctcagaaacaaggttgggacaagcacttccaggctaacacagtcagaaatcgaaacgtactctcaacagttcgcttaggcatggaagttttgcggcattctggctacacaataacaagggaagactcactcgtggctgcaaccctgcttactcaaaatctattcacacatggttacgttttggggaaattatga

SEQ ID NO: 317934 - DNA, 453 bp, Proteus mirabilis
atgtgcgaactcgatattttacacgactctctttaccaattctgccccgaattacacttaaaacgactcaacagcttaacgttggcttgccacgccttacttgactgtaaaactctcactcttaccgaacttggccgtaacctgccaaccaaagcgagaacaaaacataacatcaaacgaatcgaccgattgttaggtaatcgtcacctccacaaagagcgactcgctgtataccgttggcatgctagctttatctgttcgggcaatacgatgcccattgtacttgttgactggtctgatatccgtgagcaaaaacggcttatggtattgcgagcttcagtcgcactacacggtcgttctgttactctttatgagaaagcgttcccgctttcagagcaatgttcaaagaaagctcatgaccaatttctagggaaggtgcgaacaagtccctga

SEQ ID NO: 317935 - DNA, 198 bp, Proteus mirabilis; identical to SEQ ID NO: 14560

SEQ ID NO: 317936 - DNA, 567 bp, Proteus mirabilis
ttggtgataacggcaattccgggagtaccggcggctgatctgtctggagcggatttgctcaaagcgtggccgtcaatggggcagcaacttggcgctgttcacagcctatcggttgatcaatgtccgtttgagcgcaggctgtcgcgaatgttcggacgcgccgttgatgtggtgtcccgcaatgccgtcaatcccgacttcttaccggacgaggacaagagtacgccgcagctcgatcttttggctcgtgtcgaacgagagctaccggtgcggctcgaccaagagcgcaccgatatggttgtttgccatggtgatccctgcatgccgaacttcatggtggaccctaaaactcttcaatgcacgggtctgatcgaccttgggcggctcggaacagcagatcgctatgccgatttggcactcatgattgctaacgccgaagagaactgggcagcgccagatgaagcagagcgcgccttcgctgtcctattcaatgtattggggatcgaagcccccgaccgcgaacgccttgccttctatctgcgattggaccctctgacttggggttga

SEQ ID NO: 317937 - DNA, 837 bp, Proteus mirabilis; identical to SEQ ID NO: 22759

SEQ ID NO: 317938 - DNA, 201 bp, Proteus mirabilis
atgccatcagcagctaaattatctaaacctgaggttaacccttttgatgtatcaattaacacgacatcagttgttttagaaaggtcttccccattccatttaacaccaactgttaatgttgaatcatcagttgttcttgctaacgtattagcaatcagttttgatgataatttaaaatcggttgcgccagattggccttga

SEQ ID NO: 317939 - DNA, 324 bp, Proteus mirabilis
atgaataaatacaccgaaatgtctgatttagagattaacaagcgcgtctttgttgctgcgaaaatagaacatgaagatacagacttacatagcaataaagttttctatggcgatggcgctaactggattgaatttaacccatgcaacaatccgtctgacgcaatgccgattattaacgaatatggcattagccttatatatcaagatagaaaattccaatttgcaactaatgacgggaatatagagtgctgtattaccaacccattaaaagcagcaatgattattttcttgtgtgtgaaggatgcggagaatgaaaaagtatga

SEQ ID NO: 317940 - DNA, 213 bp, Proteus mirabilis
atggcagtgttatctaagagcgtcaaacaatccaaagaaggcactcaatttatttatgagaatgggatgccagcaacgataccaattgaagcaaaactttctcgtgatgatatcaatacaattattgccttagttgaatcatcatttattaaagggattagcactggtcgaaaacaaaaggctcaggagtttagagagtttttggaggaataa

SEQ ID NO: 317941 - DNA, 726 bp, Proteus mirabilis
gtgagtgatataagcttacataatggatgttgttttgatgttttaccaacactagaaagcggtaccatagacatggtttgcgctgatatcccatacggtacaacacaatgcaaatgggattcagtactagatctacagcgaatgtggaaagagttatacagagtagccaagccagatgcggcgatagtcttattttccgctcagccattctcgagtgtgttagttggcagtaatttaaaggattggaaaacagaatggatatgggaaaagggtgctgctactggatttttaaatgccaaaaagcaaccattgagagctcatgaaaacatccaagtgttttaccgaaagttgccaacctataacccgcaaatgacacacgggcatgaaagaaaggtatcaaagcgtaaagatgttaactccgaatgctatggcaaagcattatctctaacagaatacgacagcacatcgcggtacccaagaacagttcaattcttctcgagcgacaagcagaaagccaattatcacccaacgcaaaagccagtctcactagttcgatatcttatcgaaacttattcaaatgctggcgatacagtattggatttcacaatgggaagcggtaccgcagcggttgcttgcaaggaaagtaataggtcattcgttggtattgagcgtgaactgcagtattacgaaatagcacaacagagaattaacgaagcaggaggctaa

SEQ ID NO: 317942 - DNA, 768 bp, Proteus mirabilis
atgatttctgcaataaattttaaaccaaatctttggtataaagaaataaataattcaccaaatagtagtgttagttacaatgaatatggtgatgcgataataaagagtgttaaaaaagaaagtgcatacatttatatgccagtctcaataggatctggagaaacaattaacgtaaaagctactgtttttgtaaaaaatgggaatgctataatttacacatcagaagatgaattctctggaaaagtacacaataaattaaccattagtggaggggaattaaaaacggtagagataaaccatactgcaagactaagtaataatcaattaaaattgtttattaaaatagggagcgatagcagtatggactcagaggttataatacactccataaccatagaaagaataacatcaaattttggtagtttaagagatatggcgtttggtttttttgaaataaaagatggtggtgtgtctttgcatgatagatatccttcactaaacattgaaagtgtatccatagatacagataaattaacaataaaactatctgatgtttatttaatatcatcttcattgtggcataaaaacatgatcccactaatgtatgtaaatgacttaaactccatatcaaacatatacccaaaaataaccgagtacgaccaacatactcgtaatataacgattaagtttgtaaatttaaatggtgggggattcttaaatccaaaagagttgcatactaggattatattcaactctaaggttccttaa

SEQ ID NO: 317943 - DNA, 225 bp, Proteus mirabilis
  misc_feature (180)..(189): n is a, c, g, or t
atgacaccgatggacgcgcctatttttaattttatctatcttcgtcaaggcgctagcgaaaatactttccaacaagcaagtacgctgttctcctcgcaaaaaaaaggtcacatgctggttctgccggaatctctgttgcctgaatttgaagagataataaaaaaagcaggttatacgggnnnnnnnnnncggtatgacaaccgctatgtatctctcattgtctga

SEQ ID NO: 317944 - DNA, 492 bp, Proteus mirabilis; identical to SEQ ID NO: 303115

SEQ ID NO: 317945 - DNA, 762 bp, Proteus mirabilis
  misc_feature (739)..(748): n is a, c, g, or t
atggtgaatagtatgatatttgaactcaatcagttaaggcaagtcgtattattgacaatgagtattagtgtgttttctgcttatgctacagaattcaatatcgatgtgttagatgcagaagatatacaaaatatcgatatgagccaattttccattgctggctatgttccccctggtgattatgtattaacagtttttgttaatggacaacgtttaggtgcacctcgcgatatcacggttctagagcaaaaaacgcaaacacaagctatctgtatacctgctgacttacttgattctattggtttaaaagagtctgtaaaaccaaaagtgactgtataccctaatagtcaatgccttgatctttctgttttgaaaggaatgcaaacagttattgatctcccaacactatcactcaaaataacgatcccccaattatggatggaatatagagatccttattggactcctcctgcattatgggaagaaggaattaatggtgctttccttgattacagcgctaatgtttcaatcaccgaagaaaaagagggggataaacgtacttatttgtccactaatggtactgcgggtattaatttaggtgtttggcgctttcgtggtgattatagtgccatctatcaaaaaaagcggggtggcagacaatcacaagaaatacacgattttgattttagccgtctttatggttttacctccttgaaaaaattggcttcaattttaactnnnnnnnnnntcagatgtttttga

SEQ ID NO: 317946 - DNA, 468 bp, Proteus mirabilis
gtgtataagagacaggttgatgatgcatttgatcttgctaaagcatttgttagctcaataacatatggtatgactaaaagttcttatacccgtggaaaaattcaaatggttgatgctttattaagtgctttagtacgaggtgaaagtgttggccccgttcaagcaatttcagaggactataagcttcttgaattaaaaggtgtagttaaagttagtcaaggatcaaaaaaaggacgtacaggccctatgcttgagctccttaaaattgaggttggagagttagcccttcaagtaataaggcaaggtgatgtaagtgaacattcattaaaaaactttcccaccgcagcagtaacatctttcaatgggcctgaacaaaatagagaattaacccgaagaactcaaagaagattaagccctaaagcgaccaatgatatgctatctgtccttcggactggaggtggcttatga

SEQ ID NO: 317947 - DNA, 483 bp, Proteus mirabilis
ttggcagggaaagcaggaatattattatctgcaatttctgcaaataaagatacaaccttagataacaataagttatccgtgttagctacggctgcaaacatcaatttatcatttgaacttcccaaacttattgatgtattaaagaaacaacaacttatagatacagctactggtggtattgctgtattaggtgtaacaactacatctgcacttcaacacacatctgacctttttgatagcttaaaaccaaaagcaagcgaaatagcatctatttcgcttgcagaaagagcttcaatgtcacctatttttataaaggatgttgctacggaattagcagatacatataaactagcatcggaggaattaaaccaactatttacaaatgccgaacaaattggttttgttgattctgaaaagctagataataacaacaccttgctattcaatggtaatctatttcgccgagattcaacaaaaaaataa

SEQ ID NO: 317948 - DNA, 267 bp, Proteus mirabilis
atggtgaaatttctagggcttatttctttaacaatatgtaattggcagtctcaaacattagcggccaataatttagatgttgaatttagcggtgagttaatcagtgttgcatgccaagtcgcttcagaatcaataaataaaaaagttactttacacaatctacgttggcaatttattaatgaaaatgaaattagtaaagtgactcatttcacgattgcgattgaaatcattttcttattactaaaggggatagtggagcactattag

SEQ ID NO: 317949 - DNA, 138 bp, Proteus mirabilis; identical to SEQ ID NO: 306682

SEQ ID NO: 317950 - DNA, 270 bp, Proteus mirabilis
atgttagcgggtcaaaacctgaagtttcatgttgaaatcgttgcaattcgtgaagcgactgaagaagaattagctcacggtcacgtacacggtgaagaagaagagcacgaatgttgtggtggccacggtcacggtgaagaaggcggatgctgtggcggtggtcacggtcatggtcattcacacggtgaagaaggtggatgctgtggtggcgaaggtcatggtcacggtggtcacggccacggtcatggcggttgtggttgccagcactaa

SEQ ID NO: 317951 - DNA, 252 bp, Proteus mirabilis
atgagtaagcgaaaaaaatatttaattagctacgaatctctagatggagaaactcaaagttttgcttggaatcattatggagaagatgatatctatgtggctaatttaattattcgactaaaccttgttaatcgtgatgatgacatgatatttagagttgataaatattatgatgaagctaataacaagaattaccaagaattcactaaaaaagaaaaacaaaaagccaaagagcaatatcaatatcaataa

SEQ ID NO: 317952 - DNA, 165 bp, Proteus mirabilis
atgaccaagcaggaaactaaaaaactgtctcaaataatcgccagattagaaaaggctaatgagttttttgacgacgggcgaattcagcaaggaaaagacatttcagtggttgttgagaaagaattaaggtctttaattaagaagcagcaacgagcctcgcaatag

SEQ ID NO: 317953 - DNA, 768 bp, Proteus mirabilis
atgagaaaagaactatttgtatctggtgaaatgtttgatgcagaagattatccttttacattatttaaatggctgaccattaaaaagtttgctcagattgatacaaaaacaagcgttactacatacaacaagctatctcaaattggattggatgacagcgcgacattaaaagatattgggtttaacattccattaaatactctgctagttattgatgtttatgcaaacagaaaccaatcgctaccaacgccagaaattgtaaaaggtaaaagtcgatctggattgcttatagcaattaaagggcaagacaatacaaagtgtaatttcatctttatgaatgaaattattttttctcactgtacctataatacctattttacaccgccagttagcgaatggaaactattgacatctggcaacccaatacccatgacttcatatgaagttaatggcgctatagggaatatatcaatttcaggtgatttctattttgactctgcgcagtcatcatcactgagtgactcccctgaatctggaggtgtttttgtgtcagtaaaagtgacaaaaacagggacgatttttgaggtggtcagtaacacagctcttccaagaaagtatataaaacagaatgatggagcatggtgcaacgttcctatagtgggaaatcaaactccagatggtcagttgcgtgttggtgattctaaaattggaggcgatggttctttatatattaaaataaacaaagatagcgtaataaaattgcagtag

SEQ ID NO: 317954 - DNA, 1608 bp, Proteus mirabilis
atgataaaaagtaaaataccttttttatttatattggtgattttatcattcatagcgatatcaattcctgtatttaaactagatatgtggctaggtcatgatgtatccgctcattaccaaagagcacttagcgttaatgctgagctgtcaaattaccaaataccacctacatttgatttttttaataatggcaaattagggtatgcatggaatcttttttatccaccactaacttcaatattattttcattaataaacattatttctttaaactctattagtgttttactacaattaaaaatttcagctgttattatatctataatagcaatactatcatcttattacatgggagtttatttttataatcgcaaagatgctggatgcatatcatcaatattatttataacatcatcatactttttaaataattattatatccgtttttcaattggagagctgctatcacacgccttaataccgctaatgatagtaggtatatatgcatcaataaagaacgagaaacaaaaaatattattaccaataagctcatcattaattttattatctaacattccttctgtgattgtatgtattattgcatgtgctttaatatatttatttgaaataaaaaaagtgcttaataggaattttattctgtttgccttttacagtgtaattttcatagtgatgtcaacttcattttataccatacctcttatttatgagcaaaaaacagatgatatatgggctttttctaatataaacaatacattttatagaatgtgggagctagccccatcattatctgatcttcttactggagatgactcactttactcagacccatctaatcatgtaaggtctcataggacatacggaataccattaacaattttatttttcgttggtatatcattagtatataaaaaagaatatttaaaatctgcaatagcgtcagctataatattaactttaatggcctctaaatttttcccatggtatgcaattaatgacacatttaacatcattactttcattcaattcccatggcgaatattgatgttttcaagtactatatttgtgttaatttctacatatactatgctatacattctggataaaaaatcatatggtttatttatatcaataatattgacatcgatcatatacacaagctatataacaaacgtggcattaaacaaaaatgtaaatgaaaatagccctattctttctagaatatacaaagactacctacctaaagatggaaatatagacattatagaaagtaagaaaaaaacacaaaaccaagaaagtaacttatttgaaatatcatttaaaaatggatacccaatatactctataaaagaaaaaacaaatgaacttgagctgcctgtgataaaaaataatcttattgatatttatataaatggagaaaaaacgagtgatagtgcagatggttactttataaaggtatcatcatccgataacataatgacaatagaattaaggccttctataattttatacattggatatgccatatcaataatatcaattgtatcatcaatatttttcatatatataatctggagacgaaagaattaa

SEQ ID NO: 317955 - DNA, 390 bp, Proteus mirabilis
atgtctaaatcggcaaaaggtacgacagaacggcatggacggaacgtaaaagcgaaatctggtttaaaccgctcaatactggagcagggctggtatgaaatgcgccgtcagtttgagtacaagcagctctggcgaggtggtcaggtactggcaataccaccggcctacaccagtcagaagtgcgcttgctgtggtcatacagcaaaggaaaaccgccagtcacaaagtcaattcgagtgccttgaatgtggatatacagcgaatgctgatatcaacggggcacgtaacattttagcggcaggacatgccgtgctagcctgtggagggagggtgcagtcagaccgcccgtcgaagcaggaacccgccgaggtgattcagacatcagtctga

SEQ ID NO: 317956 - DNA, 720 bp, Proteus mirabilis; identical to SEQ ID NO: 49085

SEQ ID NO: 317957 - DNA, 1176 bp, Proteus mirabilis
ttgcgcttgttgagctttcttagcttttacccgagcaatagcagcagccacagcagctttacgcggatcggtttccacctcagctggagtttcagcgggtgtgtctacttttgcagttgcctgtgcttgttgagattttttagcttttacgcgagcaatagcagcagccacagcagctttacgtggatcggtttccacctcagccggagattcagcgggtgtgtctatttctgcagttgcttgcgcttgttgagcttttttagcttttacgcgggcaatagcagcagccacagcggctttgcgcggatcggtttccacttcagcctgagcctcagcaggagtgtctatttctgcagttgcttgcgcttgttgagctttcttagcttttacccgagcaatagcagcagcgacagccgctttacgcggatcggtttccacctcagctggagtttcagcgggtgtgtctacttttgcagttgcctgtgcttgttgagattttttagcttttacgcgagcaatagcagcagccacagcagctttacgtggatcggtttccacctcagccggagattcagcgggtgtgtctacttttgcggttgcttgcgtttgctgggattttttagcttttacccgagcaatagcagcagccacagcagctttacgcggatcgatttccagctcagcatcagcaggagtttcagtaggtgtgtctacttttgcggttgcttgcgcttgttgagccttcttagcttttacgcgggccaatgctgccgctacagcggctttgcgcggatcactttctgcatcggcggtggtatgggtattttgtggtacctgttgtgccaatttagcagcttgttttgctcgggcttcttctttacgttttttgcgtgcagcaatagccgctgcgttgtcaggttgttctcctgctttaacagcaataattttgccaatgccatgtttttcttttacacgagaaagtgcagattgcacttcattttgttggtgatcatcaagcttaactgcagcacgttgatgtcttgcctcacgttcgagcttttctcgttccatacggatttttttcgcttcaaagcgagccttagcttcagccgctcgcttagcttccgcatcaatttctcgtatttctgctttttcttggcggtaatattgcactaa

SEQ ID NO: 317958 - DNA, 465 bp, Proteus mirabilis
atggcagagactacgagcctagccaaacgattgaaagagcagaagcagcgcgacagcgcgattactcaagacctgatgaagcagcagctaaccgctatgcggcaagagttgaccagcacattgcaaagcgagctgagtaccatcaaggccgatatccaaggccagagccagagcatcggctggagcgcgttcaagagccgtattctttggccgaccctgacagggttgagcctttgcatcggcatcttgggcggcagttggggcgtgacgcaatacttgagcaatcgggcgatggtcttgagcgagcaggtgcggcagggcaaaacagccttagaacagctacccaagggctggacgttcgccaaggacatggaagcggaatacatcgtgctggacagcaagaaaaagcccacggtaaacgtctaccagagcaagggcggcgattgggtaatcagggtgaaatag

SEQ ID NO: 317959 - DNA, 291 bp, Proteus mirabilis
atgcgccgtcagtttgagtacaagcagctctggcgaggtggtcaggtactggcaataccccctgcctacaccagtcagaagtgcgcttgctgtggtcatacagcaaaggaaaaccgcccgtcacaaagtcaattcgagtgccttgaatgtggatatacagcgaatgctgatatcaacggggcacgtaacattttagcggcaggacatgccgtgcttgccagtggagggagggtgcagtcagaccgcccgtcgaagcaggaacccgccgaggtgattcagagatcagtctga

SEQ ID NO: 317960 - DNA, 462 bp, Proteus mirabilis
ttgccattaatcatcactctttctactaagaaaaaaccatatttaacaaaaatagtttttgaaaaatggttacaaaaagaatttattttacaatatggtatattattaccagatattgtgattcactattcagataaaatagatgacgataaaattattattttaattaacgaagttaaagcaaaagaacttaattgtccttttcctctttttcatatagaaaatcctaatgatgaattgctctctttaggctttaacttaataagtattgaagatgataataaaacccattattggattgagcgtgatgatgaatctaaattagcgccattaggttacaaagcggaacgttcagaaagttacttttatagaaaattctctgatctgatcacattaaatatttttccatttgttctggagatatcattttcttggtattcaagaaacaaaagatatccttga

SEQ ID NO: 317961 - DNA, 186 bp, Proteus mirabilis
atgaactttgtgggaaaattttcttttgaagaacatggtcagaaaagttttaaattaataatttttcgtaagaaggaggactttccagatgaagaaaaaagtaagtttggattaatgaagttcagttattgttcagattgtcagcaatatagcattagaatattactacaaaagtttacatactga

SEQ ID NO: 317962 - DNA, 420 bp, Proteus mirabilis
  misc_feature (189)..(198): n is a, c, g, or t
atgtttacttcatccaaagtggcgatacaggtacaaagcgtttacattgagagccaatcttcgccagaagaacagcgctatgtttttgcttataccatcaccatacataacttgaataaacatgctattcgcctcctacgtcgctattggttgatcaccaatgcacaaggaaataccactgaagttcannnnnnnnnnaccacggcacagacagaatacgaatatttctactttaaaaaagtctatggtgaacaacctctgattgaagctggctcacggtatcgttataccagtggcgcagttcttgaaacgccgatgggcaccatggaaggtcattatgaaatgattgacgcacaaggacgtctgtttcaaattgacatccctgttttccgccttgctatccctacattgataaattaa

SEQ ID NO: 317963 - DNA, 348 bp, Proteus mirabilis; identical to SEQ ID NO: 297686

SEQ ID NO: 317964 - DNA, 393 bp, Proteus mirabilis
atggaaaaaatttgccagaatgcgcagcgtattgcgcaatttcttgaaaatcatcctaaggtggcaacgatttcatatcccggattaaactcttttcctcaatatgaacttgccaaaaagcagatggcgttacctggtggcatgataagtatggagttgaatggtggaataaaagctggcagagaatttcttaatcgcttaatgctttttactcgagcggtgagtttaggtgattgtgaatcattggctcagcatcctgcgactatgactcatgcgacatacagtgcacaagagcgtcaacgccatggtattagtgatggattaattcgtttatcaatcggtcttgaagacgttgatgatttaattgctgatttaacccaagcgctagcctaa

SEQ ID NO: 317965 - DNA, 435 bp, Proteus mirabilis
gtggtgaccattccagaagccactgatggagtaaatgctgacgagctaaaagatggcgtacagactgaagtgactgtaccgggaggtagtgcagcaggtgacacactgacactcactattaccaaaccagatggatcaaccgacactgttgaacacacactgactgcagatgaagtgacggcaggtaaagccgatgtgacaatccccgcagataaagtgacagcagatggtaactattctgttaccgcagaaattactgatccggcgggtaataccagtggtcagggtaaacctactgactttatggttgatacgcaaattccgggcgatacagatggtgatggtgtggtggatacaacacctgtagtgaccattccagaagctacggacggggtaaatgctgacgagctaaagatggcgtacagaccgaagtga

SEQ ID NO: 317966 - DNA, 423 bp, Proteus mirabilis; identical to SEQ ID NO: 308403

SEQ ID NO: 317967 - DNA, 366 bp, Proteus mirabilis
atgcgagtacttcataccatgatccgtgtaggcgatttacaacgctctatcgatttttataccaaagttttaggtatgcaacttctacgcaccagtgagaatgaggaatataaatactcgttggcttttgttggctatggtgatgaaagtagcggtgctgttattgaattaacctataactggggtgtgactagctacgaaatggggactgcatttggccatgttgcattaggggttgatgatgtagctgcaacttgtgaggctatccgtcaagcggggggtaacgttacccgtgaagcaggccctgttaaaggtggtacaacaattatcgccaacaaaagtgccagtcaagctctgggtaactaa

SEQ ID NO: 317968 - DNA, 183 bp, Proteus mirabilis
atgaattataaagaatttgcaaaacaaattctcgctattgttggtggcgaggataatataaagtcattagtacactgctcgactcgattacgttttacattacataatgaagataaaattgatccttcaaaagccaaagcaaatagtaaaatattatctgatgtgatgaagggaggacaatag

SEQ ID NO: 317969 - DNA, 447 bp, Proteus mirabilis
gtgctcgacaatatccgtttaacgcaaccatcagcctcattagatgatgttattcatgtagctaaattagcaggtgctcatgagtttattttaaaacttcctttagggtacgacacactcattgctgaaaatggcagatctttatctgggggacaatgccaacgtattgcaattgccagagccttactctcatctcctaaaattttaatttttgatgaagctaccagcgcattggatggtgagtctcaagccatcatcgaaaaaaatcttccccttattacccaagataagaccgtcattatgattgctcatcgcctttccacaataaaaaactgtgaccgcattattgtattagaaaaaggccagataatcgaagaaggcaaacataatgaattgattagaaaagatggcgcttataagaaactttggcaacatcaacaaggataa

SEQ ID NO: 317970 - DNA, 1296 bp, Proteus mirabilis
  misc_feature (1272)..(1281): n is a, c, g, or t
atggagacatggaataaagagagattaataaataacagtataaatcactattactatctggactttgcagaaaagcatttttttgatatcacttggtttgtcccaacctttatgaaatatcgtatattatttcaaagtgtattattttactcgttaattcttcaactgctagcacttgcctcgccgattattacgcaaataattatggataaggtaattatccatcaagccctatccacgcttgatgtgttaataataggtcttatttttgtcgccgtttcagaatctgtattaaaggggataagagagtatatttatcatcatacagcaaataaaattgatatgttgctaagtttgaaattaactaaccatttattcaaacttcctatcagttattttaaatctcgccaaacaggtattattgttacacgagtaaaagagcttgatatcattcgagagtttataacaaaaaccttattaatgttattggttgatttctcatttatctttattttcctatttgttatggcttatttgtcattaaagttaacattaatctttcttgccaccatcccactctattttatcttagctaaattaattgcccctaaaatagaaaaaaccgtacaacagctttatcaatattcagcaacaaatagtgcttttttaacagaaacgctaggaggtatagaaacaataaaaagcctttcattagaaccacgttttacacaacagtggcatacgcaaattcatcaactgactaatgaaaatttaaaattacaaaatattgataacttatcgcaatacattgtttcatttttacaaaaaataacgacagcgatacttttatgtctaggtgcttttgaagtcatttcacttgcaatgacaataggtcaactcattgcttttaatatgctattaaaccactgtctacaacctttaagttctgcaatagaagtttggggaaagtatatccgagccaaaacggctatttataatttacaagacattcttaatctcccaatagagcaagaaaaagccaataagaaaatgaccttacaaggtgaagtgagttttgagaatgtcagttttagttatcaacatgatgccccccctgttgtaaggcaaatttcatttagaataaatgaatatgaaactattggtatcgttgggacgtctggatcagggaaaagtacattagcacgcatcatcgcagggctttatatcccacaattaggtcaggttaagcttgatgacattccggtttgtgannnnnnnnnntacgtcaacaaatag

SEQ ID NO: 317971 - DNA, 285 bp, Proteus mirabilis
atgttagcaaaggctaaaggtgcgccagcaatatttgccgtaccacagtcaggccccatgactatcaatccgttagcggcggctttttcttttaatgctttttcatcagcaatagagacgttatcggaaaatagcatcacattacagccatcttctaatcccgtatcagctaattctgccgcatactcaccggcaatagaaataagcaacatattagcgttaggacttttttgtttagccgtacgccagctacgtacagtggttaatttattaccacttttttga

SEQ ID NO: 317972 - DNA, 444 bp, Proteus mirabilis
atgaatgcttacaatttaggttcacaacttcctgaggtttggaattttggtttatttactattgagaaagtaggttatcaagcccaagtgatcccttcgattttagcgggactatttctgggatggtttgagactaaattacgtcgttttatccctgattacctaaaattagttattgtgccgattgtaactcttattgtcgccgtttttgttgcccatgttattttaggccctatcggtagaagcataggtgatggtctcgcccaactgatcaaatttttaatgttaggtgattttgcccctattggttcaactatttttgcctttttctattcccccatggtgatcaccggcttacatcacacaacgttagcgatagatttacaaatgactcaaagttatggcggtacacctatttggccgattatcgcttctttttgttga

SEQ ID NO: 317973 - DNA, 261 bp, Proteus mirabilis
atgtatggcgtcaacttaaaatatggctttcctatgctgtgcgccatgattggcgctgcgctagcgggtttgatttgtggattaaataatgtgctatctaatggtattggtgtcggcggattacccggtattttatctatccaacctacttattggttagtttatttattagcaatgattgtggctattgtcgtccctattggattaaccattctggtctatcgctataaagaaaaagcaggcaccttgcaagtcgattaa

SEQ ID NO: 317974 - DNA, 162 bp, Proteus mirabilis; identical to SEQ ID NO: 313312

SEQ ID NO: 317975 - DNA, 312 bp, Proteus mirabilis; identical to SEQ ID NO: 317745

SEQ ID NO: 317976 - DNA, 1092 bp, Proteus mirabilis
atgtcaataaaaaaaatagttatagttggtattgaattgcaaggcttaggaggcatggaagttgtttttaataaattaaatgatttattaaaagagtactatccaaatattagcctatctataattcttctaaaagaaagagatatatgtattaatgaaaattggcataaaaatctaaatgtaagatttatcaggtgtaaaataagaaatcataagataagacgatttatgttctcatgtaaattatcaggtatcttaagaaaagacaacccagatattattattgcatcagatgttattggttgttatatagcaaatttagcctctaagttttcattgagaaatattcctgttttttcttggatacatacatcattatggacagcatataaagcagtatatactttaaatgtaaattatcatataccaattagctcgggtaataaaaaatacttattaaatcataatgtaccagaatctcatattaatgtagtttataatcccgttgatagaacagataaaattattcatcgtccatcaaataagattaagtttctttatattgggagactattgtctaaagaaagtaaaaatcttgaatttatgttctatgcattaggtaaacttaagggagattgggaactacacttagtgggggatggcaaagatagaagtaaacttttttctctcgcccaaaaactacatattgataaaaaggttatttttcatggttggcaagataatgcttgggattatgtattaaatcatattaaagaagtcacggcttgtttattgacatctactcatgaaggacttcccatggtcttaattgaggctcaatcttatgggatctattgtgttagctctgactgtttaaccgggccttctgatattattgatggagataatggacaattattccctgttaatgatgaattatcatttttaaaaatattaaatgatatcatcaatggtagattagatttacctgaatacagcaaaataaaaaaatcgattaaaaaattttatggagatgtctacataaaaaacatgatagatttttttgaaaagaagagtaaaaaaatacaatga

SEQ ID NO: 317977 - DNA, 150 bp, Proteus mirabilis
atggaagcacgtgttaaatgggttgaagatttatcttttgttggcgaatcatcttccggccatcaagttatgatggatggtaattcaggtgataaagcgcctagtccgatggaaatggcatcgggtaacgcttctgctgctgcaatttga

SEQ ID NO: 317978 - DNA, 699 bp, Proteus mirabilis
ttgaagcagtgtttttggggaaatggggataagtattttgcggggggaaaaaaactgaaagaagatcaaatcatatcacgttcttctcaaaagaaagaacagttagattattatgtagaatatgcagagttatttaaagaatattatcaaattgaattgcaagagtttgctaatgttttctttacctctaacctacaagtaaaggcgatcccaaaattaaaagcggatatgaggccagcccacccttatgcagcttcttatattattcagtatcaatttacattaggtaattttcaatatggtatttcggaacttgagtatcaattggttgaaaagaaagttttagaatttatcccacctggaatacctatcaagaatttaccgaagcgaggtgagttagttgtaaaataccgaggaagtgaatatttcgagtcacagcaaattaaatttaatactgcgtttgaagaggcactacaacaggctttagtcagaaagaaaccgcatgatggtgagtttgtgctgagttttgaagtggatgcaggtatgtttataggtaatccagtggggaaatcgataccctctatctattggtattacattgtagatcgcattaaaggcgaaattgcaccactacgttaccgaaacagcaaccccgacgataaaatatatggctgtattgatgaggaaggcacggaatga

SEQ ID NO: 317979 - DNA, 1164 bp, Proteus mirabilis
atgtatttggctgatatttatcttgatagtttagtagagaatgagccaaaccagtctgcgcgaatactcccaattttagctgaaataggtcgcatgatcaatgaactgaaaaactgtaatggtatagacattaagttaaacgaccttttgataaaaaaaagtaaccaaccagacacactattatttgaattactagtcgcatgttgctatataagaaatgggtggaatgtaaagtttattccagaaacaccaaaagaaaaaacaccagatttattaattagaaaaaatgattcacattactttgtagaatgtaaaagactcaacaaagtcactgattactcggaaaaagaaagaaatgaatggctaaagcattggaaatatatttcgcctacaatgttaaattttaatgaatccttaatacttgatatagtatttttaaatgaagtggaaaaagtaaaaactactgacatttgtaattcattgtctaatttaattaacaatttctctaaggacagaaatataaaatatttatcacatacagatttcatccttaaaataaatataattgatataagtaagataaaattacatttagatgataataatgtgaaaattccgtcgccattaattttttcattaattgatccagattatagcactgatgctaattatacttttataggagatataactctctgtaagctttatgaaaaggatgatcacgataaagaaaacagggtactaaatacctttttagatagtgtacgaaaaattgcttgtgcaaaatgggaatgtatatcaaatatttctttagataagaaagctagagatataaaaaatttacttagcaaagcaactgaacaagcccctgaggatgcaactacaattattcatcttggatatgaaacattacatggtcccactatagaaaaaattcgagagcagaaaatcaaagcaactataagtaaatttgattttggaacaaaagaaattggaatcatatatttacatgcactccaagcgatatgccctcctaatgagaaattcgattttgttgaaacaactcaatggttggcaaaagatcagtacaaagatattattttagctgatgacttattaataaatttttcagatagcaataagcaaaacaagacccattggtga

SEQ ID NO: 317980 - DNA, 1125 bp, Proteus mirabilis
atgaattcagaaagcccaattaagcatgtccgctgggcaatcatgtgttcggtaatcggatttgcattaacaggctgtgccgacacgccttatcgtcctgcaccgataacctctgtcaatgatagttcgtcaaatcgtaccgtttctacatcacctgttacaactaacagtaatgcaggagtggcaacacctattgaaagaggttcaactccgttacaaacaacgcctcctccttctattagagtgaataacacaaccgcgcagcctcaaagccagcctcgtacgcaaaatgttaccccccaaaatgttaatacggatggtagcggacgcattgtgtataaccgcaattatgacaatatccctaaagggaattacagcggtaacacttatacggttaaacgtggcgatacaatgttttatattgcgtggatcacggatagtgatgtaaaagatttggcctcgatgaacaatattccagagccatatagcttaaatgttggacaagtacttaagattggtaatcgtcaagttaataccggtaccaataccaatgtaaatacttcggtaattaataaaccaagtagtgaaggtgttcagacagcacaaactaagccgtcaaataataatagctcaatgggaccgttgatcacgaaaccaacaacaacgacaccgccaaagacaacgacttcgacaccaacaacttcggcaacaaccagtaataacacagcggcaacctctaaacctgcagccgcaacaggtaaatgggtatggccagcacaaggtaaaattattgagagctactcaaatgcacctggtggtaataaaggtattgatattagtggtacacgaggttcacctattgtggcaacagccgctggtaaagtggtttatgcagggagcgcattacgaggttatggtaatttagttatcattaaacataatgatgaatatctcagtgcttatgctcataacgatacaatcttggtacgtgaacagcaaaatgtaaatgcaggacagcaaattgcgaccatgggaagtactggtactagttctgttcgattacactttgagatccgttataaagaaaaatcacttaacccaatgagctatttacctaaaagataa

SEQ ID NO: 317981 - DNA, 321 bp, Proteus mirabilis; identical to SEQ ID NO: 314950

SEQ ID NO: 317982 - DNA, 615 bp, Proteus mirabilis
gtgacgatacatcaagatattgtctggcatcctcatcaaatagggttaaaagagcgtgaagcacaacaggtacacaaaggatgtgtactttggtttactgggttatctggctcaggtaaatcaacactggctgatgcgctagagcaaaccttatatcagtactcgacactccatgcgcctatccgcacctatttattagatggtgataatctacgccatggtttatgccatgatcttgggtttagtgaacaagataggcatgaaaatattcgccgtgtaggggaagtggctaaactaatggttgatgccggattaattgtcttaacagcatttatttctccttatcagcaagatagacaacaagtaagagaaaggtttgctcaagggcgatttattgagatctttgttgatacacctttagccctttgtgaagcacgtgatcctaaaggcctctatcaaaaagcacgacgaggagagatcaaacagttttccggcattgattcaccttatgaacgacccattgcgccagaaattcatttagacggctcactggcgattaatgagcttacacaacaaatcctcgcttatttacagcaacaacaaatttaccgctaa

SEQ ID NO: 317983 - DNA, 294 bp, Proteus mirabilis
gtgccgctctattttgctaaacaccgtccagttattgagcgggatggtaccttgattatggttgacgatgatcgaatagacctaaaagctggagaggtgatcacacaacaaaaagtacgttttagaacattaggttgctggccattaacgggtgctattccttcacaagcagacacattacccgccattattgaagagatgttaatttccaccagtagcgagcgacaagggcgtttaattgacagtgatcagtctgcttcaatggaacttaaaaaacgtcagggttatttttaa

SEQ ID NO: 317984 - DNA, 576 bp, Proteus mirabilis
atgaatgaaacacaattaactcatcttcagcaattagaagcagaaagcatttatatattgcgtgaagttgtcgctgaatttgaaaatcccgtcatgctttactcaataggcaaagattcttcggtgatgttgcatctagcacgtaaggctttttatccggcgaaattaccttttcctcttttacatgttgatacgggttggaaatttcgtgagatgtatgagtttcgtgataaaacggccaaagagtatggttttgatctcaaagtttatcgtaatccccaaggggcacaattggggatcaatccctttattcatggtagcgccaagcatacagatatcatgaaaacagaaggtcttaagcaagctctggataaatatggttttgatgccgcatttggtggggcgcgtcgtgatgaagaaaaatcgcgtgctaaagagcgtatttactcatttagagatagatctcatcgttgggatccgaaaaatcaacgtccagaattatggcaaaactacatggccaaattaataaaggggaaagtattcgcgtttttccattatcaaattggacggagctag

SEQ ID NO: 317985 - DNA, 1422 bp, Proteus mirabilis
atggattacctacccttatttgtggaattaaaacagcgcccagtattactggttggcggtgggcatgtcgctgcgcgtaaagccgtactgttattaaaagcgggcgctcggttacgtgttatcgcgccacagttatgtgatgaattgcatcttgcttatcagcaaaatcaaattgagtggattgcagggcaatatcagtcagagtatttacttggcatgatgttggtgatcgtggcaacagacgataaggtattaaatcaacaagtgtatctagatgcgcaagcacgccacatttttgtcaatgtcgtcgactctcaaccccaatgctcttttatctttcctgccattatcgatagaaatccgatattaattgccatttcatcagcgggcaaagcccctgttttagttcgtatgatacgggaaaagctagaggcattattgcctacctcattagggactatggcgactattgcggggaaatggcgcaataaagtgaaacaaaaactgactggttttcaagcacgttgccgcttttgggagcaagcgtttagcggcaaatttgcctcattagtggcaagtggtcaattaatacaagcgcaagcacagctcgaacaacaactgtctcatccagatagcccacaaggtgagcttgctttagtgggagctgggccgggtgatgccgggttattaaccttacgaggtttgcaagttatccagcaggccgaggtggtactttatgacagtttagtcagtgcagacatcttagaactggtacgccgtgatgctgatagaatttgtgtgggtaaaagagcggggcaacacagtacgttgcaagaagaaatcaatcaattgatcgtgaaatatactcagcttggtaaacgagttgtcagactaaaagggggcgatccttttatttttggacgcggaggagaagagcttgaaattgcggtacaacatggcattccttttcaagttgttcccggtgttaccgcagctagtggggccagtgcttatgcgggtattccattaactcatcgtaaatatgcgcaaagtgtcacttttatgactgggcattgccaatcaggggggatagagccagattggcaagctttagcgcaagctaatcatacgttagcaatttatatgggaacgacgaaagcagaacttattagccagcgtttaatagagcaaggtcgttcaccactcacccctattgccgtcattagttgcggtacacgccatgatcaacagatcttaacgggaaatttaacacaattagcgcaattagctaagcaagctcccaccccggcattattaatcgttggagaagttgctgcattacatcaccaacttgcgtggtttggtgatagacaaactcaacatacctctgccatccactcatctttggttcattttgcctaa

SEQ ID NO: 317986 - DNA, 1731 bp, Proteus mirabilis
atgaaatcacaaactcaagcgcccttagtggttgaaggaaaactatctgatagtgaacgtatgaaaaaagagagtaatttcttacgaggcactattagtgatgatttacaaaatggtctaaccggtggttttgagggcgataattttttattaattcgttttcacggtatgtaccaacaagatgatagagatattcgtgccgagcgtgcccaacagctactagagcctcgtcatgccatgatgttacgttgtcgtttaccgggcggtgtcatcaccccaaagcagtggctaagtatcgataagtttgccagtgaaaatacgctctatggcagtattcgtattactaatcgtcaaacttttcaatttcatggcattttaaaaggtcatgttaaaccggctcaccaaatgctagcgtcaacaggccttgatgctcttgcaaccgccaatgatgtcaatcgaaatgtgctatgtacctcaaaccctgaacaatcttcattgcatcaagaagcttatgaatgggccaaaaaactatccgagtatttattgccacgcacccatgcctatgcagaaatttggttagataaagagaaagtggcgacaacggatgaggagcctattttaggtgaaacctatttacctcggaaatttaaaacatcggtggtgatccccccttataacgatgttgacttgcatgccaatgacatgaattttattgccatcgcagaaaatgggcatttggttggttttaatgtgctagtcggtggcggccttgcgatgacccatggtgataaaaaaacctttccgcgtttagctagtgaatttggttatattcctattgataaaacattagcagtcgctgaagcgattgtgacgacgcaacgagattggggcaatcgtactgaacgtaaaaatgctaaaaccaaatacaccttagagcgcgttggcattgaaacatttaaacaggaagttgaacgccgctcaggcgttatgtttgatatgatccgaccgtatcaatttactcaccgtggtgatcaaattggttggttaaaaggggttgataacaaatggtatctaaccttatttattgaaagtggtcgattaatcgataaacctaatgcgccgttaaaaacgggggttgctgaaattgccaaagtgcatcttggtgactttcgtttaacagctaatcaaaatttgattgttgctggtgtaccagaggcacagaaagagcagattgaggcgatagcgcgtcaatatggtttaattaatgatgaggttacaccgctgcgtaaacatgccatggcgtgtgtttcatttccaacttgcccattagccatggcagaagcggagcgtttccttcccgcatttaccgatacccttgataatatcatggctaaatacggagtcagtgatgagcatattgttgtacgtgtaacagggtgtcctaacggttgtggtcgtgcgatgttggcggaagtcggactggtgggtaaagcccccgatcgctataacttacatctaggaggaaaccgcattggtactcgcattcctagaatgtatcgtgaaaatatttcatcacaagaaatcattgaaattcttgatactttaattagtcagtgggctatttcacgtgaattaaatgaaggttttggtgattttcttattcgcactgatgttatcaaacccgttgttaattcagccattgatttttatgaagtgcaggaggtgatatga

SEQ ID NO: 317987 - DNA, 330 bp, Proteus mirabilis
atgagtgaaaataatttaagcccaaatgaaaaaccgttgttatctaatgaagataaaattcatttagaacatttactagaaaaaataaggcctttattagcattaaagcgcctagataatattgttgatttattatctttagcctcagataccgtcgatattatggataacgcaacggtagaaaaattggcggttgcttttgaagaaacattaattccggtttgggaattaactacggcctttaatatggctaaaaaagaatctctttatcaggataaaaaatataccttaggtgcgactttttcattattaaaaatcctgacaccttaa

SEQ ID NO: 317988 - DNA, 321 bp, Proteus mirabilis
atgccaaactggtgctcgaaccgacttgacatcaccttacacaacgcggcggatatgccggctcttaaacactggatatatgcggatgatgggatacccgcctggcagacggcgatagcacaaagtctgcatttgttgctggccggctgcgcggggatactgaaaccggtcagaccgctgtcttttccgccgttaccggaactgacttcatacggtgcaaccgggcctgtttccccgggaaacacggctttcacgcactgggttgacctgctgatgactgcaccggatttgacaccgtcatgttgtcagcaaatccattag

SEQ ID NO: 317989 - DNA, 369 bp, Proteus mirabilis
  misc_feature (351)..(360): n is a, c, g, or t
atgaccttattagaaacgacagttaaagaatgtctaaacaatgtagtgaagcaatatgcgtcacaaacggccttaattgaaaaccaaagtaaaaaaacactgtcttggcaacaattacaacaagaagtcgagagtgttgcgcgtggctttttatccatggggttaacaaaaggcgatcgtttaggtatctggtctgctaatagtaaagaatggataatttgttttcttgcagctgctcaaattggtattccggttgtttgtattaactttcatttaaaaaaaagagagttattagatttatgccgattaactggaattaaagcactctgtttttctgatggttttaaaagnnnnnnnnnnttttattga

SEQ ID NO: 317990 - DNA, 285 bp, Proteus mirabilis
  misc_feature (240)..(249): n is a, c, g, or t
atgactttcgacatttttttatcattagccatattttcatttgttacttcaattacaccaggcccgaataatattatgcttctagcatcaggtattaactttggcttaaagcgtacaatgcctcatgctatcggtgtgtctctcggtttttttgtgatgttattggctgtggggataggcataggagcacttattaaatcatcgcctattatttacaatatattaaaatatctcggagcnnnnnnnnnngtatttattgtggttagcttggaaaacggcaattag

SEQ ID NO: 317991 - DNA, 531 bp, Proteus mirabilis
atgtatggtcttgaaatttttcctgttgaaggcggtaaaccttaccgtttaacgcgtgatacgcaaattctctgttatttaacctcttatcagatagggccagaagattggccccattatcgacaaccgaaaaaaacacggagcaaagtcattcatgaagccatggggtatgaggcgttcgccatcccgagagtggcttctgtgtatatggcggtgaatgattatgcgtattttcagggaataacgcatatccgaatggaaggacctgtattacgttatgagtatgtttatgacaatgttcaggttcaagacccacagatggccaaaagagccaatatggtggtcgatatttatggtatcccgttaccggatagtacaaaaccaacgtatggtgtggagtggtatggcgcctttcagggatttcgaagtgcgattacacgtaatacacaaatggcttattgtgtgtttcgacaaaaatccaccttaaaggcgggcgctattggtctttgccgacaatattatcgcatttag

SEQ ID NO: 317992 - DNA, 261 bp, Proteus mirabilis; identical to SEQ ID NO: 299232

SEQ ID NO: 317993 - DNA, 1968 bp, Proteus mirabilis
atgaaaacttttatctgtgtatttgagcctacgaccgaggctcgtacaaacaacggtgctgtaccgctggccatagcgttaaacaccgctaatgtaaaactggcaacagcgactgcagtagtaaaattatctgaagcatatccagaagctatggataactttaacactgatgatccgttaattagcgaacaccttgacggctctgtttgccctactttagatatattcgatgagaaatttgctgttgaaaatgagtttgatggaactcaatggaaacctattgaatataagaatttcaaaaaactaggaacgaagcccagaattgcgtgtttacttttatttggaaagactcaaataactaacaatgaattttcaactgctctggaatatttggcaggaaaagaagatcccaaaattcgtaatatcgctacaggcctagctgaaataacaaaactttctttgatggatgctgagcaaacaatggaaatagcacaggctatctatgagtttgctaatgaagatgtcaccgttgaagaagctaaatcaatgggtgaaagttggctaacagaagaaccagaacaacaacaagaagaaacatcttctatcaagcgtaactattcaaccatagatactgaaatcgccttagcactgttagatgactttgatcctaataatgtcctcgcatctcaagtaaaaaaagccaaagaactgatagatgacgacgacaaagcatggaaacgctggtcaatggatttacgcacaacagctggcatcttggatataccacgtgaaaagattttctcgttaatagctgaaagtaaaaaacagcctgagttattagataatcccaatgcgcgaaaagaatttattgaccttcatttagatattaacaagcctactggcaacgctgaaaaagaagaaagtatcacttctaaccaattggataataccccttcggtatctagcaaaagtaccgttgaaaaggaaactaagcctaaacgttcacgtaaaaagcaagaagtagcccctaaaacagaaagttctccggtggttgaacaaactgtagagcctaaagaacccgaaacaccatcagcacaacaagataattttgagcaacgtgccagtgttattgatgaagttcttaacgcgagtgacgctaataacctaagtatttggaaacaagtacaacgtacagacccgcgctttactaagccattagaaggcgtgggatttacggggaccagtataaacagcacttacatgtttatgcgtgcaactgaaatattcggtcctattggtgaaggttggggatatgaagtccttgaagaaaaatttattgatggaaagcctcttttagaacctgttcttgatgaacgtaataaacaagttgcaacccgttttttacgtgatgctgatggctcgttattctgcgaacaaaaccactcaattaagatccgtttttggtacatcatcgaatgtgaaacccgcggtgagtttgaaagttatggtgcaacaccataccgctatcaaactaactatggcattaaggttgacggtgaagttattaaaaaatcactcactgatgccatcaaaaaagccctatcaatgcttggctttagctctgatgtctttatgggtatgcatgataaccctgaatatatagtaagcaataagcttgagtttgaaatcaaaaatgccagtgaaaaagcggaagatatcacacgtattcgaaaagaattagacgagaaatttactaaacatacagaagtgatgcgtagtgctgttacagcaaatgaattacgaggtattgcatcgacattaacacgcgaaatttctgcacacattaaatcagctcaagaacgtcgtgacgaagattacgagaagtatttgtccggccgtttacgtcgattaaaccaaatcgaaaaagagtgtttagacaaactgaaacagaaagaagaggcaatctaa

SEQ ID NO: 317994 - DNA, 198 bp, Proteus mirabilis
atggcagccactcgcattgaaaaagactcaatgggacaaatcgaagtaccagctgaccagttatggggagctcaaacgcagcgttctctagaacacttccgtatttcagtagaaaaaatgcctgttgcactgatccacgcgcttgctttaaccaaaaccaatttgttggattgtttaagggtagcaaaacaatcttaa

SEQ ID NO: 317995 - DNA, 726 bp, Proteus mirabilis; identical to SEQ ID NO: 300214

SEQ ID NO: 317996 - DNA, 870 bp, Proteus mirabilis
atgaaagcccatcaacagcaaacggcctattttggcgcaacggtagggcgttttgctaatcgtattgcaggggctaaattcaccatcgccggaactgagtatcgccttgttgctaatgaaggcaacaatacgctacatggtggtaaacaaaattttagccatcgtcgctggactattgtggcgcaatccacacagtcggtcactttaagcttgcaatctgcagatggcgaacaaggatttcctggtaccgtcgaagccagtgtgacatatacattaacggatgataatgaagttcatatcaattatcaggctattagtgataaaacgacagcgttgagtttaactaatcatgcctattttaatttagctggggagcatactcagcgaacggctcttgaacatgatttagttatccacgcttctcactacttaaaaaatggtgcgggtaatattcctacaggggaaattgtcgatgtgactgggacgggattcgattttcgccaattaaaacgtattggcatcgattttatgcgagatgaatgtcaaaaagccgctaatggctatgatcatgcgtttattttagacaaacaaaaaatagcagataaagcatcgattgccacagttattgcccctgaaggtgagcttaaaatggatgtttttactaccatgccttctatacagttttatacaggaaattttttggcacagagtaaaggaaaaactcgtcgttatggtaattattcggggctggctttagagacacaatattttcctgatgggccgaatcatcctgaatggggtgagaaccaaggtattttagctgcaaatactccgtggcatagccaaacaatatataaattttatcagtaa

SEQ ID NO: 317997 - DNA, 1476 bp, Proteus mirabilis
atggcagcgatatcgactgctcaggcctgtgatctggttatcttcggtactaaaggggatcttgcccgtcgtaagttaattccatcactttatcaactggaaaaggcaggatatattcaccctgatacacgtatcatcggtgttggtcgtgctgattgggatgtagctgcttatacaaatgttgcccatgaagcattacaaacttttttaaaagaagagattaaccctgaaatttggcaacgtttaagtgctcgtctcgatttttgtaatcttgatgtcaatgaaactgaccactttattgagttagcaaaacatctaaaacaagacaaattaccggcgatttactattttgcaatgccaccaagtactttcagtgcgatgtgtaaaggtttgggacatgctaaattaaataaagagccaaaccgtgtggttatggaaaaaccactaggaacagatttagcgtcttcagtttctattaatgatagtgtggcgaaatactttaaagagagtcaaatttatcgtattgaccactacttgggtaaagaaaccgttttaaacttattggctttacgttttgctaactccttatttgttaataattgggataacaaaacgatagatcatgtccaaatcacggtggcagaagaagttggtattgaaggacgttgggggtatttcgatcaagcgggtcaaatgcgtgatatggtgcaaaatcacctattacaaattttgacgatgatcgccatgtcaccacctgctgatttaacggctgatagtatccgccaagaaaaagtgaaagtgctgcgctcattacgtcgtattgatatgactaatgtccgtgaaaaaacggttcgtgggcaatatacggccggttttgtacaaggtaaaaaagtaccgggctatctggatgaagagggtgccaataaagccagtaatacagagacctttgttgcaattcgtgctgatattgataactggcgttgggcgggtgtacccttctatttaagaaccggtaagcgtatgccaagtaaatgctcggaagtggtggtctattttaaaaaacccgctctgaatattttcagtgaaacctatcaagagttaccacaaaataaactcactattcgtttacagcctgatgaaggtattgatattgaagtgctaaataaagcaccaggtcttgatcataaacaccgcttacaaaccactaaattagacttaagtttttccgaaacttttaatcaaactcatttagctgatgcttatgagcggttgttgcttgaggcaatgcggggtattcaagcgctatttgtccgccgtgatgaagtagaagaagcatggaaatgggtcgattcaattattaatgcatgggaatgcgataatgaattacctaagccataccaagcaggaacatggggaccggttgcatctgttgcaatgatcactcgtgatggccgctcttggaatgaaattgagtag

SEQ ID NO: 317998 - DNA, 435 bp, Proteus mirabilis
atgaaagccacctcagaagaagtccaagtttttattgcagtggttgaaagtggtagttttacacgtgctgcagaaaaattagcattagccaattctgctgttagtcgtacagtaaaaaaacttgagtcaaagctaggcgttaatttattaaatcggactacgcgacaattgagtttaacggaagagggggagcattactttcatcgtatgcaaattatcttgcaagatatgaaattagctgaagatgaattaattaatacacaaaaaacaccacagggtctattacgtattgatgccgcaacgccggttgttttgcatctactggtgccttttattaaacaatttcagcaaaaatatcctcaaataaccctctctttagtttcatctgaaacatttattaatcttattgaacgtaaagtagagtcggtaatttaa

SEQ ID NO: 317999 - DNA, 183 bp, Proteus mirabilis
atgtttaaaaacctatttgttgttttacaaaaaattggaaaatccttaatgttaccggtatctgtactgcctattgccggtatcttactaggggttgggtctgcgggactatcatggatccctgtctctgtttctcaagtgatggcagaagcggggggtcggttttctctaatatgccactga

SEQ ID NO: 318000 - DNA, 552 bp, Proteus mirabilis
atgggattctggcaaaagctgattgccaatttagccgaaatttttgttccattattacctatcttaatttgcggcggtttattgttaggattaagaaatgttattggcgaaatgcctatatcagataataaacccctcacttatttttatccttggttaacgccaatatatgattttctctggttaccttgtgaagccatcttccattttctgcctgtaagtatttgctggtcgagtgtaaaaaagatgggcggtacacctgcactaggtatcgtactaggtataaccttagtttctccacagctaatgaatgcttacaatttaggttcacaaattcctgaggtttggaattttggtttatttactattgagaaagtaggttatcaagcccaagtgatcccttcgattttagcgggactatttctgggatggtttgagactaaattacgtcgttttatccctgattacctaaaattagttattgtgccaattgtaacccttattgtcgccgtttttgttgcccatgttattttaggccctatcggtagatag

SEQ ID NO: 318001 - DNA, 909 bp, Pseudomonas aeruginosa
atgaagctccgccatatcgaagtgttccaggcgatccgccaggctggctcggtcagcggcgccgcacagttgctgcatgtgtcccaaccggcggtgagcaaggtcctgcagcacgccgagcagcaactgggcttcccgctgttcttgcgagtgcgcggcaagctgctggcgactccggaagcgctggaactggagcgcgaagtggccaagctcagcgatagcctgcaggccgtgcggcgcctggcgcagaacctgcggcgccagccgggccacagcctgcgcatcggcgccaccccggccctggcgctgtcgctgctgccgcgggcgatcggcgaatggagcgcgcgctatccgcagagcggctgcgaactggccaccttgcattcgcgcgagctggtgcagggcctcctgatgcgcgaactggacctggccctgagcctgaagcagccggaacaccccggcctgcgcggcgaagccatcgccagcggcgtattggtggccctggcgccgcgcgaacactggcccgaagcggaacgccggcagccgctgagcctggccgggctggccggcgaagcgctgatcgggctgtccaccgccgacccgctgttcgcccgcctggaggattacctcagcgccgtggagccaccgccgcaggtgaagatcgccgtgcagacctacgccctcgcccgcgccctggtggaggctggggcgggcctggcgctggtcgatcccttcaccgccctcggcgccgacccgcacagcaccgcgatccgcccattgagcccggccttcccggtcaccctctacgccatcacccgcgccgacgaaaccccgccgcacaccctcgctccgctgctgcggatgctcgcccgccaggccgaggagcgtttgcgggccgtgcagatgtag

SEQ ID NO: 318002 - DNA, 1251 bp, Pseudomonas aeruginosa
atggctcagcgggtttgcatcatcggcgccggcgtggtcggcctggccacggcctacgccctggttcgcgaaggattcgacgtgaccctggtggaagcgcgcgagcggggcgggctggaaaccagctacgccaatggcgggcagttgtcctatcgctacgtggcgccattggccgacagcggcgtgccggcccaggcgctcggctggctgctgcgcaacgatgcgccgttgcgcctgcggccgcgtcttgatccggctcagtggcgctggctgctgggcttcctcgcggcctgccgcggctcgctgaaccgccgcaatgccgcgcacctgctgcgcctggcattgctcagccagcgcaccctgcaggcctggcgcgaggaggatggcctcgatggcttcgactggcggcgcaacggcaagctggtggcgttccgccaaccggccagctttgcgcgggctcgccagggcctggccgatccctcggcgcaattcgtcctgtccgccgccgagtgccgcgagttggagccggccctgtccgacgcgcccttcgtcggcggcatccacacgccggacgaggaggtcgccgactgccatgccttctgcgtgcaacttgccgagcgcctgcaggcttccggacattgccggcaactgcatggccgcagggtgacgaagatcgtcgagggcggcgcggcggtgcgtggcgtcgaggtcggcggcgatctcatcgaggccgatcatgtggtgctggccgccggctaccgcagcgccgaattgatgctgccgggcctgcgcctgccgctatacccgctcaagggctatagcctgaccctgccggtcggcgcgcagcaccgcgcgccggataccagcatcaccgattacgaccgcaagatcgtctacgcgcgaatcggcgagcagctgcggatcgccgcgatggtcgacatcgtcggcttcgaccccggcctcgagcccgcgcgcctggcactgctgcgccagcaggcgcgggacacgttcccgcagggcggcgatttcgacgccgccgtcgagtgggccggcatgcgcccggccacgcccaccggggtaccgctggtgggcaacggcggctaccgcaacctctggctcaacctcggccacggcgcgctcggcttcaccctggcctgcggcagcgggcgcctgctggccgagcagatcggtcgccgcccgccgagcatcgataccactggcctgctgccgcgcggcgcgctggctggctga

SEQ ID NO: 318003 - DNA, 351 bp, Pseudomonas aeruginosa
atggaaccgacccgtatcgccaccaacgaccgcctgtccgccgcggtctgcttcgacgccctggtatttctttccggccaggtgccgggccaggccgaggatatccatggccagacccgcgaggtgctggcgaagatcgacgcgctgctggccgaggccgggtcgcgcaaggagcgtatcctcagcgcgaccatctacctgaaggacatcgcccgcgatttcgccgccctgaacgaggtctggacccagtggttgccgaccggccaggcgcccagccggaccaccgtccaggcggagctggcgcgtccgtcggtgctggtggagatcaccgtggtggcggccaggggctga

SEQ ID NO: 318004 - DNA, 900 bp, Pseudomonas aeruginosa
atgaaaatccttgtatccagcactctcgcactctccctgtcgctcgccatcggcgccgcgcaggccgaggaactcagcggcaccctgaagaaggttgccgacaacggcacgataaccctgggttatcgcgatgcctcggtgcctttctcctaccttggcgataacagcggccagcccatgggctattcggtggaactggccgacaaggtggtggagcggctcaaaagcaccctcggcaagccggaactcaaggtgaagtacaacctggtcacttcgcagacccgtatccctctggtgcagaatggcaccgtcgacctggagtgcggctccaccggggtcaccgccgagcggcagaaacaggtggcgttctcctacggcttcatctacgtcaagggccagttgctgacccgcaaggacagcggcatcgcccacttcgacgacctcaagggcaagaacgtggtgaccactgccggcaccaccaatgagcgctacctgaagaactacaacgccgaacacaagctggggatgaacgtggtcagcgccaaggaccacggcgaagccttccagatgctgcaatcgggtcgcgcggtggccttctacatggacgatgcgctgctctacggcgaacgcgccaaggcgcgccagccgcacgactgggtggtggtcggcgagccgcaatcgcgggagatctacagctgcatggtgcgcaaggacgacccgcagttccttgccctggtcaacgagaccctggccgggctgtatcgctcgggcgagatacagggcatctaccagcgctggttccagcagccgattccgcccaaggggttgaacctggagtttcccatgaccgcggagctgaaggcgatcctcgagaaccccaccagcgatccggtgcagtga

SEQ ID NO: 318005 - DNA, 477 bp, Pseudomonas aeruginosa
atggccgaggccttgcgacaccgtatccgcgccgccggcctgctggtggtggagcaacgcatcctgctggtccgccacgaggtcggcggcgacatctactggattccgcccggcggcggcttcgagtcggaatgcgacgaatcgacgaaggataccgtccggcgcgagtttttcgaggagaccggcctgcgggtggacgtcggcccgctggtctacgtgcgcgaattcgccgaacccgccgccgggcgcttccacatggagctgttctaccgcatcgacgcctggcgtggcgagccgaccctggccaacctgaagggcctgggcggcgacgagttcgatatccacgaggtcggctggatcgcccgcgacgaactgcctggcctgccgtcgttctatccggccgaactggccgacgacgtctggtcgcgcctggacgcgccgacgccgtcgatccgccacctcggcctgcagcgctag

SEQ ID NO: 318006 - DNA, 972 bp, Pseudomonas aeruginosa
atgctagttctgtatccggaaattaaaccctacgctcgccacgagctggccgtcgacgaaccgcatgtgctgtatgccgacgaaagcggttcgccggacggactgccggtcgtcttcgtccacggcggccccggctccggttgcgatgccctgtcgcgccgcttcttcgatcccaacctctaccgtatcgtcaccttcgaccagcgcggttgcggccgttccacgccccacgccagcctggagaagaacagcacctgggagctggtggcggacatggagcgcctgcgcgagcacctgggtatcgagaagtgggtgctgttcggcggttcctggggctcgaccctgtcgctggcctacgcgcagacccatcccgagcaggtccatgcgctgatcctgcgcggcatcttcctctgccgtccgcaggacatccactggttctaccaggaaggcgccagccgcctgttccccgactattgggaagactatgtcgcgccgatcccgccggaagagcgcggcgacctgctggcggccttccacaagcgcctgaccggtagcgaccagatcgcccagatgcacgctgccaaggcctggtcgacctgggagggccgcaccgccacgctgcgccccaaccccatggtggtggaccgcttcaccgagccgggcagggcgctgtcgatctcgcgcatcgagaaccacttcttcgtcaaccagggcttcctcaggcccaaccagttgctcgaggacatgcaccgcatcgcccatctgcctggcgtgatcgtgcatggccgctacgacgccatctgtccgctggacaatgcctgggccctgcaccaggcctggccgaacagcgaactgcagatcatccgcgacgccgggcataccgccagcgagccggggatagtcgatgcgctggtgcgcgccaccaacgagatcggccggcgactgctcgacctgccgccggaggccgaatga

SEQ ID NO: 318007 - DNA, 438 bp, Pseudomonas aeruginosa
atgaaggcattgctgcagcgcgtcggcgcggcgcgggtggaggttggcggcgaaatcgtcggctccatcgatcgcggcctgctggtgctggtcggggtcgagcccgaggatggcgagcgttgcgcggcgaagatgctgcacaagctgctcaactacagggtgttcggcgacgacgagggcaagatgaaccggtccttgctggacgtgcagggcggcttgctgctggtctcgcaattcaccctggcggcgaacacccgcagcggactgcgtccgagcttctccagcgcggcgccgccggcgcaaggagaggcggtgttcgagcacctggtgaaactggcgcgggaggcctatccgcaggtggcgaccgggcgtttcggcgccgacatgcaggtgcacctggtcaacgacgggccggtgaccttcctgctggagagttga

SEQ ID NO: 318008 - DNA, 1578 bp, Pseudomonas aeruginosa
gtgattttccgttccgtttcaaacaccgatttccgcgcccgcgtgcgcaccctgctgcttgccggctcgaccgcgctggcattcgtcgccgccccggtatgggcgttcagcatcgacgacgtggcgagcaaggccaaggacctggccggcgacaagtattccgcgccgaccagcaacctgccatcggaattcagcgaaatgaaattcgccgattaccagcagatccgtttcatcaacgagcgcgcctactggggcaagctgaagacgccgttcaagctgagcttctatcaccagggcatgcacttcgacacgccggtgaagatcaacgaggtgaccgctaccacggtcaagccgatcaagtacgatcgcaccaagttcgatttcggatccctgaagttcgacgagaatgccaccaaggatctcggctatgccggtttccgcgtgctctatccgatcaacaaggccgacaagcaggacgagatcgccaccttccttggcgcgagctacttccgcgtggtcggcaagggccaggtctacggtctgtcggcgcgcggcctggcgatcgataccgcgctgccttcgggcgaagagttcccgcgcttccgcgaattctggatcgagcggccgaaggcgcaggacaagcaactggtgatctacgccctgcttgactcgccgcgggccaccggcgcctaccgcttcgtgctgcgtccgggcaaggatgcggtgatggatgtccaggcccgcgtgttcctccgcgacaaggtcagcaagctgggcctggcgccgctgaccagcatgtacctgttcggctccaaccagccgtccgagcagcacaacttccggcccgagctgcatgactccagcggcctgcagatccatgccggcaacggcgagtggctgtggcgtccgctgaacaatccgaagcacctgtcggtgagcaccttcagcgtggagaacccgaaaggcttcggcctgctccagcgcggccgcgagttctcccgctacgaagacctggatgaccgctacgacctgcgtccgagtgcctggatcgagccgaagggcgactggggcaagggcaccgtggaactggtggaaatcccgaccccggacgaaaccaacgacaatatcgtcgcgttctggaaccccgagacccagcctgaggtcggaaagccgctggacttcgcctaccgcctgcactggaccatggatgaagacgagctgcacgacccgaaatcctcctgggtcaagcagaccatgcgctcggtcggcgacgtgaagcagaagaacctgatccgccagcaggacggcagcaccgccctggtcgtcgacttcgaagggccggccctgaaggacctggcgccggacgcgccggtgaccacccaggtcagcaccgacagcaacgccgaggtggtggagaacagcctgcgttacaacccggtcctgaaaggctggcgcctgacgctgcggatcaaggtcaaggatccgaagaagccggtggaaatgcgcgcggcgctggtcgacgaggcgcagaagccactgagcgaaacctggagctatcagctgcctgccgatgaataa

SEQ ID NO: 318009 - DNA, 2586 bp, Pseudomonas aeruginosa
atgaataacccatccactacgaaagcaccgctggccgactacctcgctcatcttcccctggcggaagaggagcgggagcggcttggcgagtccgcttccttctccgagctgcacgctcgcctggcgggagcggaaggcgccgctgccgatgccgggggcgatcccgccctggcctcggtacgcgcccgcctgcagctgggcacccctgagctggacgacgccgagatgttcggcgtcgacgcccagggtcgcaccttcctcaagatttccccgccgatccgccgtaccaaggtgattcccgagccctggcgcaccaacatcctggtgcgcggctggcgtcggctgaccggacgcagcaacccgcccaagcccaagcgtgccctgccgcgggcccgctggcagcgggtcggctcgctgcgccggttcatcctgctgttgttgatgctggcgcagacctcggtcgccacctactacatgaaaggcatcctgccctaccagggctgggccttcgtcgacctggaggagctggcccagcagagcctgctggataccgtccagcaggtgctgccctatgtcatccagttcggcatcctggcgctcttcgcgatcctcttctgctgggtctcggccggcttctggaccgcgctgatgggcttctgggagctgctcaccgggcgtgaccgctaccggatctccggcagcagcgccggcagcgagccgatcgccgccgacgcccgcacggcgatcgtcatgccgatctgcaacgaagacgtgccgcgggtattcgccggcctgcgggcgaccgtcgagtcgatggccgccaccggcgagatggagcgcttcgacttcttcgtcctcagcgacaccaacgacccggatatcgccgtcgccgagcagcaggcctggctcgagctgtgccgcgagaccaagggcttcggcaagatcttctaccgtcgccgccggcgtcgggtgaagcgcaagagcggcaacatcgacgacttctgccggcgctggggcggcgactaccgctacatggtggtgatggacgccgacagcgtgatgagcggcgactgcctggccaagctggtacgcctgatggaggccaatcctgaggcggggatcatccagaccgcgccgaaggcgtccggcatggacaccctgtatgcgcgcatgcagcagttcgccacccgcgtctacggcccgctgttcaccgccggcctgcacttctggcaactcggcgagtcgcactactggggccacaacgcgatcatccgcatgcagcccttcatcgaccactgcgccctggcgccgttgccgggcaagggctcgttcgccggcgcgatcctgtcccacgacttcgtcgaggctgcgttgatgcgccgtgccggctggggcgtgtggatcgcctacgacctcgacggcagctacgaagaactgccgccgaacctgctcgacgaactcaagcgcgaccgccgctggtgccacggcaacctgatgaacttccgcctgttcctggtcaagggcatgcacccggtgcaccgcgcggtgttcctcaccggggtcatgtcctacctgtcggcgccgttgtggttcttcttcctggtgctttccaccgcgctgctggcggtgcaccaactgatggagccgcagtacttcctggaaccgcggcagctgttcccgatctggccgcagtggcatccggagaaggccatcgcgttgttctccaccaccctgaccctgttgttcctgcccaagctgctcagcgtaatgctgatctgggccaagggcgccaagggtttcggcggggtgatccgggtgaccctgagcatgctcctggagatgttcttctcggtgctgctggcgccggtgcgcatgctcttccacacccgcttcgtgctggccgccttcctcggctggtcggtgcagtggaactcgccgcagcgcgacgacgacgccacgccctggagcgaggcgatccgccggcacggcatgcagaccctgctgggtatcgcctggaccctgctggtggcctggctcaacccgcgcttcctgtggtggctgtcgccgatcgtcggttcgctgatcctgtcgattccggtatcggtgatctccagccgggtgaagctgggcctgcgcgcccgcgacgaaaagctgttcctgatcccggaggagtacgacacgccgcgcgagctgcgcgccaccgacgagtacacctacgagaaccgctggcatgcgctcaaggatggcttcctcaaggccgccgtcgatccgttgctcaacgccctggcctgcgccatgggcacggctcgccacaaccgtgcgcaggccatcgagacggtgcgcggcgagcgtatcggcaaggccatcgataagggcccggaacggctcgacggcgccacgcgcctggctctgttgagtgacccggtagcactttcgcgcctgcatacgcgggtctgggaagaggaccgcgacgactggctcggccgctggcgcaaggccgaggcggacgacccccacgccgccagcgtaccgctggcccaggtagtgcccggcgacgccggcttgctgcccgccgcccagtcctga

SEQ ID NO: 318010 - DNA, 801 bp, Pseudomonas aeruginosa
atgaaaaagtatcttgcttcattggttctgggcgtctgcgccctggtgggcgtggcttcggtccaggcggccggcgcggtggaggacgcggtcaagcgcggcaccctgcgggtcggcatggacccgacctacatgccgttcgagatgaccaacaagcgtggccagatcattggcttcgaagtcgacctgctcaaggccatggccaagtccatgggcgtcaagctggagctggtctccaccagctacgatggcatcatcccggcgctgctgaccgacaagttcgacatgatcggctcgggcatgaccctgacccaggagcgcaacctgcgcctgaacttctccgagcccttcatcgtggtcggccagaccctgctggtgcgcaaggagctggaaggcaagatcaagtcctacaaggacctgaacgatccgcagtacagcatcacctcgaagatcggcaccaccggtgagatcgttgcccgcaagctgatcagcaaggccaagtaccacggcttcgacaacgagccggaagcggtgatggacgtggtcaacggcaaggctgacgccttcatctacgactcgccctacaacgtggtggcggtgagcaagttcggcgccggcaagctggtctacctcgaccagccgttcacctacgagccgctggcgttcggcctgaagaaaggcgactacgacagcatcaatttcatcaacaacttcctccatcagatccgcgaagacggcacctatcagcgcatccacgacaagtggttcaagaacaccgagtggctgaaggaaatggaatga

SEQ ID NO: 318011 - DNA, 963 bp, Pseudomonas aeruginosa
gtgaccaagaagaaacgttccgtctggccctggcacctgctgaccgggctgatcctgctggtcctggcctgggcgctgtggttctccacctcgctgatttcctatgaatggcgctggaaccgcgttccgcagtacttcgcctaccaggccgaggagccgttgcgggccaacgagatcggccgggtcgaggctatcgaggaacagggcagggacgcgcgcgtcacgctgcttggcgagagcggcgagaagcaggtcgtgaccgtcgcccaggacagcctgcaattctccgaaggcgacgacgtggccgagggcgacgcggtcggggtgacccgccactgggccgccggcccactgctctggggcctgtggaccaccctctggctatcgctggtgtccggtgccatcggcttggcgatcggcctggtcgccggcctctgccgactgtcgaagaacccgaccctgcacgacctgtcgacgatctacgtcgagctggtgcgcggcacgccgttgctggtgcagatcttcatcttctacttcttcatcggcaccgtgctcaacctgtcccgcgagttcgccggggtcgcggcgctggcgctgttcaccggcgcctacgtggccgagatcatccgggccggcgtgcagtccatcgcccgcggacagaacgaggccgcccgctccctgggcctgaacgccggccagtcgatgcgctacgtgatcctgccgcaggccttcaagcgcgtgctgccgccgctggccgggcagttcatcagcctggtcaaggacacctcgctggtctcggtgatcgccatcaccgaactgaccaagagcggccgcgaggcgatcaccacctcgttctccaccttcgagatctggttctgcgtcgccgcgttgtacctgctgttgaacctgcccctttcgcacatggcatcccgactggagcggaggctcggacaaagtgattga

SEQ ID NO: 318012 - DNA, 735 bp, Pseudomonas aeruginosa
gtgattgaagtacgcaacctgctgaaggtcttcgatacccgcggccaggtagtgcgcgcggtggacgacgtgagtacccgcgtggccaggggcgaggtactggtggtgatcggtccgtccggttccggcaagtcgaccttcctgcgctgcctgaacggcctggaggagttcgacgaaggctcggtgagcatcgacggcgtcgacctggccgacccgaggaccgacatcaatgcctaccgccgcgaagtcggcatggtgttccagcatttcaacctgttcccgcacatgaccgtgctcgagaacctctgcctggcccaacgcgtggtgcgcaagcgcggcaaggccgagcgcgaggccaaggcgcgggcgctgctggccaaggtcggcatcgggcagaaggccgacgaatatccctcgcgcctgtccggcggccagcagcagcgcgtggcgatcgctcgcgcgttgtgcatggaccccaaggtgatgctgttcgacgaaccgacctcggcgctcgatccggagatggtcggcgaagtcctcgacgtcatgaagaccctggccgtggaaggcatgaccatggtctgcgtgacccacgagatgggctttgcccgcgaagtggccgaccgcgtgctgttcttcgaccacggcaagctgctggaggacgcgccgccggcgcagttcttcgacaatccgcaggacccgcgggcccaggccttcctccgccaggtcctctag

SEQ ID NO: 318013 - DNA, 462 bp, Pseudomonas aeruginosa
atgcgcccgatgaccatcgatatcgacgaactggccttcgccctggataccccgggaatcgaccactacctcgacctgtacagcggcaaggtgctgctgatctccgccgaggcgcccgatcccgaactggacgcattgctggaaaacgagccggaacgcctgctgctgatcgacccgctgagcaccacccagtcgctgggactgatgcaggatttcctccgcgaggtggaagagccgcacgcctatgcgacgctcgccaacgcgctgcagagccgcaagccgttcaaggccttcaagcactctctgatggagtacccggaactgttgcaggactggtaccgctaccagaacgagcgcctgcgcgaatgggcgctggactggctggaggacaacgatatccagccggccgcgcggcagagtccgacgtcgctcctgccgccgccgggcaagccgttcgcctag

SEQ ID NO: 318014 - DNA, 1944 bp, Pseudomonas aeruginosa
atgtacgattggtgggttctccaactggccaagctgagcgtcagccgcaagctgatggtcggtttcggtgtcctcctcgcgctgcttctgctggtggtgatcagcagcaaccgcaccctcacgcaccagaccgccctcagcgagcagctcgccgaagtcgccagcctgatggaacagacccagcaagccgaacaaggccgcctggcattcgaagccggcagcgacccgcgccaggccgagcaggtccgccagaccctggccgggatgctccagcgcctgcaggcgctgcgcgacagcgagctcaacccggccgccctggcccaccaggccgaagccatcgaagcctaccgcaaggccttcgacgacctcgccgcagccgatcagcaacgcagcgccgcccgtggtgtgctggtgggcactgcacagcaggcgctggacagcttcgcccgcctcgaggaactgatggacgccagcctcgcgcaacaggccggcgacccgcaggcgttgcaacgtagccgtgcggtggccgacctgcaccaacagttgctcatggtgcgttaccaggtgcgcggctacgtcttcgaacgcagcgacaaggccgagcaggccgcgttcgccgcgttcgacgccctccgccaggccgccacgacgctgcgtggccagttgcccggcgaggccgatgcggcgctggaacaggccatgggcagcctccagggctatcgtggcgggatcgagcagttccgtgccggcgtcatccgcacgcgccaggcgcagcaagcgatgcaaagcagcacccaggatatggcccgggccggccggaccctcaccgaagccggtcgccaattgcgcgagagcaccgccagccgcgaccgcgccagcctctggctgatcgccgcgctggccctggccttcggctgcgtcgccggctgggcgatcaaccggcagatcgtccggccgctggacgaagccctcgcgcaggccgaggccatcgccgccggcgacctcggcaagcgtccgcagaatcccctgaccctccagcgccgcgacgaactgggccagttgcagcgagtcatgcagcgcatgggcgacagcctgcgcgagctggtcgggcggatcggcgacggcgtcagccagttggccagctccgccgaagaactctcggcggtcaccgagcagacccgcgccggggtcaacagccagaaagtggagaccgaccaggtcgccaccgccatgcacgagatggccgccaccgtgcaggacgtcgcgcgcaacgccgaactggcttcccaggccgctcgccaggccgacgaagaggcgcgccagggcgacgcggtggtcgaccaggcggtgacccgcatcgagcgcctggctagcgaaatggacgtttccagcgaagccatggcgcgcctgaagaacgagagcgagcagatcggcagcgtcctcgacgtgatcaagtcggtggccgagcaaaccaacctgctggcgctcaacgcagccatcgaagcggcacgcgccggcgacgccggacgcggcttcgcggtggtcgccgacgaggtccgcggcctggcccagcgcacccagcagtccaccgccgagatcgagggcctgatccagcgtctccagcagggcgccggcgaagccgccgaacgcctggagaacagccgctcgctgaccgccagcacggtggaactggcgcgccgcgccggcgccgcgctggacagcatcacccgcaccgtctccgacatccagaacatgaacctgcagatcgccactgccgcggagcaacagagcacggtggccgaggagatcaaccgcagcgtcctcagcgtacgcgacgtcgccgagcagtcggccgccgccagcgagcagaccgccgcctccagcggcgagctggcgcgcctgggcacgcagttgcaggcacaggtgggacgcttccgcctgtaa

SEQ ID NO: 318015 - DNA, 708 bp, Pseudomonas aeruginosa
gtgaacctgctgctcctcgacgacgccgacttcgtgtcggcggatcgtgcggtcctgcacgatcgccgcctcaagcacctgcacgaagtgcaccgcgccgagaacggcgacaccctgcgggtcggccgcctcggcggctggatgggcgaaggtcgcctgctgaagctcgacgccagcgaggcgaccctggaagtgcgcttcgaccagccgccgccggccaagctgccgatcaccctgctgctggccttgccgcgaccgaagatgctccgccgggtgttgcagaccatcgccgcgatgggcgtaccgaagctggtgctgctgaacagctaccgcgtggaaaagagcttctggcagaccccgttcctcgacccggcggcgatccgcgagaacctggtcctcggcctggagcaggcccgcgatacggtgctgccggaaatcatcgtcgagaagcgcttcaaacccttcgtcgaagaccgcctgccggccctggccgccggcagcctcggcctggtcggccatcccggtccctggccggcctgtccgcgcgcggtggagaagccggtgaccctggcgatcggcccggaaggcggctggattccctacgaggtcgacaagctgcgcgaagccggactgcatccggtgcagctcggcgaacgcatcctgcgcgtggaaaccgcggtcagcgccctgcttgcgcggttgttctga

SEQ ID NO: 318016 - DNA, 804 bp, Pseudomonas aeruginosa
atgagcgccgataaacccgagcagcctgagcacgaccaggaaatgcccctggtctcgcacctgaccgaactgcgtacgcgcctgctgcgcagcgtggcggcgatcttcctgatcttcgccggcctgttctacttctcgcagaagatctacaccctggtctccgagccgttgcgccgcttccttccggaaggcaccagcatgatcgccaccgacgtcgcctcgccgttcctcgcgccgttcaagctgaccatggtggtggcgctgttcctcgccatgccggtgatcctcgcgcaggtctggggcttcatcgcgcccggcctgtacaagcacgagaagcgcgtggcgctgccgctgctggtgtccagcatcatcctgttctacgccgggatggccttcgcctacttcctggtgttcccgatgatcttccacttcttcgccagcgtgacgcccgagggcgtggcgatgatgacggacatcaacagctacctggacttcgtcctgactctgttcttcgccttcggcgtcgccttcgagatcccggtggccacggtgctgctgatctggatcggagtggtcgacgtcgagtacctgaagaagatccgcccgtacgtgatcatcggctgtttcgtggtcggcatggtcctgaccccgccggacatcttctcccagaccatgctcgcggtgccgatgtggctgctgttcgagatcggcctgctgttcggccgcctggtacgcaagcgcggcgagcatccggacgaccaaccggccagcgacggcgaccagcctccggccacccgccagtga

SEQ ID NO: 318017 - DNA, 426 bp, Pseudomonas aeruginosa
atgttcggaatcagcttcagcgaactgttgctggtcgggttggtcgccctgctggtgctcggccccgagcgcctgccgggcgccgcacgtaccgccggcctgtggatcggccgcctgaagcgcagtttcaataccatcaagcaggaagtggaacgggaaatcggcgcggacgagatccgccggcaactgcacaacgagcacatcctctcgatggagcgcgaagcgcagaagctgctggccccgctgaccggccagaatccctcgcaggaaccccagccgccgacggtcgagagcccggcgccgagcgtacccacgccgccgccgaccagcacgcctgcggttccgcccgcggacgccgcggcaccgccggcagtcgctgcctccactcccccttcgccaccgtccgagacgccgcgtaatccatga

SEQ ID NO: 318018 - DNA, 249 bp, Pseudomonas aeruginosa
atgggcatttttgactggaaacactggatcgtcatcctgatcgtcgtggtactggtgttcggcaccaagcgcctgaagaacctcggttccgacgtcggcgaagcgatcaagggcttccgcaaggcggtgaacaccgaggaagacgacaagaaggaccagcccgccgcccagccggcccaaccgctgaaccagccgcacaccatcgacgcccaggcgcagaaggtcgaagagccggcgcgcaaggactga

SEQ ID NO: 318019 - DNA, 336 bp, Pseudomonas aeruginosa
atgagtgacaccctgacccgcctggcggcggtgctcgaggagcgcaagaacgccgcgcccgacagctcctacgtggccagcctgtaccacaagggcctgaacaagatcctggagaaggtcggcgaggagtcggtggaaaccatcatcgccgccaaggatgccgcggccagcggcgactgccaggacctgatctacgaaaccgccgacctctggttccactcgctggtgatgctctcggccctcggccagcatccgcaagccgtgctggacgaactggagcgccgcttcggcctttccggccacgccgagaaagccgcccgccaaccatcggcctga

SEQ ID NO: 318020 - DNA, 405 bp, Pseudomonas aeruginosa
atgaaagactggctggatgagattcactggaacgccgacggcctggtcccggcgatcgcccaggatcacgagaccgggcgcgtgctgatgatggcctggatgaaccgcgaggcgctggccctgaccgccagcgagaaccgtgcaatctattggtcgcgttcgcgtggcaagctgtggcgcaagggcgaggagtccgggcatgtgcagaagctgcacgaactgcgtctggactgcgacgccgacgtggtcatcctgatggtcgagcaggtcggcgggatcgcctgccataccggccgggaaagctgtttctaccgcgtcttcgagaacggcgcctggaagaccgtcgatccggtgctgaaggacccggacgctatctacgaacacgcaggacaccaccatgagtga

SEQ ID NO: 318021 - DNA, 1602 bp, Pseudomonas aeruginosa
atgaagctcctcgctgtccgccgcctcctgcgcatccagcgcgtcgtcatccgctaccgcctggacgacctgatcctcgaactgccgatgctgccctggtggctgcgcctgctcggtgccaccctgccctggcgctggctgccgcggcgcaagctggaactgacccgcggcgcgcgcctgcgcctggcactgcaggacctcggaccgatcttcatcaagttcggccagattctctccacccgccgcgacctgctgcccgacgacatcgccaacgaactggcctggctgcaggacaaggtgccgcccttcccgccagagctggcggtcaagcgcatcgaggaacagctgggcgcgaagatcgaacaggtcttcgcccgcttcgaacgcgaaccgctggcctccgcctcggtggcccaggtccacgccgcgcgcctgaagagcggcgaggaagtggtggtgaaggtgatccggccgaacctggaaccggtgatccgctccgacatcgcctggctgttcatcctcgcccgcctcgccgagcgggtctccagcgaggcgcggcgcctgcacccggtggaagtggtcagcgactacgagaagaccatcgtcgacgaactcgacctgctccgcgaggcggccaacgcctcgcagctgcgacgcaacttcgaaggctcgccgctgctctacgtgccacaggtctactgggactggtgccggcccaaggtgctggtgatggagcgcatctacggcatcccggtgaccgacctggaaaccctgcgcgaccagcgcaccgacttcaaggcactggccgagcgcggcgtggagatcttcttcacccaggtgttccgcgacagctttttccatgccgacatgcaccccggcaacatcttcgtcagcacccgcgcgccctggagcccgcaatacatcgcggtggactgcggcatcgtcggcagcctgaccgacgaggaccaggactacctggcgcgcaacctgatcgccttcttcaagcgcgactaccgcaaggtcgcccaactgcatatcgactccggctgggtaccggcggaaaccaaggtcaacgacttcgaggcggcgatccgcaccgtctgcgaaccgatcttcgagaagccgctgaaggacatctccttcggccaggtcctgctgcgcctgttccagaccgcgcgtcgtttcaacatggagatccagccgcaactggtgctgctgcagaagaccctgctgaacatcgaaggcctcggccgccagctctacccggaactcgacctgtgggccaccgcccagccgttcctggagcgctggatgcgcgaacgggtcagcccgaagcagttgctgcgcaatttccagcaacaggtcgagcaggtgccgcacctgtcgcaaatggcccgcgacaccctcgaacgcctgtcacaaccgcacgcccacaatgcgccgccgccggagtggaaaggttcccgccacgactggctcgggcgcctggtgggcgcggtgctgctggtcggcgccgccgaggtcggcctgggccagcagctggaagcctggccggcgtgggtgatgctggccggcggggtgttcctgatcctgcgccgctag

SEQ ID NO: 318022 - DNA, 627 bp, Pseudomonas aeruginosa
atgagctcgctgctgatccaggccgtgctggccgccgccgaaaccggcatcaatcgcgtcctgcgcctcgacgggacagcgctgccgcgcctgcgcaggctttccgccaaggtcatcgaggtcgactgcctgagcccgccgctgcgggtcttcatcctgcccgccggcgacggcctgcacttcgccgcgcagcatgaggcggaggtcgactgcaccctgcgtgcgccggccggcaacctcctgcacctggccctggcgcgcgacaagacccgcgtcctgcacagcccggaagtcagcatggacggcgacagcgcggccctgctggaactggccggcatcctgcagagcctggagctggactgggagtacgaactgtcgcgctggctcggcccgctcgccacccaggtgctcggcagcagcctgcgcgacgcttcgcgctggagcgcgcagagcctgcacagcctgcgcctgaacctggccgactaccttgccgaggaaagccgtacgctggtcggccagcacgaagccgaagcccgcttcgccgaactggaccagctgaagctggccctcgatcgtctcgacgcgcgcgtcggacgcctcagccaaaagaccaagcccgacgcatga

SEQ ID NO: 318023 - DNA, 771 bp, Pseudomonas aeruginosa
atgaacgatccccgcaaaggcgccgacgccgaacccaccacccacttcggctaccagaacgttccggaaagccagaaggcgaagaaggtcgccgaggtatttcactcggtggcagccaagtacgacctgatgaacgacctgatgtccggtggcatccatcgcctgtggaagcgcttcaccatcgagctgtccggcgtgcgcagcgggaaccgcgtgctcgacatcgccggcggcaccggcgacctgacccggcagttctcacgcctggtcggcccgaccggcgaggtggtgctggccgacatcaacgcctcgatgctcaaggtcggccgcgacaagctgctcgacaagggcgtctccggcaacgtcagcttcgtccaggcggacgccgagaagctgcccttcccggacaaccacttcgactgcgtgaccatcgccttcggcttgcgcaacgtcacccacaaggacgaagcgatccgctccatgctgcgcgtgctcaagcccggtggccgcctgctggtgctggagttctccaagccgagcagcaacctgctgtccaaggcctacgacgcctattcgttcagcctgctgccgctgatgggcaagctggtcaccaacgactccgagagctatcgctacctggccgagtcgatccgcatgcaccccgaccaggaaaccctgaaggcgatgatggtggaagccggcttcgaccgcgtgacctaccacaacatgaccggcggcatcgtcgccctgcaccgcggtatcaagccttaa

SEQ ID NO: 318024 - DNA, 276 bp, Pseudomonas aeruginosa
atgtcgcgtatccacatcgaacgtccgcacagcctggggctggacgccgcacgggccaaggcggagaaactggccgaacgtctggcgaaggagcacggcgtgcaatgcgaatggcagggcgacgagctgaccttcaagcgcagcggcgtcgacggcaggatcgcggtgggggcggacaaggtcgcggtggacgtcaagctcggcctgatgctgtcggccatgagcggcctgctcaagggcgagatcgagaaggcgctggacaaggcgctggcctga

SEQ ID NO: 318025 - DNA, 417 bp, Pseudomonas aeruginosa
atggccaagattgccctgaagaaaaagaccgtttccgaatccacttccctggtctccgagatccgccactatgcccgccagatctggcttgccggcctgggtgcgtattcccgcctgggcaccgaaggcagcgactacttcaaggaattggtgaaagctggcgaagccctggagaaaaaaggcaaatcgctggtcacaagtcaggtcgattcggccaatgacagtgtcaagaccggcctctcttcggtgaagggaaaggtcgaagaccagctcgacaggatcgagcaggcattcgacagccgtgtcgctagcacgttgaaccggataggcataccttcccggaacgatgtcgaagcactctctgctaagctggatgagctgagcgcagtgctcgagcgtgtcgcgagaacccaataa

SEQ ID NO: 318026 - DNA, 930 bp, Pseudomonas aeruginosa
atggctggcaagaagaagagcgaaaaagagtccagttggatcggcgagatcgagaaatactcgcggcagatctggctggctggtctgggggcctactcgaaggtcagcaaggacggcagcaagctgttcgagaccttggtgaaagacggcgagaaggctgaaaaagaagcgaagtccgatgtggacgcgcaggtcggtgcggcgaaggcttccgcccgctctgcgaagagcaaggtcgacgaggttcgggaccgtgcgctcggcaagtggagcgagctcgaggaagctttcgacaagcgcctgaacagcgccatctcgcgtctcggcgtgccgagccgcaacgaggtgaaggagctgcacagcaaggtcgatacgctgaccaagcagatcgagaaactcaccggcgtcagcgtcaagccggcggcgaaggcagcggccaagcctgcggcgaaaccggctgccaagcccgcggcgaaaaccgcagcggccaagccggcagctaaaccggcagccaaggccgccgccaagcctgcggcgaaacccgcggcgaaaaaaaccgcggcgaaaaccgcggccgccaagccggcagccaagcccgccgccaaaccgactgcgaaggccgcagcgaaaccggcgaccaagccggcagccaaggccgcggcgaagcctgctgcgaaacctgccgcagccaagcctgccgcgaagccggcagccaagccggccgctgcgaccgccgccaagcccgcggcgaaacctgccgccaagccggctgcgaaaaagcctgcggcgaagaagccggcagccaagcccgccgcggcgaaaccggccgctcccgccgcgtcttcgagcgcgcccgctgcccccgccgccacaccggctgccagcgctccggcagcgaacgctccggcgacgccgagcagccagggctga

SEQ ID NO: 318027 - DNA, 618 bp, Pseudomonas aeruginosa
atgaagacacgcgaccgaatcctcgaatgctcgctgttgctgttcaacgaacagggcgagcccaacgtctcgacactggagatcgccaacgaactgggcatcagcccgggcaatctctactaccacttccatggcaaggagccgctggtgatggcgctgttcgagcggttccaggccgagttggcgccgctgctcgatccgcccgaggaggtgcgcctgggcgcggaggactactggctgttcctgcacctgatcgtcgagcgcctcgcccactaccgcttcctgttccaggacctgtccaacctgaccgggcgcctgccacggctggctcgcggcatccgtacctggctcggcgcgctgaagcggaccctggccaccctgctggcccgcctcaaggccgaccggcagttgcgcagcgacgcgccggcactcggccaactggtcgaacagatcaccctgaccctgctgttctccctggattaccagcgggtactgggcagcaagggcgaggtgcgcacggtggtctaccagatcatgatgctggtcgccccgcatctgcgcagcgaggcccaacgctcggcggaaagcctggcgcagcgctacctgggaccggaatga

SEQ ID NO: 318028 - DNA, 1683 bp, Pseudomonas aeruginosa
atgcgagaaaagcaggaatcgggtagcgtgccggtgcccgccgagttcatgagtgcacagagcgccatcgtcggcctgcgcggcaaggacctgctgacgacggtccgcagcctggctgtccacggcctgcgccagccgctgcacagtgcgcggcacctggtcgccttcggaggccagttgggcaaggtgctgctgggcgacaccctgcaccagccgaacccacaggacgcccgcttccaggatccatcctggcgcctcaatcccttctaccggcgcaccctgcaggcctacctggcgtggcagaagcaactgctcgcctggatcgacgaaagcaacctggactgcgacgatcgcgcccgcgcccgcttcctcgtcgccttgctctccgacgccgtggcacccagcaacagcctgatcaatccactggcggtaaaggaactgttcaataccggcgggatcagcctgctcaatggcgtccgccacctgctcgaagacctggtgcacaacggcggcatgcccagccaggtgaacaagaccgccttcgagatcggtcgcaacctcgccaccacgcaaggcgcggtggtgttccgcaacgaggtgctggagctgatccagtacaagccgctgggcgagcgccagtacgccaagcccctgctgatcgtgccgccgcagatcaacaagtactacatcttcgacctgtcgccggaaaagagcttcgtccagtacgccctgaagaacaacctgcaggtcttcgtcatcagttggcgcaaccccgacgcccagcaccgcgaatggggcctgagcacctatgtcgaggccctcgaccaggccatcgaggtcagccgcgagatcaccggcagccgcagcgtgaacctggccggcgcctgcgccggcgggctcaccgtggccgccttgctcggccacctgcaggtgcgccggcaactgcgcaaggtcagtagcgtcacctacctggtcagcctgctcgacagccagatggaaagcccggcgatgctcttcgccgacgagcagaccctggagagcagcaagcgccgctcctaccagcatggcgtgctggacgggcgcgacatggccaaggtgttcgcctggatgcgccccaacgacctgatctggaactactgggtcaacaactacctgctcggcaggcagccgccggcgttcgacatcctctactggaacaacgacaacacgcggctgcccgcggcgttccacggcgaactgctcgacctgttcaagcacaacccgctgacccgcccgggcgcgctggaggtcagcgggaccgcggtggacctgggcaaggtggcgatcgacagcttccacgtcgccggcatcaccgaccacatcacgccctgggacgcggtctatcgctcggccctcctgctgggcggccagcgccgcttcatcctgtccaacagcgggcacatccagagcatcctcaaccctcccggaaaccccaaggcctgctacttcgagaacgacaagctgagcagcgatccacgcgcctggtactacgacgccaagcgcgaagagggcagctggtggccggtctggctgggctggctgcaggagcgctcgggcgagctgggcaaccctgacttcaaccttggcagcgccgcgcatccgcccctcgaagcggccccgggcacctacgtgcatatacgctga

SEQ ID NO: 318029 - DNA, 858 bp, Pseudomonas aeruginosa
atgccccagcccttcgtcttccggaccatcgacctcgacggccagaccatccgcaccgcagtgcggccgggcaaggaaggaagcactccgctgctgatcttcaacggcataggcgccaacctggaactggtgttccccttcgtccaggcgctcgacccggaactggaggtgatcgccttcgacgttcccggcgtcggcggttcctcgacgcccagcgtgccctaccgctttcccggcctggccaagctggcggcgcggatgctcgactacctggactacggccaggtcaacgcgatcggcgtgtcctggggcggcgcgctggcccagcagttcgcccacgactatccggaacgctgcaagaagctgatcctcgccgccacttcggctggcgcggtgatggtgccaggcaagccgaaggtactgatgcgcatggccagcccgcggcgctacatccagccctcctatggcgtacacatcgccccggacatctacggcggggccttccgccgcgaccccaagctggccatggcgcatgccagcaaggtgcgttcgtcgggcaagctgggctactactggcaactgttcgccgggctcggctggaccagcatccactggctgcataggatccgccagccgaccctggtgctggccggcgacgacgacccgatcatcccgctgatcaacatgcgtgtgctggcctggcgcattcccaacgccgaactgcacgtgatcgacgacggccacctgttcctggtgacccgcgccgaatcggtggcgccgatcatcatgaagttcctcgccgaggagcgccgtcgcgccatcatgcaccctcgtccgttcctgcccaagaccggctga

SEQ ID NO: 318030 - DNA, 1680 bp, Pseudomonas aeruginosa
atgagtcagaagaacaataacgagcttcccaagcaagccgcggaaaacacgctgaacctgaatccggtgatcggcatccggggcaaggacctgctcacctccgcgcgcatggtcctgctccaggcggtgcgccagccgctgcacagcgccaggcacgtggcgcatttcagcctggagctgaagaacgtcctgctcggccagtcggagctacgcccaggcgatgacgaccgacgcttttccgatccggcctggagccagaatccactgtacaagcgctacatgcagacctacctggcctggcgcaaggagctgcacagctggatcagccacagcgacctgtcgccgcaggacatcagtcgtggccagttcgtcatcaacctgctgaccgaggcgatgtcgccgaccaacagcctgagcaacccggcggcggtcaagcgcttcttcgagaccggcggcaagagcctgctggacggcctcggccacctggccaaggacctggtgaacaacggcgggatgccgagccaggtggacatggacgccttcgaggtgggcaagaacctggccaccaccgagggcgccgtggtgttccgcaacgacgtgctggaactgatccagtaccggccgatcaccgagtcggtgcacgaacgcccgctgctggtggtgccgccgcagatcaacaagttctacgtcttcgacctgtcgccggacaagagcctggcgcgcttctgcctgcgcaacggcgtgcagaccttcatcgtcagctggcgcaacccgaccaagtcgcagcgcgaatggggcctgaccacctatatcgaggcgctcaaggaggccatcgaggtagtcctgtcgatcaccggcagcaaggacctcaacctcctcggcgcctgctccggcgggatcaccaccgcgaccctggtcggccactacgtggccagcggcgagaagaaggtcaacgccttcacccaactggtcagcgtgctcgacttcgaactgaatacccaggtcgcgctgttcgccgacgagaagaccctggaggccgccaagcgtcgctcctaccagtccggcgtgctggagggcaaggacatggccaaggtgttcgcctggatgcgccccaacgacctgatctggaactactgggtcaacaactacctgctcggcaaccagccgccggcgttcgacatcctctactggaacaacgacaccacgcgcctgcccgccgcgctgcacggcgagttcgtcgaactgttcaagagcaacccgctgaaccgccccggcgccctggaggtctccggcacgcccatcgacctgaagcaggtgacttgcgacttctactgtgtcgccggtctgaacgaccacatcaccccctgggagtcgtgctacaagtcggccaggctgctgggtggcaagtgcgagttcatcctctccaacagcggtcacatccagagcatcctcaacccaccgggtaaccccaaggcacgcttcatgaccaatccggaactgcccgccgagcccaaggcctggctggaacaggccggcaagcacgccgactcgtggtggttgcactggcagcaatggctggccgaacgctccggcaagacccgcaaggcgcccgccaacctgggcaacaagacctatccggccggcgaagccgcgcccggaacctacgtgcatgaacgatga

SEQ ID NO: 318031 - DNA, 372 bp, Pseudomonas aeruginosa
atgcgtatcccttccgccatccagctgcacaaagcctcgaagaccctgaccctgcgctacggcgaggatagctacgacctgcctgccgagttcctccgcgtgcattcgccctcggccgaggtccagggccacggcaacccggtattgcagtacggcaagctgaacgtcggcctggtcggcgtcgaacccgccggccagtacgcactgaagctgagcttcgacgacggccacgacagcggcctgttcacctgggactacctgtacgagctggcgacccgcaaggaccagctatgggccgactacctggcggagctggccagcgccggcaagtcgcgcgaccccgacgagtcggtcgtcaagctgatgctctga

SEQ ID NO: 318032 - DNA, 1344 bp, Pseudomonas aeruginosa
atgtccatgacgccccgcgagatcgtccacgaactcaaccgccacatcatcggccaggacgacgccaagcgcgccgtcgccatcgccctgcgcaaccgctggcgacgcatgcaactgccggccgagctgcgcgccgaggtaacaccgaagaacatcctcatgatcggccccaccggcgtcggcaagaccgagatcgcccgccgcctggcgcgcctggcgaacgcgccgttcatcaaggtcgaggcgaccaagttcaccgaggtcggctatgtcggacgcgacgtcgaatcgatcatccgcgatctcgccgacgccgcggtgaagatgctccgcgaacaggagatccagaaggtcaagtatcgcgccgaggacgccgccgaagagcgcatcctcgatgccctgctgccggccgcgcgtcccgccatgggcttcggcgacgagccggcacgcgaggacagcaacacccgccagctgttccgcaagcgcctgcgcgaaggccagctggacgacaaggaaatcgacatcgaggtggccgacaacccggccggcgtggagatcatggccccgcccggcatggaggagatgaccaaccagttgcagaacctgttctccggcatgagcaagggcaagaagaagacccgcaagctgaaggtcgccgaggccctgaagctgatccgcgacgaagaggcggtgcgcctggtcaacgaggaagagctcaaggcacgcgccctggaggcggtcgagcagcacggcatcgtcttcatcgacgagatcgacaagatcgccaagcgcgccaacgccggcggcgccgacgtctcccgcgagggcgtacagcgcgacctgctgccgctgatcgagggctgcacggtgaacaccaagctgggcatggtcaagaccgaccacatcctgttcatcgcctccggcgccttccacctgagcaagccgagcgacctggttcccgagctgcagggccgcctgccgatccgcgtggagctcaaggccctcagtccgaacgatttcgagcgcatcctcaccgagccgcatgcctcgctcaccgagcagtaccgcgagctgctgaagaccgaggggctggccatcgagttcgccgaggacggcatcaagcgccttgccgagatcgcctggcaggtcaacgagaagaccgagaacatcggtgcccgccgcctgcatacgctgctcgagcggctgctggaagaggtctcgttcagcgccgccgacctggccagcgagcatagcgacaagccgatcctgatcgatgccggctacgtcaacagccacctcggcgagctggccgaggacgaggacctgtcccgctacatcctttga

SEQ ID NO: 318033 - DNA, 534 bp, Pseudomonas aeruginosa
ttgaccaccatcgtatctgtccgccgcaacggcaaagtcgtcatgggcggcgacggccaggtttccctgggcaacaccgtgatgaaaggcaacgccaagaaggtccggcgcctgtatcacggtcaggtactggccggtttcgccggcgccaccgccgatgccttcaccctgttcgagcgcttcgagcagcaattggagaaacaccaggggcacctggtccgcgccgccgtcgaactggccaaggactggcgcaccgaccgctccctgagccgcctcgaagccatgctcgcggtcgccaacaaggatgcctcgctgatcatcaccggcaacggcgacgtggtcgaacccgaacacggcctgatcgccatgggctccggcggcggcttcgcccaggccgcggccctggccctgctgcagcacaacgccgagctgagcgctcgggaagtcgccgagaccgcgctgaacatcgccggctcgatctgcgtcttcaccaaccagaacctgaccatcgaggagctggacagcgccgtctga

SEQ ID NO: 318034 - DNA, 696 bp, Pseudomonas aeruginosa
atggcaaagaagaaacccgcccccaagcgcggcgccagccgctaccaggcgcccgccgcgaagaacggcgttcccggctgggtctggctggtcgccggcctggccatcggcggcttcatcatgttcctgatgaagctcgaacccgggcgcaaggacgtccagcgcgaacgcccggacgcccagcgcccggccgccgtgcagggcaagcagccgcagcagaacggccaggcccagcagcccgcacaaacgcagacgccggcccaggccaagccgaagtacgagttctacaccctgctgccggagtccgaggtcgtggtgccgccggaagcggtaccggagaaggccccgccgccgcccacccccgccgagctggccaaggccgacgaagcgcgggccaaggccgcactcgccgggcaggtgccaccgccgctgccgaaagcggtggtcgccgccagcacgcagttcttcctgcaggccggctcgttccgcaagcagtccgacgccgaccgcgtgcgcgcgcagatcatcctgctcgggcagtcggtgaacgtcgaggccggcaacgtccgcgacgagacctggtaccgggtgatggtcggcccgttcaacagccgcgaccagttgtcccaggcgcagaagacactgtcctccaacggcttcagcaacctgctgttacagcaacgcaaggcccgctga

SEQ ID NO: 318035 - DNA, 1764 bp, Pseudomonas aeruginosa
atgaaagacacgattcgccagctgatccagcaagccctcgaccaactgaccgcggacggcaccctgcccgccggcctgaccccggacatccaggtggagaacaccaaggaccgtagccacggcgatttcgccagcaacatcgccatgatgctggccaagccggccgggatgaagccgcgcgacctggccgccaggctggtcgaggcaatccccgcccacgagcaactggccaaggtggagatcgccggccccggcttcctcaacttcttccaggatcacgtctggctcgccgccagcctcgaccgcgcactcgccgacgaacgtctcggcgtgcgcaaggcaggcccggcgcagcgcgtggtgatcgacctgtcctcgccgaacctggccaaggagatgcacgtcggccacctgcgttcgaccatcatcggcgacgccgtcgcgcgcgtcctcgagttcctcggcgacacggtgatccggcagaaccatgtcggcgactggggcacccagttcggcatgctgctcgcctacctggaagagcaaccggtcgacgccgaggccgagctgcacgacctggaggtcttctaccgcgcggcgaagaaacgcttcgacgagtctcccgaattcgccgaccgcgcccgcgaactggtagtcaagctgcaggccggcgaccccgactgcctgcgcctgtggacccgcttcaacgagatttccctgtcgcactgccagaaggtctacgaccgtctcggcgtgaagctgagcatgaccgacgtcatgggcgagagcgcctacaacgacgacctcgcccaggtggtcgccgacctgaccgccaagggcctgctcaccgaagacaacggcgcgttgtgcgtcttcctcgaagagttcaagaacgccgagggcaatccgctcccggtgatcgtgcagaaggccggcggcggctacctctacgccaccaccgacctcgccgccatgcgttatcggcacaacgtgctgcacgccgaccgcgtgctgtacttcgtcgaccagcgccaggccctgcacttccagcaggtcttcgaagtggcgcggcgcgccggtttcgttccggccggcatggagctggagcatatgggcttcggcaccatgaacggcgccgacggccgtccgttcaagacccgcgacggcggtacggtgaagctgatcgacctgctggaagaggccgagagccgcgcctatgcgctggtcaaggaacgcaacgagcagcgcgccgagcgtggcgaggagccgttcgacgaggtccagctgcgcgagatcggccgggtggtggggatcgactcggtgaagtacgccgacctgtccaagcaccgcaccagcgactacagcttcaacttcgaactgatgctgagcttcgaaggcaacaccgcaccctacctgctctacgcctgcacccgcgtggccagcgtcttccgcaagctcggccagggccgcgagcaactgggcgggaagatcgtcctcgagcagccccaggagctggccctggccgcacagctggcgcagttcggcgacctgatcaacaacgtcgcgctcaagggcgtgccgcacctgctctgcgcctacctgtacgagttggccgggctgttctccagcttctacgagcattgcccgatcctcaccgccgaggacccggcgcagaaggacagccgcctgcgtctcgccgcgctgaccggccgtaccctggaacagggcctggagctgctcggtctgaagactctggaacgcatgtaa

SEQ ID NO: 318036 - DNA, 2220 bp, Pseudomonas aeruginosa
gtgtcagacctgatcctacgcctagccctgccttcgccactccgccgcctgttcgactaccgcgcgccccgcggcattccgtgcagcgccctacagccggggattcgcctgctgctgccgttcgggcgccgggagctggttggcgttctgatagaggtgacggaccgttccgaagtacccgaagacaagctcaagcctgccctcagggtactcgacgccaagccgccgatgccggcgcacctgctcgaactctgtcgctggaccgcccagtactaccagcacagcctcggtgacaccctgtcctgggcgctgcccaacctgttgcgccagggcgagccggccgaggcgcgccagcagcgcttctggcatgccaccgcacaatccagcctcgacgatccgcgcctggcccgggcgccgcgccagcgccaggccctggcgattctcaagcagcatccgcacggggtgtcccatgagttgctgaaccagttgcagataaacaaggacagcctcgacctgctcaaggaaaaaggcctggtcgaactggaggtgcggcgccacagcaccccgccgcgcgaaggcggctggctggcccaggcggagttgccgctgaaccccgagcagcgcgccgccttcgaggcggttcgcgccagccacggcggtttccattgcttcctgctggccggggtcaccggcagcggcaagaccgaggtctacctgcaactgatccgcgaaaccctggccgcaggccgccaggccctggtgctgattcccgagatcaacctggggccgcagaccctggcgcgtttcgaacgccgcttcaacgcgcgcatcgccctgctgcattcggccctgaccgaccgcgagcgcctcgacgcctggctcgccgcccgggatggcgaggccgacatcgtcatcggcacccgttcggcactgttcactccattgaagcggccgggactgatcatcgtcgacgaggaacacgacgcctcctataaacagcaggacggactgcgctaccacgcccgcgacctggcactggtacgcgcacgcctggagaacgtgccgatcctgctcggttcggccacgcccgccctggaaagcctgcacaacgcccaggccggccgctacggcctgctgcgcctgacccagcgcgccggtggcgcgcacccgccgaaattcatccgcctcgacgtgaagagcatgccgctcgacgccggcctttcccgcccgctgcaacaggccatcggcgataccctggcggccggccagcaggtcctggtgttcctcaaccgccgcggcttcgctccgaccctgctttgccacgactgcggctggatcagccaatgcccgcgctgcgacgcgcggatgaccgtgcaccagggcagcggcgagttgcgctgccaccactgcgaccaccgccagcggccgccgatgaactgcccgcagtgcggcaagctcgacctgcgtccggtaggcgccggcaccgagcgcgccgaggaacgcctgcggattctcttcccgaaccatccggtgctgcgcatcgaccgcgacagcacctcgcgcaagcacgccatgcgcgacctcttcgccaccatcaacagcggtgagccatgcatcctggtcggcacccagatgctcgccaaggggcaccacttcccacgggtcaccctggtggcgatcctcgatgccgatggcggcctgttttccgccgacttccgcgccagcgaacgcatggcccagcagatcgtccaggtcgccggccgcgcaggacgcgccgaggagcccggacgggtactgatccagacccacctggccgatcacccgctgctggtccagctcaccgaggacggctacttcgcctttgccgaacaggccctcagcgaacgccgcgccgccggcctgccgcccttcgcccacctcgccctgctgcgcgccgaagcgcacaagccgggccaggcggaagccttcctcgacagcgcctgcagtgccgccgagcaattgctcgagcagatgggcggaccggaggtggaactgctcgggccggtgcccgcgcccatggagcggcgtgccggcaagcaccgcgcgcaactgctgctgcagtgcatgagccgggcgccgctgcatcgcctgctgacgccctggctgcagagcctcgaacagttgcccggcgggcgccaggtgcgctggtcgctcgatatcgatccgatcgacctgttctga

SEQ ID NO: 318037 - DNA, 216 bp, Pseudomonas aeruginosa
atgaaagcggacatccatccgacttacgaagctatcgaagctacctgcagctgcggtaacgtcatcaagacccgttccaccctgtgcaagccgatccacctggacgtgtgctccgaatgccacccgttctacaccggcaagcagaaggtgctggacaccggcggccgtatcgaccgcttcaagcagcgtttcggcgtattcggcgccaccaagtaa

SEQ ID NO: 318038 - DNA, 753 bp, Pseudomonas aeruginosa
atgtccgtggtttccgccttcgccggtgcggcggaggcctgccggcctaccggcgccttgcagaacgtcgaggtggcgcgggtggtggacggcgataccgtgcgcctgcgcgatggccgcagcgtgcggctgatcggtatcaacgcgcctgagctggcgcacaacggtcgcaccaccgagcccttcgccgaagccgcgaagcagcgactgcaggcgctggtatcggccagcgacgggcgtctcgccctgcagccgggccgccaggcccgcgatcactacgggcggaccctggcgcacctgttcgatgccagcggcgccaacctcgaggcgcgcctgctcggcgagggcctgggctacctggtggcggtcgcgccgaacaccgagctgacggcctgtcagcaagcagcggaacgtgcagcgcgttcggctaatctgggtgtatggaagcgttcgccggtgctttcgctcgatcgactggcgcagagcggcttcgccgtggtccgcgggcgggtgctcgaggtcgaacgcaaccggggcggtatctggctggagatggacggtccgctggtcctgcggatcgagccgaaggtgctcaaggcgttcgatgcgaaacgggtgatgcagatggcgggacgttcgctggaagtgcgtggctgggtggtcgatcgttcccgccgtggcgctgtgccggccggcaaggcgcgctggcagatgtcggtgaccgatccggcgatgctggaatggttgccatga

SEQ ID NO: 318039 - DNA, 1440 bp, Pseudomonas aeruginosa
atgaagaccgcctggctcctgctgctgttgctgggagtcggcgcgctgggcggctgcgcggtgaacccggccaccggcaagagcgatttcgtgatgatgagcgagcagcaggaactcggcatgggcgctcgctacaaccaggaaatcctcaagcagttcccccgctacaacgatgaaaagctccaggcctacgtgcaacgggtaggcgagcgggtcgcccgcagcagccaccgcagcaatctgcaatatcatttcaccgtcatcgattcgccggacatcaacgccttcgccctgccgggcggctacatctatatccatcgcggactgatcgcctaccttggctccgaggccgaactggccgcggtgctcggtcatgaggtcggccacgtcacggcgcgccacagcgtgcgccagcagagccaggccagcgcctggaacatccttggccaggcggtggcgatcggcaccggggtcggtgccgccggcgacctggccaacgtgctcggcacggccttcgtccgcggctacgggcgtgacatggaactggaggccgatggtctcggcgctcagtacctggcccgcgccggctacgatccgacggcgatgatccaggtggtgcgggtgctgaagaaccaggaggacttcgctcgcgaagaggctgcgcgcaatggccaggcggtacaggccggcggctaccacgggttgttcgatacccatccggacaacgaccggcgtctgcaggaagtggtcggcccggcccggcaactggccaacggacagcaggaagtggggcgcgaggtctttcttcgccatctggaaggcatgccgttcggcgactcggcatcggccggggtgcgtcgcgggcagaacttctaccatgccgagctggacttcaccctgagctatccggcgggctggaagatcctcaaccagcccagtgccctgcttggctatccggcggacgagcagtcgttcatcggcatgaagctggtgccccatgattcccgcctgacgcccgcggagttcctgcgcaagaacgccgggcaacggctggcccaggaagagtcgctgaagcaggcaggactgaacggctacacggcggtggtgccaggcaacccggcgcgacgggttgctgtgatctaccagggcgaccgcgcctacctgttcgtcggcgtggtcaaggtcggttccctggagacccaggacgaccgcttcctcagcgtgatccgcagcttccgtccgctgcgcgacaaggagcgggccctggcgcagccgcgacgcctgcacctggtgcaggtcaaggcggggcagacgctggagcaattggcggctggcggcgaggggtcattgagtgactccgtggctcgtctgcgtctgctgaatgacctttatccgagcggtgaaccccgtccgggcgattggcttaaagtcgtacgctag

SEQ ID NO: 318040 - DNA, 1269 bp, Pseudomonas aeruginosa
atgtccgatcttaaaaccgctgccctcgaatatcacgcacaaccccgtccgggaaaactgagtgtcgagctgaccaaacccaccgctaccgcccgggacctgtccctggcctacagcccgggtgtcgccgagccggtgcgtgaaatcgcccgcgatgccgagctggcctaccagtacaccggcaagggcaacctggtggcagtgatttccgacggcaccgcgattctcggcctgggtaacctcggcccgctggcctccaagccggtgatggaaggcaagggtgtgctgttcaagcgcttcgccggcatcgacgtgttcgacatcgaggtcgacgccgagagcccgcaggctttcatcgataccgtcaagcgtatttccatcaccttcggcggtatcaacctcgaggacatcaaggctcccgagtgtttcgagatcgagcgcgcgctgatcgaacagtgcgacatcccggtgttccacgatgaccagcacggcaccgccatcgtgaccgcggcgggcatgctcaacgcgctggaactggccggcaagaagctggaagaagcgaagatcgtctgcctcggcgccggcgctgccgccatctcctgcatgaagctgctggtgagcatgggcgccaaggtcgagaacatctacatgatcgaccgcaagggcgtgatccacgccggtcgcgacgatctgaaccagtacaagtcggtgttcgccaccgagaccgacaagcgcaccctggccgacgccctggagggcgccgacgtgttcgtcggcctgtccggcgccaacctgctggagcaggaagacctcaagcgcatggcgccgaacccgatcgtgttcgcctgctcgaacccggacccggagatcaagccggaactggcccatgccacccgtaacgacgtgatcatggctaccggtcgttccgactatccgaatcaggtcaacaacgtgctcggtttccccttcatcttccgtggtgccctggacgtacgtgccacgcgcatcaacgaagagatgaagatcgccgccgccctggccctgcgcgacctggccaagcagccggtcccggaagacgtctgcgccgcctatggcgtggacaagctggaattcggccgcgagtacatcattccgaagccgatggacaagcgcctgatcaccgtggtctccgatgccgtggccaaggctgccatcgagaccggcgtggctaccctgccgtatccgaagaactatccgctgaaatcggtggacgacgtcttcaacggctga

SEQ ID NO: 318041 - DNA, 2469 bp, Pseudomonas aeruginosa
atgcgcctgctgaagttcctgtggtggacttgcgtcaccctgatttgtggagtgctgctcagtttcagcggcgcctatctctatctgagtcccagcctgccctcggtggaagctctgcgtaacgtccagctgcagatccccctcaaggtctacagcgaggacggcaagctgatctccgagttcggcgagatgcgccggacgccgatccgcttcgccgacatcccgcaggacttcatccatgccctgctgtccgccgaggacgacaatttcgccaaccattatggcgtcgatgtgaaaagcctaatgcgcgccgccgcgcaattattgaaaagcggtcacatccagactggcggcagcaccatcaccatgcaggtagcgaagaactacttccttaccaatgaaagaagcttctcgcgaaagatcaatgaaatcctcctggccctgcagatcgagcgacagctgaccaaggacgagatcctcgagctctacgtcaacaagatctacctgggcaaccgtgcctatggcatcgaggctgccgcacaggtctattacggcaagccgatcaaagacttgagcctggccgagatggcgatgatcgccggcctgccgaaagcgccctcgcgctacaacccgctggtcaacccgacccgcagtacggagcggcgcaactggatcctcgagcgcatgctcaagctcggcttcatcgaccagcaacgctaccaggccgccgtcgaggagccgatcaacgcctcctaccacgtgcagacccccgaactgaatgcgccctacatcgccgagatggcccgtgccgagatggtcggccgctacggcagcgaggcctataccgagggctacaaggtcatcaccacggtccgcagcgacctgcagaacgccgccagccaatcggtccgcgacggcctcatcgactatgaccagcgccacggctaccgcggcccggagacccgcctgccgggccagacccgcgacgcctggctcaagcacctgggccagcagcgcagcatcggcggcctggagccggcgatcgtcacccaggtggaaaagagcgggatcatggtgatgacccgcgacggcaaggaagaagccgtgacctgggacagcatgaaatgggcacgccccttcctcagcaacaacagcatgggcccgatgccgcgccagcccgccgacgtggcccaggccggcgaccagatccgcgtgcagcgccaggaagacggcaccctgcgcttcgtacagattcccgccgcacagagcgcgctgatctcccttgacccgaaggacggggcgatccgctcgctggtcggcggcttctccttcgagcagagcaactacaaccgcgcgatccaggccaagcgccagccgggctccagtttcaagccgttcatctacagcgcggccctggacaacggcttcaccgccgccagcctggtcaacgatgcgccgatcgtgttcgtcgacgagtacctggacaaggtctggcgaccgaagaacgacaccaataccttcctcggcccgatcccgctgcgcgaagccctgtacaagtcccgcaacatggtctcgatccgcgtcctgcagggcctgggcatcgagcgggcgatcagctacatcaccaagttcggcttccagcgcgacgaactgccgcgcaacttctccctggccctgggtaccgcgacagtcacaccgatggaaatcgccggcgcctggagcgtattcgccaacggcggctacaaggtcaatccgtacgtcatcgaacgcatcgagagccgcgacggacaggtgctgtaccaggccaatccgccccgcgtgccggtggaagaacaggtcgctgcggatgcggaagacgccgggaatcctggtgaccccgagcatccggagagcgccgaaggcgaaggttcgatcgaagcccagcaagtcgccgccaaggcccagaccaccttcgagccgaccccggccgagcggatcatcgatgcccgtaccgcctatatcatgaccagcatgctgcaggacgtgatcaagcgcggtaccgggcgtcgcgccctggcgctgaagcgcaccgacctggccggcaagaccggcaccaccaacgattccaaggatggctggttctccggctacaactccgactacgtgaccagcgtctgggtcggcttcgaccagccggagaccctgggtcgccgcgagtacggcggtaccgtcgcgctgccgatctggatcaggtacatgggcttcgccctcaaggacaagccgatgcacaccatggccgagccgccaggcatcgtcagcctgcgcatcgacccggtgaccggccgttcggccgcgccgggcactcccggcgcctatttcgagatgttcaagaacgaggataccccgccctcggtcaatgaactgccgccaggcagcttccctggcagcccgctgccggatgacgaaggcgcgccgatcgacctgttctga

SEQ ID NO: 318042 - DNA, 1065 bp, Pseudomonas aeruginosa
gtgctagggctcataaagaagaaagcgaacaccttgctggggatcgacatcagctcgacctcggtaaagctccttgagttgagccgctccggaggccgctacaaagtggaggcctatgccgtcgagccgcttccgccgaatgcagtcgtggaaaagaacatcgtcgagctggaaggggtcggccaggcgttgtcacgggtgctggtcaaggcgaaaaccaacctgaagtcggccgtggtcgccgtcgccggttcggcggtgatcaccaagaccatcgagatggaggccgggctttccgaggatgaactggaaaaccagctgaagatcgaggccgaccagtacatcccctatccgctggaggaagtcgccatcgacttcgaggtccaggggctctccgcgcgcaatcccgagcgcgtggacgtactcctggccgcctgtcggaaagaaaacgtcgaggttcgcgaagcggccctggcgctggccggcctgaccgccaaggtggtcgacgtcgaggcctacgcgctggagcgctcctatgcgctgctgagcagccagctgggtgccgacaccgaccagttgaccgtggcggtagtggacatcggcgcgaccatgaccaccctgagcgtcctgcacaacggacgcaccatctatacccgcgaacagctgttcggcggtcgccagctcaccgaggagatccagcggcgttacggactctcggtggaggaagccggtctcgccaagaagcagggcggtcttccggatgactacgacagcgaagttctgcgtccgttcaaggacgccgtggtgcagcaggtttcccgctcgctgcagttcttcttcgccgccggacagttcaacgacgtcgactacatcgtcctggcgggcggtacggcgtctatccaggatctcgatcggttgatccagcagaagatcggcaccccgaccctggtcgccaacccgttcgccgacatggcgctgaacggcaaggtgaatgccggcgccctggccagcgacgctccggcgttgatgatcgcctgcggcctggcgttgaggagtttcgactga

SEQ ID NO: 318043 - DNA, 597 bp, Pseudomonas aeruginosa
atggcacggatcaatcttctaccctggcgcgaagagctgcgcgagcagcgcaagcagcagttcctggtgattcttggcggcgtcctggtggcatcggctgcgctggtattccttggcgaccagtacttcaccgcggccatcgagaaccagaacgcccgcaacgacttcctgcgcaaggaaatcgtcgtactcgacgcccggatcaaggaaatcagcgaactgaagtcgcggcgccagcaattgctcgagcggatgaagatcatccaggacctgcagggcaaccgtcccatcatcggacgggtgttcgaccagctcgtgcggaccttgcccgacggcgtgtatttcaccgacctgaagatgaccggcaagaacatcgccatcgccggcgcggccgagtccaacaaccgcgtttccaatctcatgcgcaacatggacgcgtccgagtggctgaccgccccgaccctgaacgaggtcaaggcggtgacccagggcgcggtggaccaggccaacgtgttccaactgaccgtgcagcagacgcagcccggcgaagaagacgccaaggcgaagcatggggttgcgcaaggagccaagaaatga

SEQ ID NO: 318044 - DNA, 624 bp, Pseudomonas aeruginosa
atgagtctggccagttccctggaaagtctgcgcaagatcgatatcaacgatctcgacctgaacaacatcggttcctggccggcggcggtcaaggtcatcgtctgcgtgctgctgaccgcggcggtcctggcgctgggctacaacttccatctgagtgacatgcaggctcagctcgaacagcaggccgcggaagaggagacgctcaagcagcagttctccaccaaggccttccaggccgcgaacctggaagcctacaaggcacagatgaaggagatggaagagtcctttggcgccttgctgcggcagttgcccagcgacaccgaggtacccgggctgctcgaggacatcactcgtaccggcctgggcagcggcctggagttcgaggaaatcaagctgcttcccgaggttgcccagcagttctacatcgagctgccgatccagatcagcgtggtcggcggctaccacgacctggcgaccttcgtcagcggcgtgtccagcctgccgcggatcgtcaccctgcatgacttcgagatcaagccggtcgcgcccggcagcacgtccaagctgcgcatgagcatcctggccaagacctatcgctacaacgacaaggggctgaagaaatga

SEQ ID NO: 318045 - DNA, 525 bp, Pseudomonas aeruginosa
atgagagcccgcctgattctgagcagcctgctgctcgccagcctggccggatgcggcggcggttccgatttcgccgatctgcagtcctacatggacgaggttcgcgcccggcccaagggcaccatcgagccgttgccgaagttccagccgtacgaggccttcacctatagcgccgcgtcgctacgcagcccgttccagccgccggtgaagatcgacctgaccgtgcggcagaagggcaacaaggtgatcaagcccgacgagacgcgggtcaagcagttcctggaaggcttcaacatcgagaccttcgagatggtcggcaccctgtccaacgcccagggcaccttcgccctggtgaagggcgcgggtggcgtgcaccgggtgagggtcggggactacctggggcgcaacgacggcaaggtcgtcggcatcagcgaaggaaaaatagacgtgatcgaaatcgttcctgacggagaggggaactggctggagcgtccgcgcagcctgactctcaaggaacgctcctga

SEQ ID NO: 318046 - DNA, 2145 bp, Pseudomonas aeruginosa
atgaacagtggcctctcgcgcctcgggatcgctttgctggccgccatgttagcgccggcattgctcgccgcggacctggagaaactcgacgtggcggcattgcctggcgaccgggtcgagctaaagctgcagttcgacgagcccgtcgccgcgccgcgtggctataccatcgagcagccggcgcgaatcgccctcgatctgccgggggtacagaacaagctcggcaccaagaaccgcgagctgagcgtgggcaatacgcgcagcgtcacggtggtcgaggcgaaggatcgcacacggttgatcatcaacctgaccacgttgtcgtcctacaccacccgggtggaaggcaacaacctcttcgtggtggtcggcaattcgccggccggcgccagcgtcgcttccaccgctccggtcaaggctagcccggctccggccagctatgcccagccgatcaagcccaagccgtacgtgccggcgggtcgtgccattcgcaacatcgatttccagcgtggcgaaaagggcgagggcaacgtggtcatcgacctgtccgacccgaccttgagcccggatatccaggagcagggcggcaagatccgcctggacttcgccaagacccagctgccggatgcgctgcgggttcgcctggacgtcaaggacttcgccacgccggtgcagttcgtcaacgccagcgcgcaatccgaccgtaccagcatcaccatcgagccgagcgggctctacgactatctggtctaccagaccgacaatcgcctgaccgtcagcatcaagccgatgaccacggaagacgccgagcggcgcaagaaggacaatttcgcctataccggcgagaaactgtcgctgaacttccaggacatcgacgtgcgttcggtactgcagctgatcgccgacttcaccgacctgaacctggtggcctcggataccgtgcagggcaatatcaccctgcgcctgcagaacgtgccgtgggaccaggcgctggacctggtgctgaagaccaagggcctggacaagcgcaagctcggcaacgtgctcctggtggccccggccgacgagatcgccgcccgtgagcgccaggagctggaagcgcagaagcagatcgccgagttggcgccactgcgtcgggaactgatccaggtgaactacgccaaggccgcggacatcgccaagctgttccagtcggtgaccagcgatggtggccaggaaggcaaggaaggcgggcgcggctcgatcaccgtcgacgaccgcaccaacagcatcatcgcctatcagccccaggagcgactggacgaactgcggcggatcgtttcgcagctggatattccggtgcgccaggtgatgatcgaggcacgcatcgtcgaggccaacgtcggttgcgacaagagcctcggtgtgcgctggggcggcgcttatcacaagggcaactggaacggctacggcaaggacggcaatatcgggatcaaggacgaggacggcatgaactgcggcccgatcgccggcaactgtactttccccaccacgggaaccagcaagtcgccgtcgccgttcgtcgacatcggcgccaaggatgccacctccgggatcggcatcggcttcatcaccgacaacatcatcctcgacctgcaactgtcggcgatggaaaagaccggcaacggcgagatcgtctcccagcccaaggtcgtgacctcggacaaggaaaccgcgaagatcctcaagggccaggaagtaccctaccaggaggccagctccagtggcgctaccagcacctcgttcaaggaggccgcgctgtccctcgaggtgaccccgcagatcaccccggacaaccggatcatcgtcgaagtgaaggtgaccaaggatgcgccggacttcgatcgcgcactgaacggcgtaccgccgatcaacaagaacgaggtcaacgccaagatcctggtcaacgacggcgagaccatcgtcatcggcggcgtgttcagcaacacccagagcaagtcggtggacaaggtgccgttcctcggcgacctgccttacctggggcggctgttccggcgcgatacggtctcggatgtgaaaaacgaacttctggttttcctgacaccgcggatcatgaataatcaggccatcgcaatcggtcgctga

SEQ ID NO: 318047 - DNA, 519 bp, Pseudomonas aeruginosa
gtggtcaacctgatcctcgtcggcccgatgggtgctggaaagagcaccatcgggcgcctgctcgccaaggagctgcatctcgcgttcaaggactccgacaaggagatcgaacagcggtgcggcgcgaatatcccatggatcttcgatgtcgagggcgaggtcggtttccgcgagcgcgagcaggccatgctcaccgaactctgcgccgccgacggcatggtgatcgccaccggcggcggggcggtgatgcgcgacggtaaccgccaggtgctgcgcgccggtggccgggttgtgtacctgcatgcctcggtcgagcaccagatcgcgcgcacggcgcgggaccgcaaccgccccttgttgcagaagcccaacccgggacagatcctccgcgacctgatggcgctgcgcgatccgctctaccgcgaaatcgccgatgtggtggtggagaccgacgaaaggccgccgcgcctggtcgtccaggaaattctcgaacgcctgcgcaagttgccgccccgctga

SEQ ID NO: 318048 - DNA, 1107 bp, Pseudomonas aeruginosa
atgcgcacacttcacgtcgatctaggcgagcgtagctatcccatttacatcggtgaaaacctgctgggcgacgcccgctggttcgcgccgcatatcgtcggtcgccgggtcgcggtgatcagcaacgaaacggtcgctcctctctatctggaaaccctgctcaaggcactgcaaggccatgaggtcacccctgtggtgctgcccgacggcgaggcctacaagcagtgggaaaccctgcaactgatcttcgatgccctgctgaaggagcggcatgaccgcaagactaccctgatcgccctgggcggcggcgtcatcggtgacatggccggtttcgccgcggcctgctaccagcgtggggtcaacttcatccaggtgccgaccaccctgttgtcccaggtcgactcctcggtgggcggcaagaccgggatcaaccatccgttgggcaagaatatgatcggtgcgttctaccagccccaggcggtggtcatcgacaccgcgtcgctgaagacgctgccgtcccgcgagctgtccgccgggctggcggaggtgatcaagtacggtttcatttgcgacgaaccgttcatcacctggctggaagagcacatggatgccttgctggcactggagccgaccgttgtcaccgaggccatcgagcgctcttgcgcggcgaaggcccgcgtggtgggcgccgacgagcgcgagtcgggcgtgcgcgccacgctgaacctcggccataccttcggtcacgcgatcgagacccagcagggttacggcgtctggttgcacggcgaagcggtaggggcgggaaccgtgatggcactcgagatgtcgcatcggttgggttggctgagcgccgccgagcgcgatcgcggtacccgcctgctgcgccgggctggcctgcccgtggtaccgccggccgagatgacggcggaagattttatggaacacatggccgtcgacaagaaagtgctcgatggccgcctgcgtctggttttgctgcaaggactggggaatgccgtggtcaccggcgattttccccgtgagatcttggacgcgaccctgcgcaccgactatcgggccttggccgaccagcttggagatgaatga

SEQ ID NO: 318049 - DNA, 1650 bp, Pseudomonas aeruginosa
atgaccagcttgcatgccgatgaggccttcctgggccactaccaattcagtcacgacccgttcgcgccgcgcgttccgggtttcaagttcttcccggcgcagcgcaagccggtgctcggccagttgcaccatctggcccgctacagccagctcctgctgctggtcaccgggcccctgggcagcggcaagaccctgctgcgccaggcgctggtggccagcaccaacaaggatgcggtcctcagcgtggtgatctcggcgcgcaccgccgccgacgagacttcgttgctgcgccaggtggcgcagggcctgagcatcaaccaggcgagcctggaggcgatcctgaccaaggtggcgcagctggcgatcaccgggcaggacgtctacctgatggtggacgatgccgagcagctccaggacagcgcgctggaagtgctgttgctgctggcttccggcaccaacgagggacgcctgcatgtattcctgttcggtgagccgtcgttgctgccgcgcctggaggtgttttccgagggtgaggagcgcttccatgccatcgagttgcagccatacagcgaagaggaaacccgcgactacctggcccagcgtctcgagggcgccgggcagggcatcgagctgatttccaacgacctgctggtggacatccacgagcagtcggaaggctggccgggagcgatcaaccaggtcgcccgcgatgccctgatcgaagcgatgctggccaatcgtggcgcagcgcgcaaggcaaccggagggtctttcaacttgcccaagaagcatctggtgattcttgcggtcgtggccatcggcgtgatcgccgcctggttcatgcaaggcaagagcaagccggaggcgccgcagaccgcctctaccgaattgtccatgaatggcgctacgccggcccaggcccagcagccgggcagcggcccggccgtggagttcaacggctccagccagccgttgccgctaccgttggtcggcgagtcgcagccggtcattcgcgagccgctggcccaggccgccgggcaaggtggcgacgacgaaggcggcctgccgtccgccgcggtgccgcctaccgtttccagctcggctcctccggtgacgccgctggccaacaacggcgtcacgccgatgcatccggtgccgccggcgccgaccgaaccgaccgcgcctgcggcgaccccgactccggcgcagaccccggcaccggccgcgccggtcgccagcgccccggccagcaagccggccccggctccggccaagccggcggcgagcaagccggccaccaccgccgcggcgaagccggccccggctccggccgccaagccggccagcggtggcggtgcgggaagtcagtggtatcgcaaccagtctggtggtaacttcgccctgcagatcctcggtaccggctccgaagccaatgcccaggcgttcattcgccagcagggcggcggcgatttccgctacttcaagaaaaccctgcaaggcaagccgttctacgtcgtcacctatggcagcttcccgaaccgtgccgccgccctggccgcagtgaaaaaactgccgtccaaggtgcaggccggcaagccgtggccgcgtaccttcgccagcatccagcaggagatcggccaggcgcattga

SEQ ID NO: 318050 - DNA, 4446 bp, Pseudomonas aeruginosa
atgaaagcaggtctgtaccatcctgaaacgttcaaggataactgcggatttggcctgatcgcccatatgcagggcgagccgagccatcaacttctgcaaaccgcaatcgaagcactgacctgcatgacccaccgcggtgggatcaatgccgatggcaagaccggggacggctgcgggctgctgatccagaagcccgacctgttcctgcgtgccgtcgccagggaagccttttctgtcgacctgcccgagcaatacgcggtgggcatggtgttcttcaaccaggacccggtgaaagccgaggcggcacgcgagaacatgaatcgcgagatcgtcgccgccggactggagctggtcggctggcgcaaggtgccgatcgataccagcgttctcggccgcctggcgctggagcgcctgccgcagatcgaacaggtgttcatcggcggcgccggcctgagcgaccaggacttcgccatcaagctgttcagcgcacggcgccgctcgtcggtggccaacgccgccgacagcgaccactacatctgcagcttttcgcacaagaccatcatctacaagggcctgatgatgccggccgacctggccgccttctatccggaccttggcgacgagcgcctgcagaccgcgatctgcgtattccaccagcgcttctccaccaacaccctgccgaaatggccgctggcgcagccgttccgcttcctcgcccacaacggcgagatcaacaccatcaccggcaaccgcaactgggcccaggcgcggcggaccaagttcaccaacgaactgatccccgacctggaagagctcggcccgctggtgaaccgcgtcggctccgactcgtcgagcatggacaacatgctcgaactgatggtcaccggcggcatggacctgttccgcggcctgcgcatgatcatcccgccggcctggcagaacgtcgagaccatggacgccgacctgcgcgcgttctacgagtacaactcgctgcacatggagccctgggatggccccgccggcgtcgtgctgaccgacggtcgctatgccgtctgcctgctcgaccgcaatggcctgcgcccgtcgcgctgggtcaccacgaagaacggctacatcaccctggcttcggaaatcggcgtctgggactacaagcccgaggacgtcatcgccaagggtcgcgtcggcccggggcagatcctcgcggtggacaccgagaccggccaggtcctgcacagcgacgacatcgacaaccgcctgaagtcgcgccatccctacaagcagtggctgcggcagaatgccctgcgcatccaggcgaccctggacgacgaccatggcgtggccagctacgaccccgaccagctcaagcaattcatgaagatgttccaggtcaccttcgaggagcgtgaccaggtgctgcgtccgctcggcgagcagggccaggaagcggtgggctccatgggcgacgatacgccgatggcgatcctctcccggcgcatccgctctccgtacgattacttccgccagcaattcgcccaggtcaccaacccgccgatcgacccgctgcgcgaagccatcgtgatgtccctggaaacctgcctgggcgtcgagcagaacatcttcgaggaagccccgcaccatgccaaccaggcgatcctcaccactccggtgatctcgccggcgaagtggcggaccatcatgaccctggaccgcccgggcttcgaccgccacttcatcgacctcaactacgacgagtcgatgggcctggaggccgcggtgcgcaacatcgccgaccaggccgaggaggccgtgcgcggcggcaaggtgctgctgatcctcagcgaccgccatatcgctcccggcaaactgccggtgcatgctgccctggccgtcggtgcggtgcaccaccgcctggtgcagaccgggctgcgctgcgactccaacatcctggtggagaccgccaccgcccgcgatccgcaccatttcgcggtgctgatcggcttcggcgcctcggcggtctatccgttcctcgcctacgaggtgctggccgacctgatccgcaccggtgaagtgctgggcgacctctacgaggtgttcaagtactaccgcaaggggatctccaagggcctgatgaagattctctcgaagatgggcatctccaccgtcgcgtcctaccgtggcgcgcagctgttcgaggcggtgggcctgtccgacgaggtcaccgacctgtgcttcaccggagtcgccagccgcatccagggcgcgcgcttcgtcgatatcgagaacgagcagaagctcctggccgccgaggcctggagcaaccgcaagccgatccagcagggcggcttgctgaagttcgtctatggcggcgaataccacgcctacaacccggatgtggtgaataccctgcaggctgccgtgcagcagggcgactacgagaagttcaaggaatacaccgcgctggtggaccagcgcccagtgtcgatgatccgcgacctgttgcaggtgaagaccgccgcgcagccgctggcgctcgacgaggtggagccgctggaagccatcttcaagcgcttcgatgccgccgggatttccctcggcgcgctgtcgccggaggcccacgaggcgctggccgaggcgatgaacaccctgggcggtcgctccaactccggcgagggcggcgaggacccggcgcgctacggcacgctgaagagttcgaagatcaagcaggtggctaccggccgcttcggcgtgaccccggaatacctggtcaacgccgaggtcctgcagatcaaggtggcccagggcgccaagcccggcgagggcggccagttgccgggcggcaaggtcaacggcctgatcgcccgcctgcgctatgcggtgcccggcgtgaccctgatctcgccgccgccgcaccacgacatctactccatcgaagacctggcgcagctgatcttcgacctcaagcaggtcaacccgcaggcgctggtatcggtgaagctggtatccgagccgggcgtcggcaccatcgccgccggcgtggccaaggcctatgcggacctgatcaccatctccggctacgacggcggtaccggcgcctcgccgatcacctcgatcaagtacgccggctcgccctgggaactgggcctggcggaaacccaccagaccctgcgcggcaacgacctgcgcggcaaggtccgggtgcagaccgatggcggcctgaagacaggcctggacgtgatcaaggcggccattctcggcgccgagagcttcggcttcggtaccgcgccgatgatcgccctgggctgcaagtacctgcgcatctgccatctgaacaactgcgccaccggcgtggcgacgcagaacgacaagttgcgcaaggaccacttcatcggcaccaccgcgatggtgatcaacttcttcaccttcatcgccacggaaacccgcgagtggctggcgcgcctcggcgtgcgcagcctgggcgagatgatcggccgcaccgacctgctggagatcctccccggcgagaccgccaagcagcagaacctggatctcgctccgttgctgggcagtgagctgatcccggccgacaagccgcagttctgcgaggtggagaaaaacccgccgttcgaccagggcctgctggccgagaagatggtcgagctgtcgaaggccgccatcgaaggcctgagcggcggcgagtacgagctggacatctgcaactgcgaccgatccatcggcgcgcgggtatccggcgagatcgcccgcctgcacggcaaccagggcatggccaaggcaccggtggtgttccgtttcaagggcaccgcgggacagagcttcggcgtgtggaacgccggtggcctgcacctgtacctggaaggcgacgccaacgactacgtaggcaagggcatgaccggcggcaagctggtgatcaccccgcccaagggcagtccgttcaagacccaggaatcggccatcgtcggcaacacctgcctgtacggcgccaccggcggaaagctgttcgccgccggaaccgccggcgagcgcttcgccgtgcgcaactccggttcccatgcggtggtggaaggtaccggcgaccactgctgcgaatacatgaccggcggtttcgtctgcgtgctgggcaagaccggctacaacttcggctccggcatgaccgggggcttcgcctacgtcctcgacatggacaacactttcgtcgaccgcgtgaaccacgagctggtggaaatccagcggatcagcggcgaggcgatggaggcctatcgcagccacctgcgcaaggtcctggtcgagtacgtgaacgaaacggcaagcgagtggggcgcgaacatcctggaaaacctggatgactacctgcgtcggttctggctggtgaaaccgaaggcggccagcctcggttcgctgctgaccagcacccgtgccaacccgcaataa

SEQ ID NO: 318051 - DNA, 1434 bp, Pseudomonas aeruginosa
atgtctgaacgtctgaattccgaccgcctgaacaacgacttccagttcatcgaagtcgggcgcaaggacccgaagaagaagctgctgcgccagcgcaagcgcgagttcgtggagatccacgacctgttcaagccgcagcaggccgccgaccaggcccaccgctgcctgggctgcggcaacccgtactgcgagtggaaatgcccggtgcacaacttcatccctaactggctgaagctggtttccgaaggcaatatcctggccgccgccgaactgtcgcaccagaccaacaccctgccggaagtctgcggccgggtctgcccgcaggatcgcctctgcgagggcgcctgcaccctcaacgacggttttggcgcggtgaccatcggctcggtggagaagtacatcaccgatacggccttcgccatgggctggcgtccggacctgtccaaggtcaagccgaccggcaggcgcgtcgcggtgatcggcgccggcccggccggcctcggctgcgccgacgtgctggtgcgcaacggcgtgaccccggtggtgttcgaccgcaacccggagatcggcggcctgctgaccttcggcattcccgagttcaagctggagaagcacgtcctcagccgtcgccgcgaggtgttcaccggcatgggcatcgagtttcgcctgaacaccgagatcggcaaggacgtgaccatggagcagttgctcgatgagtacgatgccgtgttcatggggatgggcacctacacctacatgaagggcggtttccccggcgaggacctgccgggcgtacacgacgccctggacttcctgatcgccaacgtgaaccgcaacctcggcttcgagaagtcggccgaggacttcgtcgacatgaagggcaagcgcgtggtggtcctgggcggcggcgacaccgcgatggactgcaaccgcacttcgatccgccagggcgccaagtcggtgacctgtgcctatcgccgtgacgaagaaaacatgccgggctcgcgcaaggaagtgaagaacgccaaggaagagggcgtgaagttcctcttcaaccgccagcccatcgccatcgtcggcgaggaccgggtggaaggcgtgaaggtggtcgagacccgtctcggcgagccggacgcccgcggccgccgcagccccgaaccgatccccggttccgaggagatcatcccggcggaagccgtgctgatcgccttcggcttccggcccagtccggcgccgtggttcgagcgcttcgagatcgccaccgacagccagggccgcgtggtggctccggcgcaggcgcagttcaagcaccagaccagcaacccgaagatcttcgccggtggcgacatggtccgtggttccgacctggtggtgacggcgatcttcgaaggacgtaccgcggccgaaggcatcctcgactaccttggcgtctga

SEQ ID NO: 318052 - DNA, 1068 bp, Pseudomonas aeruginosa
atgactgccctgaagaacgaccgcttcctccgcgccctgctcaagcagcccgtcgatgtcacccccgtctggatgatgcgccaggccggtcgttacctgccggaataccgtgccacccgtgccaaggccggcgatttcatgagcctgtgcatgaacccggagctggcctgcgaagtgaccctgcagccgctggaccgttacccgcagctggacgccgcgatcctcttctccgatatcctgaccattcccgatgccatgggccagggcctgtacttcgagaccggcgaaggcccgcgcttccgcaaggtggtctcgtcgctggccgacatcgaggcgctgccggttcccgatccggaacaggacctgggctatgttatggatgccgtgcgcaccatccgccgcgagctgaacggccgcgtaccgctgatcggcttctccggcagcccctggaccctcgccacctacatggtcgagggcggctcgagcaaggacttccgcaagtccaaggcgatgctctacgacaaccctcaggccatgcacgctctgctggacaagctggcgcaatcggtgaccagctacctcaacgggcagatccacgccggcgcccaggcggtgcagatcttcgactcatggggcggcagcctgtcggcggcggcctaccaggagttctccctgacctacatgcgcaagatcgtcgatggattgatccgcgagcacgacggacgccgggtgccggtgatcctcttcaccaagggaggcggcctgtggctggagtcgatggccgaggtcggcgccgaggcgctgggcctggactggacctgcgacatcggcagcgcccgggcccgtgtcggtgagcgcgtagccctgcaaggcaacatggatccctcggtgctctacgccaatccggcggcgatccgcgccgaagtcgcgcggatcctggcggcctacggcaagggtacggggcatgtgttcaatcttggccacggcatcaccccggaagtcgacccggcccatgccggcgccttcttcgaggcggtgcacgagctgtcggcgcagtaccacggctga

SEQ ID NO: 318053 - DNA, 825 bp, Pseudomonas aeruginosa
gtggtggaaggcggcagcacccgcaactacagcttcggcaacgtggtctggtcggtcttcggcgccaccgataccgacggccagcccggcgcggaaatcctggtcaaggccggtcccgacctggtgatcgtttcccacgccagcaccacccagcgcaagtacccggtaggcaacgtctcctgggcgatcatgcgcgccaccgacgtcgacaacgtcgccggcgacgaagtcatcctcagcatcggcaacggcgtgcgcaccgtattcgatcgcacccgtacgcaacgcgacgccaccttcagctacaacggcacctggggcctgttcgacgtcgccgacgtggacggcgcgccgggcaaggaactggtgctgaacatgggcaacggcgtcaaggtcatcgacccgcgcaccagtggcgccaaggacttcaccttcagcggctaccacgcgctcgcacagatcgccgacctcgacggccagcccggcgcggagatcatcggccgcaccagcaccggcatctacgtgatcagcaacgccagttcccgcaaggaatacaacatcggcgccagcgcctgggcactctatggcggcaccgcggacaccgacggcaagccgggcaacgagctgatcgtggtgatgcagggcaaggtgcgggtcatccaccacgccagcggcgccagcagcgactaccgcatcggcgacgtcaactacagcatcgattcggtggccgacatggatggccagccgggcgcggaaatcctcgtgcgcgacgccaacggcaagctgttcgtgatcaacgaccgcaccggcaaggtaagcagttga

SEQ ID NO: 318054 - DNA, 1074 bp, Pseudomonas aeruginosa
atgagccgccgcacggactccgacgcaccgaccatcaccgccgcctacccgcgcctgctgctcggcctgctggaggaacgcggcctggacggacgcgcgctgctacgggaaatcggtctgtcgacgctgcgactggaagagccggaagcacgcgtcacatcgcagcagtaccaggcgatcgccgccgcggcgctcgcgctgagcggcgaccccggcctcggcgcacagctcgccttgcgcacgcctcccaccgcccatggcagcctgggctacgcgatgatggcctcggcgacgctcggcgatgccttgtgcctggcgctgcgctacatgccgctgctgcagggcaacgtcgaaatcagcctgctgcgcgaggacgagcaggtgatcctgcgcctgctgccaggccctgcgctcccgccggcgctgcaccggtacttcagcgaagccctgctgatcggcctgtatcgctccggcgcctggctgctcggcgaaccggccctggtcggcaggctcgacttcgactaccccgaacctgccgtgcctgtgccgctgccgcagtgccgctacgaccaggcccacgtccagttggtgttccccgccatcctgctcgcccgctcgctaccgatggccgatccggctgcgttgcgccgcgcccgcgaacactgcgagcgcgaactggcgctgctcgatgccggccgccgggacatctgcgcccgcgtgcggctggagctggaacgccaggaacagcgcttccccaacctggaggaagtagccgcgcgcctgcacctgtccagccgcagcctcaagcggcatctgcatgacgccggcaccagctttcgccagttgctcggtcaggctcgccagcgccaggccttgcgattgctgcggcgtcccgaggtgtcgttgcagcgtatcgccctgtacctgggttacagcgatccaaccaacttcacccgcgccttcaagcgctggaccggcgagccgccgagcgacacccgcgcccgcctgctgggcgggcaaccagtttcacgaacaaatgccaagcgctcgacaaatccctcgcgtttcccttga

SEQ ID NO: 318055 - DNA, 930 bp, Pseudomonas aeruginosa
atgcatccctgggcacgacgcaacattccacaactggccgggcgcctggcgctggtcaccggcgccaacagcggcctgggttggcaggcggcgcgcacgctggccggcaaaggggcgaccgtggtgatggcctgccgcaatcgcgaacaggcggagcgggcgcggcgggcgatcctcgacgagtatccccaggcacgcctggagctggccgatctcgacctggccgacctcgcctcgatccgcgcctgcgccgccggtttccgtcagcgccacgaacgcctcgatctcttgttcaacaacgccggagtgatgttcctgcccctgcggcgtacccgcgacggtttcgagatgcagatgggcaccaatcacctcggccacttcgcccttacgggactgctgctggagtcgttgctggccgctccacggcccagggtggtgggcatgaccagcggtttcaaccagttcggccggctgccgctcgacgacctcaacgccgagcgcggctacaaccgctatctcgcctattgccacagcaagcaggccaatctgctgttcagcctggagttgcagcgccgcgccggccagcggggcgtgcttctgcagagcctggcggcgcatccgggctacgcggcgaccaacctgcagtacgcggcgccggcgatgtccggttcgcgcctgggacgctgggcgatgaaggtggccaacggagcgttcgcgcaatcggcggagatgggggcgttgccggcactttccgcgctgaccgaacagcgctggtatggcggcgcctatgttggcccggatcgctggctggaaacccgcggttatccggcggcggcgcggattccgcggaatgcgcgcgacctggggctggccgcgcggctgtgggcgctatcggaagaactgaccggagtacgcttctggtcggagtga

SEQ ID NO: 318056 - DNA, 1317 bp, Pseudomonas aeruginosa
gtgagcaatccgcaagtccggccacaggccgaagaagaacccgcgttaatcgaggcggcccgcgaagcagccaacgaggtgctggaagccgccaccgaagtcgaacgctatatcgaaaaaggcaccccgcagttcatgcgcacctccctggcgctgttctccggcggtttcgccacctttgccctgctctactgcatccagccgatgatgccggtgctgtccaaggcgttttccatcagcgccgcggaaagcagcctggcattgtccgtcgccaccgccatgctcgcccttggcctgctggtcaccggcccgatctccgacgcgatcggtcgcaagccggtgatggtcgtctcgctgctggccgccgcgctgttcaccctcggcagcgcggtgatgcccacctggcatggcgtgctgctgatgcgcgcgctggtcgggctgtccttgagcggcctggccgcggtggcgatgacctatctcagcgaagagatccatccgcagcacatcggcttgtcgatgggcctgtacatcggcggcaacgccatcggcgggatgagcggacgcctgatcagcggcgtcctggtcgatttcatctcctggcatgccgcgctggcggtcctcggcggcctggccctggtcgccgcgctggtgttctggcgcgtgctgcccgaatcgaaacacttccggccggcaccgctgaagccggcgaccctgctcaacggctaccgcttgcacttccgcgacgccggactgccctggctgttcctgatcggtttcctgctgatgggcagcttcgtcaccctgttcaactacatcggctaccgcctgctggccgagccctaccacatgagccaggcggtggtcggcgtgctctcggtggtttacctctcgggcatctacagctcggcctgggtcggttcgctggccgacaagctggggcgacgcaaggtgctctgggcggtcatcctgctgatgctcggcggcctgctgctgaccctgttcgagccgatcccgctgatgctcgccggcctgctgctattcaccttcggcttcttcggcgcgcactcggtggcgagcagctggatcgggcgccgcgccctgcgcgccaagggccaggcctcgtcgctctacctgttcagctactacgtcggctcgagcctggccggcaccctcggcggggtgttctggcattactacggctggaacggcatcgggctgttcatcggctcgctgctggtggtcgcggtattggtctcgctgcacctggcgcgcctgccggccctgcctggcaacaccctggcgcaggccgcccactga

SEQ ID NO: 318057 - DNA, 906 bp, Pseudomonas aeruginosa
gtggaactcaggcacctgcgctatttcatcgccgtcgccgaggagctgcacttcggccgcgccgccgagcgcctggggatctcccagccgccgttgagccagcagatccaggcgctggaggaggaaatcggtgcgcgcctgttcgagcgcaccaaccgccgcgtcgaactcaccgacgccggccggctgttcctcgacgagtcccgccaggtgctggcccaggtagacaaggcggtgctgctggcgcgtcgggcccacctgggggaactgggcgagctgaagatcggtttcacttcctcggcacccttcacctcgaccatacccagcagcatccatgccttccgcaaggcctatccggacgtacacctcgacctgcaggaaatgagcagccgccaggtactcaaggcgctgctcgaggaaagcctgcaggtgggcgtgatccgcccgctggcgctgccggatgcggtgcattgggtggagttgttccgcgaaccgctggtggcggtgctgcgggccgaccatccgctggcggccggcagcgaggatggcctggccatcgccgccctggccgaggagcccttcgtgttcttcccgcgcagctacggcaccgggctctacgaccaggtcatcgccctgacccgacaggccggcttcagcccgcgcatcgcccaggaggccagcgaggcgatgaccatcatcggcctggtctcggccggactgggggtgtcgatcctgccggcgtcgttccgccgcacccgggtcgacggcgtggtctaccgcaccctgagcgatcccgaggcgacgactgcggtatggctggtccgtcggcagaacgagggctcgccgctggcgctgtccttcatcgacctggtgacccgtgaggcggccagcctgcgccggcgctga

SEQ ID NO: 318058 - DNA, 768 bp, Pseudomonas aeruginosa
atgcggcgcgtggtgttcaatcagaaaggcggggtaggcaagtccagcatcgcctgcaacctggcggcggtcagcgcggcggagggctatcgcaccctgctggtggacctggacgcccaggccaactccacgcactacctgaccggactgaccggcgaggacctgccggtggggatcgccgacttcttcaagcagaccttgtcttccgggcccttcagcaagaagggcagggtcgagatctacgagacgccgttcgacaacctgcacatcgtcacctccagccccgaactggccgacctgcagccgaagctggagtcgaagcacaagatcaacaagctgcgcaaactgctggacgaactggacgaagactacgaccggatctacctggataccccgccggcactgaatttctacacggtatctgcgctgatcgctgccgatcgctgcctgattcccttcgattgcgacagcttctcccgccaggcgctgtatggccttctccaggagatcgaggaactgcgtgacgaccacaacgaagacctgcaggtcgagggcatcgtggtcaaccagttccagccgcgcgccagcctgccgcagcaactgctcgacgagctggtggcggaggaactgccggtgctgccggtgtacctgatgagttcggtgaagatgcgcgagtcgcaccaggcttgtaccccgctgatcttcctcgaaccgcggcacaagttgacccagcagttcgtcgagttgcacgggctgctcgaaagctga

SEQ ID NO: 318059 - DNA, 816 bp, Pseudomonas aeruginosa
atgatccgccacctcctggtcgcccacgacctcaccccggaagccgacgtcgccctcgcccgcgccgcccaactggcccgccagcacgatgcgcgggtcagcctgctgcacgtgtacgacccggggctatcggcgtcagcggtgaagaccgtcagcgccatgctgcagctcaagcgcaaggaggccggcctcgacgaggacagcgccatccacctgttcaggggccagccgatcgacggcatcctgcagcagacccgggcgctcgaaccggacctgttgctgatgggcgcacaccaccagaagaccttcgaacgcttcggcaacaccaccctcgaccaggtggtgcggcgcagccgggtgccggtgctgctcgccgtgcgcgaggcggacgaaccctaccgccaggcgctcagcgccctggacttttcccagtgcgcctgtaccgcgctgcgccaggcctaccgcctgctgccggtggaagccgacctgcacgccctgcacgtgttcgagtcccccgacgacagcgtgctcggcctgcccaggcagaatgccgcgcacctggccacccaggccgggctgatcgaacaattgctgagcgacgagcaggagcgcctgccgggcgtcgggccgcagctgagccacgaagtggttcccggcgtgctgccgtacagcctggacgccgcgttgaagcagcgccagccggagctgctcgccctcggccggcacagccgcaacgcgctgatgcaggcgctgctcggcaacctggcgcaacgttacctgcgccagccgagctgcgacgtcctggttacctcgtag

SEQ ID NO: 318060 - DNA, 453 bp, Pseudomonas aeruginosa
atgccactgcccaccgaactcgccaggcacctgaccgaagaaaagatcgccttcgtccagcgcagcggactcagggcggaagtcctcgaacccggctacgtgcgcctgcgcatgccgggcgccggcaacgagaaccacatcggcagcatgtacgccggggcgctcttcaccctcgccgaaattcccggtggcgcgctgttcctgaccagcttcgacagcgcccgcttctatcccatcgtcaaggagatgaccttgcgcttccgccgcccggccaagggcgacatacgcgtcgaggcacgcctggatgccgagcgcatccgccaactggaaaccgaggctggagagcgcggcaaggccgaatacagcctcgaactgcaactcaccgacgagcagggggaggtggtggcggaaagcaccgcgctgtaccagctacgcagccacgcgcggccctga

SEQ ID NO: 318061 - DNA, 1278 bp, Pseudomonas aeruginosa
atgaaactggaaaccctggccgtccacgccggctacagccctgacccgaccacccgcgcggtggcggtgccgatctaccagaccacctcctacgctttcgacgacacccagcatggcgccgacctgttcgacctgaaggtaccgggcaacatctacacacggatcatgaaccccaccaacgatgtactggaacagcgcgtcgcggcactggaaggcggggtcggggcgctggcggtggcctcggggatggcggccatcacctacgcgatccagaccgtcgccgaggccggcgacaacatcgtctcggtggccaagctctacggcggcacctacaacctgctggcccacaccctgccacgcatcggcatccaggcgcgcttcgccgcccacgacgacatcgccgccctggaagcgctgatcgacgagcggaccaaggccgtgttctgcgaaaccatcggcaacccggcgggcaacatcatcgacctgcaggcactggccgacgccgctcaccgccacggcgtaccgctgatcgtcgacaacacggtagccaccccggtgctctgccggccgttcgagcacggtgccgacatcatcgtgcactcgctgaccaagtacatgggcggccacggcaccagcatcggcgggatcgtggtcgactccggcaaattcgactgggcggcgaacaagtcgcgcttcccgctgctgaacacgcccgatccgtcctaccacggcgtcacctacaccgaggccttcggacccgccgccttcatcggccgctgccgggtggtaccgctgcgcaacatgggcgcggcgctctcgccattcaacgccttcctcatcctccaaggcctggagaccctggcgctgcgcatggagcgccactgcgacaacgccctcgccgtagcccgctacctgcaacaacatccgcaggtggcctgggtgaaatacgccggcctcgccgacaaccccgagcacgccctggcccggcgctacctggggggccgcccggcggcgatcctgtccttcggcatccagggcggcagcgccgccggcgcgcgcttcatcgacgccttgaagctggtggtgcggctggtcaacatcggcgacgccaagtccctggcctgccacccggcgagcaccacccaccgccagttgaacgcagaggaactggcccgcgccggagtctccgacgacatggtgcggctgtcgatcggcatcgagcacatcgacgacatcctcgccgacctcgaccaggccctggccgccgccgcacgctga

SEQ ID NO: 318062 - DNA, 975 bp, Pseudomonas aeruginosa
atgaagatacgcgacctcgatctcagccagagttcgatcaacaccgaacaccaggcgctaggtctgcctcctgtcgaagatttcgtcacccatccggacgaccacccggtactgcgcgccgccatgtgggcggcggtgctgatcctggtcggcctgctcgccttcctggcctggcgcctgttcttcgacaacggcggcagcagcggcttcgagatcatcgagcaggccctgaccagccgaggtttctggagcgcggtggcggtgggcttcttcgcccaggtgatcgacggtgcgctgggcatggcctacggcattactgccaccaccttcctgctcagcgctggcgccacgccggccgccgccagcgccagcgtgcacatcgccgaagtgttcaccaccggcttttccgggatttcccacgtcaagctcggcaacgtcaacaagtcactcttcctccgcctgctgctgccgggaatgatcggcgcggtgctcggcgccgtgctgatcacccgcttcgacggccaccagctcaagcccttcatctccgcctacctgctgctgatgggcctgtacatcctgagcaaggcctaccgccacgtgatcacgcgccgggcaccgcgccacgtggccaagctggcactcttcggcggcttcgtcgatgccgccggcggcggcggctggggcccggtggtcaccagcagcctgatcggctcgggtagcgacccgcgcaccaccatcggctcggtgaacttcgccgagttcttcctgaccatcgccagcgccacctccttcatcctcctcgccggccagccggacacctggaagatggtcgccggactggtcttcggcggcctgttcgccgcgccgttcgccgccctgctgtgcaagaagctttcgccgcgcaccctgctggtcatcgtcggcaccctgatcaccctgatcagcgcctacaacatctacatcggcctgcgctga

SEQ ID NO: 318063 - DNA, 1461 bp, Pseudomonas aeruginosa
ttgaaatcactcgacgacctcgacttcgacaaccgcttcgcccgcctgggcggcgccttctccaccgaagtcctgcccgaccccatcgccgagccgcgcctggtggtagccagccccgccgccctggcgctgctcgacctgccagcggaaaccagcgacgaagcgctgttcgccgaactgttcggcgggcacaagctgtggtcggaggccgagccgcgggcgatggtgtattccggccaccagttcggctcctataacccgcgcctgggcgacggccgcggcctgctgctcggcgaggtgatcaaccaggccggcgagcactgggacctgcacctcaagggcgccggccagaccccctactcgcggatgggcgacgggcgcgccgtgctgcgctcgtcgatccgcgagttcctcgcctccgaagcccttccggcactgggcattcccagcagccgggcgctctgcgtgatcggttcgagcacgccggtctggcgcgagaagaaggaaagcgcggcgacgctgctgcgcctggcgcccagccacgtgcgcttcggtcacttcgaatacttctactacacccgccagcacgaccagttgaaacagttggcggcgttcgttctggaacaccacttcgccgactgcaacgcagccgagcggccatacgcggcgatgttccgccaggtcgtcgagcgcaacgccgaactcatcgcccgctggcaggcctatggcttctgccacggggtgatgaacaccgacaacatgtcgatcctcggcattaccttcgactacgggccctacgccttcctcgacgatttcgacgccaatcacatctgcaatcactccgacgacgccggccgctactccttcagcaaccaggtaccgatcgcccattggaacctggccgccctggcccaggcgctgacgccactggtggaagtggacgaactgcgcgccagcctcgacctgttcctgcccctctaccaggcccactacctcgacctgatgcgccggcgcctgggcctgggcgtcgccgcggagaacgaccatgccctggtccaggaactgttgcagcgcatgcagggcagcgcggtggattactcgctgttcttccgccgactcggcgaagaaactccggagcgggcgctggccagcctgcgcgacgacttcgtcgaccgcgaggccttcgaccgctgggccgaggcctaccgccggcgcgtcgaggaagaaggcggagaccaggagtcgcggcgccggcgcatgcacgcggtcaatccgctctatgtgctgcgcaactacctggcacagcaggccatcgaagcggccgagcagggcgactacacggaagtccgcttgctgcaccaggtactgagtcgcccgttcgaggaacagccgggcatggagcgcttcacccggcgcccgccggactgggggcggcacctggaaatcagttgctcctcctga

SEQ ID NO: 318064 - DNA, 3357 bp, Pseudomonas aeruginosa
atgcctgccctccgctccctgatcgctattcttttcctcggcctctgccttgccagtccgccgctcctcgcccagtccgagccgccctcggccgagaccgtccagcaaagcctcgacaagctggccgagcgcaagctcgccgaagccgaccagaaggtcgccaaggccagcctcgaacagaccctcaagttcctcgccgcgcgcgacgaagcgctgcagagcctggaggacctgaaaaagcgcctgagcgacgcgccccggcagatcgaggaaaaccagcgcgaactggagcgcctgaagaagaccaaagaacgtccggtcagcgaacgctacagcggcgagagcgcggcccgcctggaaatgctgctcaacgaccgcaccacccagcaggccgagtggcagaaagccctgggcgaggccaacagcctgtcgatcaccgccgagacccgtccggaacgagcccaggccggcatcagcagcatgcaggcacggatcctggaaatcggctcgctgctcaaggccggcaaggaaagcggcaagacgatcaacgccgaccgtcgcggcgagctgctcgccgagcaggccgcattgaccgtgcagagccagctgttgcgccaggagctggccggcaacaacctgctgcaggacctcggcaagagccagcacgatctgctcaccgagaagatctcgcgcctggaaaaggaaaccctcgacctgcaggcgctgatcagcgagaagcgccgcgagcagtcggaaaagaccgtcgccgagctgtccaaggaaggcgcccagggggccggcaccgacagcctgctgagccaggagaacgccaagaacctgcgtctctccgactacctcctgcgtgccaccgaccgcctcaacgtgctcacccggcgcaacctcgagaccaagcagcaactggacaacctgacccagtccaaccaggccctcgaggaacagatcaacgtcctgcgcggcagcctgctgctgtcgcgcatcctctacaagcagaaacaggcgctgcccaagatcaaggccgaccagagcctggccgacgagatcgccgacctgcgcctcggccagttcgaactgaaccaggaacgcgacaagctggcgaccccgcagcaatacctggacgacctgctcgcccagcagcccagcgagcaggtcacgccggaactgcgcaaggatctcgacaccctgttggcaacccgttccgagttgctcgaacggctcaaccacgaactcaacgcgctgctcaacgaagcgatcaccttgcagttgaaccagaaacagttgctttccaccagcgagagcctgcgcaccaccctcgacgagcagatgttctggattcccagcaaccagccgctcgacctgtcctggttcaagatgaccccgaccctgctgaagaaccagctcaccgagatcccctggggctccggggtgcgtgaactgggcgaaggcctggtcgatcggccgctgctgttcctgccgctgttcctgctgatcgccgcgctgctgtggaaacgccgctacctgtacgacaagctggcggagctgaacgacgacatcggccacttcaagcgcgacagccagctgcataccccgctggcgatcctgatcaccatcctcctcgccctgcccggcaccctgaccttcgccgtcgccgggctggccctgctgctggacgcccgcggccagaacgccaccctcggcagcgccctgctggaaatggcccaggtctggctgctgttctacaccgcccatcgcatcctcaccccgggcggcatcgccgagcggcatttccactggagccgcgaacaggtcggcttcctcgaccggcacctggtccgcctcggcgttgtggtcctggcgctggtcggcgtggtgacggtggccgagcaccagccggcgagtctggccgacgacgtgatcggcatcgccgtggtcctgctcggctacgcggccatggcctggctgctcagccgcctgctgttcagcagccccggcgacgagcgtccgtcgctgatcaagatgatcgtcggcatcctcttcaccgcgctgccgctggtgctcttcgtcgcggtctgcttcggctactactacacctcgctgaagctcaccgaccgtctcatcgataccctttacctgctgctgctctggttcgtcatcgaggccgccttcgtccgcggcctgggtgtggcggcccggcgcctggcctacgcccgggccctggcgaaacggcagaacgcggcgaaggaaggcgtcgacggcgagaccaacgtcgaggagccgaccctcggcatcgagcagatcaaccagcaatcgctgcggctgatccgactggccctgctgatcggcttcatcgtctgcctgtactgggtctgggccgacctgatcagcgtgatctcctacctcgacaacgtcaccctgtaccagtacaccgccggcaccggcgaagcggccaccagcgtgccgatcagcctgcgcgacttcctcgcggcgctggccatcgcggtggtcaccgtggccctggcgcgcaacctgcccggcctgctggaagtcctggtactgcagcgcctgaccctggcccagggcagcgcctacgccaccaccaccctgctttcctacgccatcagcggcatcggcatcgtcagcgccctgtccaccctcggggtcagctgggacaagctgcaatggctggtggcggcgctctcggtaggcctcggtttcggcctgcaggcgatcttctccaacttcgtctccggcctgatcatcctcttcgagcgtccggtacgaatcggcgacgtggtgaccatcggcaacctgtccggcacggtcagccggatccgcatccgcgccaccaccatcaccgatttcgaccgcaaggagatcatcgtcccgaaccagaccttcatcaccgggcaactggtgaactggtcgctgagcgataccgtgacccgggtcaccatcaagatcggcctggcctacgagaccgacctgccgctggcgcgcaagctgatgatgcaggcggtcaaggaaaacccgcgggtactgcgcgacccggagccgctgctgtacttcctgaccatcagcgccagtaccttcgactacgagctgcgcttccacgtccgcgaactgggcgaccgcaacccctctaccgacgagatcctgacgaagatcgccaccagcttccgcgaacacaagatcgacatggctttcaaccaggtcgatgtgttcgtcaagaacctccagggccagcaggtccagctgttcgtcggcgagccgcagcacagcggcgtcggcaatccgcccgcgctcaagggccaggacggtcccgccgaaccgacccgctga

SEQ ID NO: 318065 - DNA, 1743 bp, Pseudomonas aeruginosa
ttggacgccgtcaccgtcaataatttcttcctgatcggggcggtgctggtcggcatgagcatcctcgtcagctcgctgtcctcccgcctgggcatcccgatcctggtgatcttcctcgccgtcggcatgatcgccggcaacgacggggtcggcggcatcgtcttcgacaactatccgatggcctacctggtgggcaacctggcgctcgccgtgatcctcctcgacggcggcctgcgcacccgcgtctccagcttccgcgtggcgctctggccggcattgtcgctggccaccctgggcgtgctggtgaccaccggcctgaccggcatcgcggcagcctggctgttcgacctgcactggatggaaggcctgctgatcggcgccatcgtcggctccaccgacgccgccgcggtgttctccctgctcggcggcaaaggtctcaacgagcgggtcaccgcgaccctggaaatcgaatcgggcagcaacgacccgatggcggtgttcctcaccgtgaccctgatcgagatgctcgccagcggccagaccggcctcagctggggcttcgccctgcacctggtgcagcagttcggtctcggcgccctgctcggtcttggcggcggctggttgctgctgcaactgatcaaccgcatgcacctggccggcggcctctacccgttgctggtgatcagcggcggcctgctggtgttcgccctggccaacgccgtcggcggcagcggcatcctcgccatctacctgtgcggcctgctcctcggcaaccgcccgatccgcagccgccacggcatcctgcacatgctcgacggcatggcctggctggcgcagatcggcatgttcctggtcctcggcctgctggtcaccccccacgacctgtggccgatcgccctgccggcactggccctggcgctgtggatgatcctggtggcacgaccgctgtcggtactgatcggactgatcccgttccgcgccttccacgaccgcgagaaagccttcatcgcctgggtcggcctgcgcggcgcggtgccgatcatcctcgcggtgttcccgctgatggccggcctgccgaacgcccagctgttcttcaacgtggccttctttatcgtcctggtctcgctgctggtgcagggcaccagcctgccctgggcggccaggctgctgcgggtggtggtgccgccggatccggcaccgatatcccgcgccggcctggagatccacccgaccagcgagtgggagctgttcgtctaccacctgaacaaggaaaagtggtgcatcggcgccgccctgcgcgagctgaagatgcccggcgggacccggatcgccgcgctgttccgcggcaccgaactgctccacccgtcgggcagcaccatcctcgaggccgacgacattctctgcgtgatcggccacgaacacgacctgccggccctcggcaagctgttcagccaggcgcccgaccgcggcctcggcgcgcgcttcttcggcgacttcgtgctggaaggcgatgcccagctgtcggcggtggcctcgctctacggcctgaagctcgacggcatcgacggcgagcaagcgctgggccgcttcatcgcccacgagatcggcggcgaagcggtgatcggcgaccaggtggagtggaacggcctgacctggaccgtggccgccctggaaggcaaccgtatccgcaaggtcggcgtgaagtttccggaaggccgcccagggcccggacttttcctctga

SEQ ID NO: 318066 - DNA, 1803 bp, Pseudomonas aeruginosa
atgtccgaaaccctgctcagttcccgcaacctggcgttcgagctgtacgaagtcctcgatgccgaagccctgacccagcgcccgcgcttcgccgaacatagccgcgaaaccttcgatgccgccctcggcaccgcgcggagcctggcggaaaagctgttcgccccgcacaaccgcaagggcgacgaacacgagccgctctatgagaatggctcagccacgctgattccggaagtgaagccggcagtggatgccttcctcgacgccggcttcctcaacgccacccgcagcttcgagcaaggcggcatgcagttgccgaccctgctgtcgcaggcctgcttcgcccacttccaggcggccaacgtcggtagctcggcctatccgttcctgaccatgggtgccgccaacctgatcgagagcttcggcagcgaggagcagaagcagcgcttcctgcaaccgatgatcgagggccgcttcttcggcaccatggccctcaccgaaccgcacgccggctcctccctctccgacatccgcacccgcgccgaaccggccgccgacggcagctatcggatcaagggcaacaagatcttcatctccggcggcgaccacccgctctccgagaacatcgtgcatatggtcctggccaagctgccggatgcaccgccgggggtgaaaggcatctcgctgttcatcgtgccgaagttcctggtcaacgccgacggcagcctagggccgcgcaacgacgtgatcctcgccggcctgttccacaagatgggttatcgcggcaccacctccaccgcgctgaacttcggcgaaaacggcgcctgcgtcggctacctggtgggcaagccgcaccacggcctggcctacatgttccagatgatgaacgaggcgcgcatcggcgtcggcatgggcgcggtgatgcttggctatgccggttacctctattcgctggagtacgcccgcgaacgcccgcagggccgcctgccggacggcaaggacccgagcgcgccacaggtggcgatcatccgccacgccgacgtgcggcgcatgctgctgacccagaaggcctatgtcgaaggcgccttcgacctgggcctgtacgccgcgcgcctgttcgacgacagccagaccctggaagacgacgaacagcgccgccaggcccacgacctgctcgacctgctgaccccgatcgtcaagtcctggccctcggagttctgcctgaaggccaacgagctggcgatccagatcctcggcggccacggctacacccgcgaatacccggtggaacagtactaccgcgacaatcgcctgaacccgatccacgaaggcacccacggcatccagtccctcgacctgctgggacgcaaggtcgggcagaacaatggcgccggcctgcgccagctgacccgcctgatccaggacgcctgccggcgcgccgaagcccacccatccctggtcgccctgcgccagccgctggaacggctggtggcgcggctgtccgaggtgaccctggcactgctcggcgacctgatgcagggccaggtcaaccagggcctggccaactcggcgctgtacctgaaagtgttcggccatgcggtgatcggctggcgctggctggagcaggcgatccgcgccgaggaagggctggctcgcggcgactgcgccgacgccgacttctatcgcggcaagttgcaggccgcacgctacttcctgacctgggaagtgcctggctgccaccacgaactggcgctgctggaggcccgcgacgacgtgtgttcgagcatgcaggaagaatggttctga

SEQ ID NO: 318067 - DNA, 837 bp, Pseudomonas aeruginosa
atgaactatcgtcacgcttaccacgccggcaaccatgccgatgtcttcaagcacctggtgctggcgcggatcttcgccctgctggggcgcaaggacacgccgtacgcctacctggacagccattccggggtcggcctctacgacctgcagggtgacgaggccagccgcaccggcgagtgggagcagggcatcgcccgcctgtgggagcgcgaaggcctgcccgagcaactggacgattacctggacgtgatccgtcacctgaatccggacggctccctgcgctactacccgggctcgccggaactggcgcggcgcctgacccgcgcccaggaccgcgtgctgctcaacgaattgcatcccgaggacggccgcctgctcaaggccaacatggctggcgaacggcgggtcgccgtgcaccagggcgacggttggctgctgccgcgggcgttcctgccggcgccggaaaagcgcgcggtgctgctgatcgatccgccgttcgagcaggccgacgaattgcagcgttgtgtcgctgcgctcgacgaggcgatcgggcggatgcgccagacggtggtggtgatctggtatccgatcaaggacgagcgccagctcaagcgtttctaccaggccctggaacgtagcgtcgcgccgaagctgctgcgtgccgagctgcacgtgcatccgatcgacgacgccgagcgtttcaacggctccgggctggccatcgtcaatccgccgtggccgctggaggacgaactgcgcgacctgctgccctggctggccgaggtcatggcccagagccagggcggctggcgtctcgactggctggtggcggaatag

SEQ ID NO: 318068 - DNA, 648 bp, Pseudomonas aeruginosa
atggttctgcgttctgaaatcctcaccaagaaaagcgagctgcccacgccggaccaggccctgccgggtcgcgaaagcgccatgccggtgcccgaagcgcatttcgtcaacggccgcccgctgaccgcgccgttccccgccggcctgcaacaggtgctgttcggcatgggctgcttctggggcgccgagcgtcgcctctggcagcaaccgggtgtctgggtgaccgcggtgggttatgccggcggctacacgccgaacccgacctacgacgaagtctgctccggcctgaccggccacagcgaggtcgtgctggtggtctacaacccgcaggagaccagcttcgaacagctgctcaaggtattctgggaagcccacgacccgacccagggcatgcgccagggcggcgacatcggcacccagtaccgctcggtgatctacaccttcgacgcggcccagaaggccgcggccttggccagccgggagagcttccaagccgaactggcgaaagccggctacgaccgcatcaccaccgagatcgccgacgtcccgcccttctactacgccgaggcctaccaccagcagtacctggcgaagaaccccaacggctactgcggcctgggcggcaccggggtgtgcctgccggcctga

SEQ ID NO: 318069 - DNA, 2700 bp, Pseudomonas aeruginosa
atgaaaagtcatcccgatgccgccagccgttcggcggccgaggttgtcacgcagctacccgtgccgtcgcggctcgggctgctgcgtttcgagcggctgaacgagccgagctgggcactgctgttcctcgatcctgcctgcgagcgccagctcgggctgccggcgactaccctctgcgcactgctcgatgcgccttacgccagcctgatggaacccgaggcccgccaccgcctgcacgagcagatccagcagcaactggtgaagcgcccgcactaccaggtgagctacaagctgcacacacccaacggcgtgctgaccatgctggagttcggcgaagccttccagcagcatggccgccagttgctgcacggctacctgatggtcgaggagcgagcggagagcgccgagcgcagcgaacagttgctcgacctggaatcgcagaacctgcgcctgaaggcgtccctggacctctaccagcgctcccaggacgaccacctgcaacacctgctgcgctcgcgcacccagcagaacctgatcgtccgcctggcccgccatcgctacctgtccagcgacccgctgctggaagccgcgcaactgatcacccaggccgcctgcgaagcctacggcaccgcgcgcgccggcatctggcgcctgctcgacgaccagcgcctggaagcggtgaccgtctaccgccgcgacctcgaccagtacgagaagccccagagcatcgacgccagccgctaccccgcctacctcgaggcggtacacagcgggcgcgccatcgatgcccacaacgcccagcgcgacccacgcacccaggaactctacaaggactacctgaagccgctgggcgtcaacgccctgctcgacgccaccatccgcatcggcggcgaggtggtcggcgtgctgtgcctggaacacgctggcgagaaccgcatgtggcagagcgacgagatcgccttcgccggggaactcgccgaccagtacgcgcaggtcctgatgaaccacgagcgacgcaatgtctccagcgccctgcacctgttccagcgcgcggtggaacagagcgccagcgccttcctgctgatcgaccgcgacggcgtggtggaatacgtcaatccgagcttcacttcgatcacccagtacagcgccgacgaagtgcgtaaccgacgcctgtccgagcttccggcgctggagaacctcagcgagctgctgttcgacgcgcgttccgcgctgacccagcagaacagctggcagggcgagttccgcagccgccgcaagaaccacgagccttactggggccagttgtcgctgtcgaaggtctacgacgatctcggcgagctgacccactacatcggcatctacgaagacatcacgcagaacaagctggcccagcagcacatcgagaaactcgcctaccgcgacaacctcaccggcctggccaaccggcactatttcatcggcgccctcgaggaacgcctggaaagcagcggcgaccgcccgctcagcctgctgctggtggacatcgacaacttcaagcggatcaatgacagcctcggccaccagaccggcgacaagctgctggtcagcctggcccggcgcttgcgcagttgcctcggcgacggcgccaccctggcgcgcttcgccagcaacgagttcgccgtgctgctcgacgacaccgcggtggaaaagggcgaaagcattgccgcgcaggtcctgcacatgctcgacaagccgctgttcgtcgacaaccagttgatcaacatcaccggctccatcggcctggccagcgccccgcagcacggctgcgacccgcagaccctgatgaagtacgccggcctggcgctgcacaaggccaaggccaacggcaagcaccaggtccaggtgttcaccgaggcgctgaccgccgaggccagctacaagctgttcgtcgagagcaacctgcgccgcgccctggcgcagaacgaactggcggtgcactaccagcccaagctgtgcctgcgcagcggccagttgctcggcctggaagccctgctgcgctggcagcatccggaaaaaggcatgatccgcccggaccgcttcatcagcgtggccgaggaaaccgggctgatcgtaccgatcggcaagtgggtgatccgcgaagcctgtcgccaggcccgcgagctggccgaggccgggctgggcgagctgcagatcgccatcaacctgtcgcccaagcagttcaccgacccggacctggtcggctcgatcgcggcgatcctccacgaagagaacattccggccagccaactggaactggagctcaccgaaagcctgctgctggacgccaccgacgatacccgccagcaactcgaacgcctgaagagcctcggcctgaccctggcgatggacgacttcggcaccggctactcgtcgctgagctacctgaagaaattccccatcgacgtgatcaagatcgaccgcagcttcatcaaggacattccggacagccaggacgacatggaaatcacctcggcggtgatcgccatggcccacaacctcaagctcaaggtagtcgccgaaggcgtggagagcgccgagcaactggccttcctccggcgcaaccgctgcgacatcggccagggctacctgttcgaccggccgatccccagcgacctgctcaataccagtctgctgcgctatccctgccgcaccctgcactga

SEQ ID NO: 318070 - DNA, 1644 bp, Pseudomonas aeruginosa
gtgagcgaactcattcgcgtacccgacatcggcaacggtgagggtgaagtcatcgagctgctggtcaagcccggcgacaaggtcgaggccgatcagagcctgctgaccctggaatccgacaaggccagcatggaaatccccagtcccaaggccggggtagtgaaaagcatcaaggcgaaggtcggcgacaccttgaaagaaggtgacgaaatcctcgagctggaagtggaaggcggcgaacagcctgccgaagccaaggccgaggcagcgcccgcccaaccggaagcgccgaaagccgaagcgcctgctcccgccccgagcgagagcaagccggccgcccccgccgcggccagcgtccaggacatcaaggtcccggacatcggctcggccggcaaggccaacgtcatcgaagtgatggtcaaggccggcgacacggtcgaggccgaccagtcgctgatcaccctggaatccgacaaggccagcatggagattccctcgccggcctccggggtggtggaaagcgtctcgatcaaggtcggtgacgaagtcggcaccggcgacctgatcctcaagctgaaggtggaaggcgccgctccggcagccgaagagcaaccggcagccgctccggcccaggccgcggcgcccgccgccgagcagaagcccgccgcggcggcccctgcgccagccaaggccgataccccggctccggtcggcgcacccagccgcgacggcgccaaggtccacgccggcccggcggtgcgcatgctggcgcgcgagttcggcgtcgagctgagcgaagtgaaagccagcggtcccaagggtcgcatcctcaaggaagacgtccaggtcttcgtcaaggagcaactgcagcgcgccaagtccggcggtgccggcgccaccggcggagccggcatcccgccgatcccggaagtcgacttcagcaagttcggcgaagtggaagaagtggcgatgacccgcctgatgcaggtcggcgccgccaacctgcatcgcagctggctgaacgtgccgcacgtgacccagttcgaccagtcggacatcaccgacatggaagccttccgcgttgcccagaaggccgcggcggagaaggccggggtcaagctgaccgtactgccgatcctgctcaaggcctgcgcccacctgctcaaggaactgccggacttcaacagttcgctggcccccagcggcaaggcgctgatccgcaagaagtacgtacacatcggcttcgccgtggacactccggacggcctgctggtcccggtgatccgcgatgtcgaccggaagagcctcctgcaactggccgccgaggccgccgagctggccgacaaggcccgcaacaagaagctctcggccgatgccatgcagggcgcctgcttcaccatctccagtctcggccacatcggcggcaccggcttcacgccgatcgtcaacgcgccggaagtggcgatcctcggtgtgtccaaggcgaccatgcagccggtatgggacggcaaggccttccagccgcgcctgatgctgccgctgtcgctgtcctacgaccatcgcgtgatcaacggtgccgccgcggcgcgcttcaccaagcgcctgggcgagctgctggcggacatccgcaccctgctcctgtaa

SEQ ID NO: 318071 - DNA, 2649 bp, Pseudomonas aeruginosa
atgcaagacctcgatcccgtcgaaacccaggaatggctggacgccctggagtccgtactcgaccgcgaaggtgaagaccgcgctcattacctgatgacccgcatgggcgagctggccagccgtagcggcacccaactgccctacgcgatcaccacgccctatcgcaacaccattccggtaacccacgaagcacgcatgcccggcgacctgttcatggaacgccggatccgctccctggtgcgctggaacgccctggcgatggtgatgcgggcgaacaagcacgacccggacctgggcggccacatctccaccttcgcctcctcggcgaccctctacgacatcggcttcaactatttcttccaggctcccaccgacgaacacggcggcgacctggtgttcttccagggccacgcgtcccccggcgtctacgcccgggccttcctcgaaggccgcatcagcgaggaacaactggagaacttccgccaggaagtggacggcaacggcctgtcctcctatccgcacccctggctgatgccagacttctggcagttccccaccgtatccatgggccttggcccgatccaggcgatctaccaggcacgcttcatgaagtacctggaaagccgcggcttcatccccgccggcaagcagaaggtctggtgcttcatgggcgacggcgagtgcgacgagccggaatccctcggcgcgatctccctggccggccgcgagaaactcgacaacctgatcttcgtcatcaactgcaacctgcagcgcctcgacggcccggtccgcggcaacgccaagatcatccaggaactggaaggcgtgttccgcggcgccgagtggaacgtcaacaaggtcatctggggtcgcttctgggacccgctgttcgccaaggacaccgccggcctgctgcagcagcgcatggacgaggtcatcgacggcgaataccagaactacaaggcgaaagacggcgcctacgtgcgcgagcacttcttcggcgcgcgtccggaactgctggaaatggtcaaggacctttccgacgaggaaatctggaagctcaaccgcggcggccacgacccctacaaggtctatgcggcctaccaccaggcggtcaaccacaagggccagccgaccgtcatcctggccaagaccatcaagggctacggcaccggcagcggcgaagcgaagaacatcgcgcacaacgtgaagaaggtcgacgtcgacagcctgcgcgcgttccgcgacaagttcgacatcccggtcaaggacgccgacctggagaagctgccgttctacaagcctgaagaaggcagcgccgaggccaagtacctggccgagcgccgcgccgcgctgggcggcttcatgccggtgcgccggcagaagagcatgagcgtgccggttccgccgctggaaaccctgaaggccatgctcgacggctccggcgatcgcgagatctccaccaccatggccttcgtgcggatcatctcgcagctggtcaaggacaaggaactcggcccgcgcatcgtcccgatcgtcccggacgaggcccgtaccttcggcatggaaggcatgttccgccagctcggcatctactcctcggtcggccagctctacgagccggtggacaaggaccaggtgatgttctaccgcgaggacaagaagggccagatcctcgaggaaggcatcaacgaggccggcgccatgtccagctggattgccgccggtacctcctacagcacccacaaccagccgatgctgccgttctacatcttctattcgatgttcggcttccagcgcatcggcgacctggcctgggccgccggcgacagccgcgcgcacggcttcctgatcggcggcaccgccggtcgcaccacgctgaacggcgaaggcctgcagcacgaggacggccacagccacctgctggcctcgaccatcccgaactgccgcacctacgatccgacctacgcctacgaactggcggtgatcatccgcgaaggctcgcggcagatgatcgaagagcagcaggacatcttctactacatcaccgtgatgaacgagaactacgtccagccggccatgccgaagggcgcagaggaaggcatcatcaagggcatgtacctcctcgaggaggacaagaaggaagccgctcaccacgtgcaactgctgggctccggcaccatcctgcgcgaagtcgaggaagcggccaagctgctgcgcaacgacttcggcatcggcgccgacgtctggagcgtgccgagcttcaacgagctgcgtcgcgacggccttgccgtcgagcgctggaaccgcctgcatccgggccagaagccgaagcagagctacgtcgaggagtgcctgggcggccgtcgcggcccggtgatcgcctccaccgactacatgaagctctacgccgagcagatccgccagtgggttccctccaaggagtacaaggtgctcggcaccgacggcttcggccgcagcgacagccgcaagaagctgcgcaacttcttcgaagtggatcgtcactgggtggtgctggccgcgctcgaagcgctggccgatcgcggcgatatcgagccgaaagtggtggccgaggccatcgccaagtacggtatcgatccggagaagcgcaacccgctggattgctaa

SEQ ID NO: 318072 - DNA, 2949 bp, Pseudomonas aeruginosa
atgagcctgccttcgctggcgaatctgccggccaccctgctgcccgccgccgaacgcgccgggactgccctccgctccgctgtcgccgccctcgatgccgccgccctggcccgtctggaggcctggcccgaggagcgcctggaggatttccgacgggtcgccgcggccagcgatttcgtcgccgagcaggcagtgcgcgacccggcgatgctgctggaactggccgaacgcggcgagctggagaacccccacgcgcccggcgaactgcgcagtcagttgcaggcgcggctggaggattgcgccgacgaggacgagctcggtcggcgcctgcgacgtttccgcacacgccagcaactgcgcatcatctggcgcgacctgacccgccgcgccgcgctggcggaaacctgtcgcgacctgtcggccctggccgacgcctgcatcgacctggcttgcgagtggctccatcggcgccagtgcgagcagttcggcacgccgatcggccggcgctccggcgaaccgcagcggatggtggtcctcggcatgggcaagctgggcgcggtggaactcaacctgtcgtcggacatcgacctgatcttcggttacccggagggcggcgagaccgagggggcgaagcgttcgctggacaaccaggagttcttcacccgcctggggcagaagctgatcaaggcgctggatgcgatcaccgtcgacggcttcgtcttccgcgtcgacatgcgcctgcgtccctacggctccagcggaccgctggtctacagcttcgccgcgctggagcagtactaccaggaccaggggcgcgactgggagcgctacgcgatgatcaaggcgcgggtggtcggcggcgaccagcaggcaggcgagcaactgctcggcatgctgcggccgttcgtctatcggcgctacctggacttttccgccatcgaggcgctgcgcaccatgaagcagctgatccagcaggaggtccggcgcaaggggatgtcggaaaacatcaagctgggcgaaggcggtatccgcgaggtggagttcatcgcccaggccttccagttgatccatggcgggcgcgacctgagcttgcagcaacggccgctgctgaaggtgctggcgaccctggaggggcagggctacctgccgccggcggtggtcgaggagctgcgcggcggctacgagttcctgcgctacgccgagcatgccatccaggcgctggccgaccggcagacgcaaatgctgcccagcgacgaatacgaccgcatccgcgtggccttcatcatgggcttcgccagttgggccgcattccacgagcgcctgagccactggcgggcgcgcatcgactggcacttccgccaggtgatcgccgacccggacgaggacgaaagcggcgaggcggcctgcggcagcgtcggcgccgagtggatcccgctgtgggaggaggcgctggacgaggagtcggccagtcggcaactggccgacgccggcttcgtcgatgccgaggcggcctggaagcgtctcagcgatctgcgccacggcccccaggtgcgagcgatgcagcgtctcggccgggaacgcctggatgccttcgttccgcgcctgctggcgatgaccgtggaaaaccctcagccggacctggtgctggagcgggtcctgccgctggtggaagcggtggcgcggcgttccgcctacctggtgttgctgaccgagaaccccggcgcgctggagcgcctgctgaccctctgcgcggccagcccgatggttgccgagcagatcgcgcggttcccgatcctgctcgacgagctgctcaacgaggggcgcctgttccgtcctccacaggccgccgagctggccgccgagctgcgcgaacggctgatgcggattcccgaggacgacctcgagcagcaaatggagacccttcgtcacttcaagctggcccacgggctgcgggtggcggcctcggaaatcgccggcacgctgccgttgatgaaggtcagcgactacctgacctggctggccgaggcgatcctcgtcgaggtcctcgaactggcctggcggcagttggtgcagcgtcacggccggccgttgcgcgccgacggcacgccgtgcgatccggacttcgtcatcgtcggctacggcaaggtcggcgggctggagttcggccatggctcggacctcgacctggtgttcatccatgacggcgacccccagtgcgagaccgatggcggcaaatccatcgatggcgcgcagttctttacccgcctggggcagaagatcatccatttcctcaccgcgcagacgccatccggcaccctctacgaggtcgacatgcgcctgcgtccgagcggcgcggccggcctgctggtgagttcgctgggcgccttccagcgctaccaggagcaggaggcctggacctgggagcaccaggcgttggtccgcgcccgggtgctggccggttgccggcgggtgcaggcgagcttcgaggcggtacgtgccgaggtgctggcgaggccgcgcgatctcgacgcgttgcgcaccgaagtcagcgaaatgcgcgccaagatgcgcgacaacctgggaacccgcgcgaccgccgccggtaccgcctcgaatgccttcgaggccacggcagccttcgatctcaagcacgatgccggtggtatcgtcgatatcgaatttatggtgcaatatgcggttctagcttggtccggagaacacccggcgctgctcgaattcaccgataacatccgcattctggaaggactggaacgggctggcctgatcgccagcgaggacgtccgtctcctgcaggaggcctacaaggcctatcgcgcagccgcacaccgcctggcactacagaaggaggccggggtcgtgagcggcgagcacttccagacggagcggcgagaagtgatcaggatctggcgcgagctgcggctcggctga

SEQ ID NO: 318073 - DNA, 924 bp, Pseudomonas aeruginosa
atgtcgatggccgatcgtgatggcgtgatctggtatgacggtgaactggtgcagtggcgcgacgcgaccacgcacgtgctgacccataccctgcactatggaatgggcgtgttcgagggcgtgcgcgcctacgacaccccgcagggcacggcgatcttccgcctgcaggcgcacaccgaccggctgttcgactccgcgcacatcatgaacatgcagatcccgtacagccgcgacgagatcaacgaggcgacccgcgccgccgtgcgcgagaacaacctggaaagcgcctatatccgcccgatggtgttctacggaagcgaaggcatgggcctgcgcgccagcggcctgaaggtccatgtgatcatcgccgcctggagctggggcgcctacatgggcgaggaagccctgcagcaaggcatcaaggtgcgcaccagttccttcacccgccaccacgtcaacatctcgatgacccgcgccaagtccaacggtgcctacatcaactcgatgctggccctccaggaggcgatctccggcggcgccgacgaggccatgatgctcgatccggaaggctatgtggccgaaggctccggcgagaacatcttcatcatcaaggatggcgtgatctacaccccggaagtcaccgcctgcctgaacggcatcactcgtaacactatcctgaccctggccgccgaacacggttttaaactggtcgagaagcgcatcacccgcgacgaggtgtacatcgccgacgaggccttcttcactggcactgccgcggaagtcacgccgatccgcgaagtggacggtcgcaagatcggcgccggccgccgtggcccggtcaccgaaaagctgcagaaagcctatttcgacctggtcagcggcaagaccgaggcccacgccgagtggcgtaccctggtcaagtaa

SEQ ID NO: 318074 - DNA, 1038 bp, Pseudomonas aeruginosa
atgagaattctgatcgtaggtccctcctgggtgggggacatggtgatggcgcagaccctgttccagtgtctgcgccagcggcatcccgagtgcgtgatcgacgtgctggcgcccgagtggagccgaccgatcctcgagcgcatgcccgaggtgcgtcaggccctgagcttcccgctcggccacggggtgatggacgtcgccacccggcgccggatcggacgcggcctgcgcggtcagtacgagcaggcgatcctgctgcccaactcgctgaagtcggcgctggtgccctggttcgccggaataccgaagcgcaccggctggcgcggcgagatgcgctacgggctgctcaatgacatccgcaagctcgacaagcagcgctatccgctgatgatcgaacgcttcatggccctggccttcgagccgggcgtggagttgccgaagccctatccgcagccgcgcctgcggatcgacgacggcagccgccaggcggcgctcgacaagttcgccctgagcctggaccgcccggtgctggcgctctgtcccggcgccgagttcggcgaggccaagcgctggccggcggaacactacgccgcggtcgccgaggcgaagatccgtgccggctggcaggtctggctgttcggctcgaagaacgaccatcccggtggagaggagattcgccagcgcctgattccggggttgcgcgaggagtccttcaatcttgccggggagacttcgctggccgaggccatcgacctgatgtcctgcgctggcgcggtggtgtccaacgattccggcctgatgcacgtggcggccgcgctggatcgcccgctggtgggcgtctatggctccacctcgccgcagttcaccccgccgctggcggaccgggtggagatcgtccgcctcggtctcgagtgcagcccgtgcttcgagcgcacctgtcgcttcggccactacaattgcctccgcgagctgccgcctggcctggtattgcaagccctggagcggctggtcggcgaccctgccgaggtcgccggatga

SEQ ID NO: 318075 - DNA, 1068 bp, Pseudomonas aeruginosa
atgagggtactgctggtcaagacctcgtccctcggcgacgtgatccacaccctgccggcgcttaccgacgccgcccgggcgattcccggcatccagttcgactgggtggtggaggaaggtttcgccgagattcccgcctggcatccggcggtggcgcgggtgatcccggtggcgatccggcgctggcgcaagaacctctggcagaccctgcgcaacggcgaatggcggcgcttcaagcagcgcctgaaggaagtcgactatgacctggtgatcgacgcccaggggctgctgaagagtgcctggctgacccgctacgtgggcaagacgccggtcgccggtctcgatcgcgactcggcgcgcgagccgctcgccagccgcttctatcgccgtgcctatccggtcgcctggggacagcatgcggtggagcgcacgcgccagttgttcgcccaggcgctggactacccgttgcccgagtcggtcggtgactatggcctggaccgcgagcagttggccgacgccgaccctggcgcgccgtacctggtgttcctgcacggtactacctgggacaccaagcattggccggaagcctactggcgcgaactggccgagcgcatgtgcgagcgcggctggtcggtgcgcctgccctggggcagcgccgccgagcgggagcgggccgggcgcctggcggcggggttggaaaatgccgcggtactccccagattatccctggccggcatggccaaggtgcttgccggcgcgcgcgcctgcgtggcggtggataccggcctcggtcacctggcggcggcgctggacgtgccgacgctgtcgctgttcggcccgaccaatcctggcttcaccggcgcctacgggcgttcccaggtccacctgggcagcgacttcccctgtgcgccgtgcctgaagaagacctgtacctaccagccgaccgaagaggatcgcaaactgttcgatctcaagcgtgagcagccgctgtgcttcacccggctgaatccccagcgcgtggccacccagctggaggccatgctgctggccccggagaccctccgatga

SEQ ID NO: 318076 - DNA, 1122 bp, Pseudomonas aeruginosa
atgaccctggcgttcatcctctacaaatacttccccttcggcggcctgcagcgtgacttcatgcgcatcgccctggaatgccagcggcgcgggcacgacatccgcgtctatacgctgatctgggagggcgacgtgccggacggcttcgaagtgctggtggccccggtgcgctcgatcttcaaccaccggcgcaacgagaagttcaccgcgtgggtccgcgccgacctggacaggcgcccggtgcagcgggtgatcggcttcaacaagatgcccggactggatgtctactacgccgccgacgcctgtttcgaggaaaaggcccagaccttgcgcaacccgctgtaccgccagtggggccgctaccgccacttcgccggctacgaacgggcagtgttcgacccggcctcgaagaccgagatcctgatgatctccgaggtgcagcagccgctcttcgtcaagcactacggcacccaggccgagcgtttccatctgctgccgccggggatcagccaggatcgccgggcgccggccaacgccgcggacgtgcgtgcggaattccgccgcgagttcggcctggaggaggacgacctgctgctggtgcagatcggttccggcttcaagaccaagggcctggatcgcagcctgaaggcgctggccgcgctgcccaaggcgttgcgcaggcgtacccggctgatcgccatcggccaggacgatcccaagccgttcctgctacagatcgccgccctcggtctcaacgaccaggtacagatcctcaagggtcgcagcgatatcccgcgcttcctgctcggcgccgacctgctgatccacccggcctacaacgagaacaccggtacggtgctgctggaggcgctggtctccggcctgccggtgttggtgaccgatgtctgcggctacgcccactacatcgccgaggccgacgccgggcgggtgctgccgagtcccttcgagcaggacagtctcaaccgcctgctcgcggaaatgctggaggacgctccggcgcgcgccgcctggtcgcgcaatgggctggcctacgccgatcacgccgacctctacagcatgccgcagcgcgccgccgacctgatcctcggggaggcctcatga

SEQ ID NO: 318077 - DNA, 807 bp, Pseudomonas aeruginosa
atgaggctggtgctggaagaaccgttcaagcgcctgtggagcgggcgcgacccgttcgaggcggtggaggcgctgcaaggcaaggtctaccgcgaactggaagggcgccgcaccctgcgcaccgaggtcgacgggcgtggctacttcgtcaagatccaccgaggcatcggctggggcgagatcgccaagaacctcctcaccgccaagctcccggtgctcggcgcgcgccaggagtggcaggccatccggcgcctgcacgaggccggcgtagcgaccatgaccgcggtcgcctacggcgagcgcggcagcgatccggcgcggcagcattccttcatcgtcaccgaggaactggcgccgaccgtggacctcgaggtgttctcccaggactggcgcgaacgtcctccaccgccgcggctcaagcgcgcgctggtcgaggcggtggcgcggatggtcggcgacatgcaccgtgccggagtcaaccatcgcgactgctacatctgtcatttcctgttgcacaccgacaagccggtgagcgcggacgatttccgcctctcggtgatcgatctgcaccgtgcccagacccgcgacgccacgccgaaacgctggcgtaacaaggatctggcggcattgtatttctctgcgctggacatcggactgacgcgtcgcgacaagctacgcttcctgcgcacctatttccgccggccgttgcgcgagatactgcgcgacgaggccggcctgctggcctggatggaacgcaaggcggaaaaactctacgaacgcaagcagcgttacggagacctgctctga

SEQ ID NO: 318078 - DNA, 735 bp, Pseudomonas aeruginosa
atggcggggtggaccctcgaacccgattaccgtcacctggccgccgacttcggtagcctcgatagcgtgttcgccctggagggcgagcgcctgacccgcgacccgttgtccgaagtcatccgcatcgagcgcgacggcgtgcgttactacgtcaagcgctaccgcagcgccggcaagggcctgcgccgctacctggcgcgaccgcggatcaaggccgagtggcagaacctcaagcgcttcgagaagtggggcattcccaccgccgaagtggtcgcctgggggctggagcgcaaggccggcgccttccagcgcggcgccatgatcacccgcgagctgccgggcaccgaggacttgtcggtgctcgcctgcaaccgggatccgcgcctgaaggacccgcgctgggtggacggcgtcagccggcagatcgccaaggctacgcgcctgatgcacgaccagcatttcacccataacgacctgaagtggcgcaacctgctggtggacgaccagccgctggtgtatttcatcgactgcccgaacggcgcgttctggtggagcttcatgctgcgctatcggatcaccaaggacctggcctgcctggacaaggtggccaagtaccacctgtcgcgcacccagcgcctgcgcttctacctgcaatatcgccgtcgccggcacctgaacgaatccgacaagaagcgtattcgccaggtggtggctttcttcgaggggcgcgaatga

SEQ ID NO: 318079 - DNA, 759 bp, Pseudomonas aeruginosa
atgagcgttttcatcgccgcgcaggaccacgacctgctccagcgcaaccgtctggacagcttcgacgccctgtgggccttgcagctggacgccgtggacgaaccgaataccgagcggggtggctggagcagcgtctaccgcctcgacctgggcgactccgcctactacctgaagcgccagagcaaccacctgacccgcagcctgcgccatccgctgggcgagccgaccttcgcccgcgagttccgcaacatcgagcgctaccgggcgctgggcattcccgccctgcaggcggcgttcttcgcccagcaggcggtcggcggagagcgccaggcgatcctcctgacccgtgccctggacggttggcaggacctggacacctggctggcgtcctggcacgacctggccgaagagcggcgccgggcgattctccgggcggttggcaggctggcgcgccagctgcacgccgccggacagatgcatggttgcttctatcccaagcatgtattcctccgcgagggggccgatggtgtcttcgaggcctgcctgatcgacctggagaagacccgcccgatctggttcggccgccgcgaccaggtcaaggacctggagccgatgctgcgccgtgccccggactggagcgaagcggacgtgcacgaattcatctccgcctatgtcgacgaacccctcgactcggccgaggtcgagcagtggtatcgccttctcgaccagcgccgtcggcgcaaggagtcgcgccgatga

SEQ ID NO: 318080 - DNA, 1479 bp, Pseudomonas aeruginosa
atgagactggccgaactgcaagccgccgggcgccacccgcaactgccattgcgggtgaccctggcggatggcgctggcgctgccgaactgcgcctggacagtctgctgcgggtgctgcccgggcagcgctacgtcggtgccggcgaatggcgtgggcgcaaggtgctggccaagctgctggtgggcggcaaggccgcacggcatttccagcgcgaactggaaggggcgcgtctgctcgcggcccaggggctgaccaccccggcgctgctggccgacgggctgcagcagggcgagggcggctggctgctgttcgactacctcgacgcggcgcacagcctcggtgacgcctggcgtgcggtggaggcccaggcgccgctgggcgatgcccagcaagcggtgctcggcgaagccctggcagccattggcgagctgcatgcaaagggcctctggcaggacgacctgcacctggacaacctgttgcgccacgccggccgcctgtatctcatcgacggtggcggcgtgcgtgcggaaactcccggccagccgctgtcgcgacagaaagtgctggaaaacctcggggtgttcttcgcccagttgccggcgctcctcgatcctttcctggaggagttgctggtgcattacctgctggccaacggcgagcatgcgctgccgctcgaagccttgcagaaggaaatcgccaaggttcgccgctggcgggtgcgcgacctgctgaggaaggtcggtcgcgactgtagcctgttcagcgtcgtgcgcggtccgttccgcctgttcgccgcccgccgcagcgaggccgagacgatggcgcccctgctggcggacgcggaccgcctgatcgccgccggccacgtctacaaggacggcggcgcggccaccgtcgcccgggtcgaagcgaacggccgcacgctgatcatcaagcgctacaacatcaagggctgggtccattggctgaagcgcttctggcggccgagccgggcctgggcctcctggcgcgaaggcaaccgcctggaattcctcggcatcgccaccgcccgtccgctggcgatgctggagcggcgctggtgctggctgcgcgggcgcgcctacctgattaccgattatctcggcggtcaggatataatcgctcgttttaagccttgcctggacatgcccgatggcgccgtttcgccaccggaagccgagttggcggcactggatcggctgttttcgacgttgatccgcgaacgcatcagccacggcgacctgaagggacacaacctgttctggcaggcccatgaacaaggcggcgaatgggcgctgatcgacctggacgcgatgcgcaagcatcacagccaggcgtcctttgcccgcgcctacgcccgcgaccgcgcgcgcttcctgcgcaactggccgcaggacagcggcctctaccggctgctggagcaacggattccccgcctcggcgacgccgccggggcttga

SEQ ID NO: 318081 - DNA, 1758 bp, Pseudomonas aeruginosa
gtggcattgaccgtcctaggcctgtctggcgccgtaagccatgacccgtccgccgccctgtacatcgacggcaagctggtcgcggccgtcgaggaagagcgcttcgtgcgcgacaagcacgcgaagaaccgcatgccctacgaatcggcgaagttctgcctggagcaggcagggatcgagccggccgatgtcgacgtggtggcgattcccttcgctcccatcagcatcatggaaaaggcccgctggcactacgccaagcgctacgcctacgcgccggatcgcgcgctggatgcgatcctgctcggcaaccgccgctacaagcgttactacaaacgcatcgagtggtgcctgcagcaactcggcttcgacctgaagaaaatcaagatccagccggtcgagcaccaccttgcccacgcctccagtgcctaccattgctcggggttcaaggaaaagaccgcgatcctcggcatcgacggcaagggcgaatacgccaccactttcttcggctggggcgagaacggtcggatccacaagatcaaggagttctacgatccggattcgctgggcggcctgtacggcgcgatcaccgagtacctcggcttcgacatgctcgacggcgagttcaaggtcatgggcatggcgccctacggtgacgccagcaagtacgatttctcccgtctcgccaagttcgagaacggcgaactggtgatcaacaccgattatgccaacgtcatcggcttccgccgctacaaggagaaaggcaagggctactacttctcgcccaagctgatcgagtggctggggcccaagcgcgaaggtgacatcgccgacgatccctacatccattacgccgcgagcatccaggcgctgttcgagaagctcgcgctggagatgatggactactacctcggcgatatcatccgcgagaccggcaaggtcgctttcgccggcggctgcgcgctgaacgtcaagctcaaccagaagatcatctcgcgccccgaagtgaaggagctgttcgtccagccggcggccagcgacgccggcaccgcggtcggcgcggcggcctacgtgtcgcaccagcgcggcgtgccggtggagaagatggagcacgtctacctcggcccggagtattccaacgaggacgtcatcgccgcctgcgcccgtcacgaggccaggccgcagtggcagaagatcgacaaccgcagccggcgtatcggcaggatccttgccgacggcaacccggtggcctggttccagggacgcatggagttcggtccgcgtgccctcggtggccgctccattctcggctgcccgagcgtgccgggcgtggccgaccggatcaatgcgcagatcaagttccgcgagcgctggcggcccttctgcccgtcgatgctggataccgtcggcccgcagatgttcaagatcgaccacccggccccgttcatgaccttcaccttcgaagtcaacgaagagtggaaggagcgagtgccggaagtggtgcacgaagacggtacctcccgcgcccaggtgctgaagcgcgagtacaacccgcgctactacgacctgatgaaggaactggagaacctcaccggcaacggcgtggccctgaacacttcgctcaatcgccgtggcgaaccgatgatctgctcgccgaccgacgccctgaacatgttcttcggctccgatctgcagtacctgatcatggaggacatcctggtcgtgaaggagggcgtggactggtatgactcggtcggctga

SEQ ID NO: 318082 - DNA, 1137 bp, Pseudomonas aeruginosa
atgactcggtcggctgaacctcgcgtcctgcagttctgtcacggctacgacgggcctttcctcgactgtgcccgtcagtacgccagcctgttcgccggaaccccgtacaaggtcaccacggtgttcctcaccgggcgttccgatcctgaggtggcggcgcgttgcgcctccgacgaggtactgttcctcgagtacggctccagggacatccgtggcctcaagctgaaggcgatccgcgacttgcgcgagatcgcccgttcgcgcgacttccgcttctgcatcgcgcaccgcttcaagccgatctggatcgccagcctggccactcgtctgccgatcattggcgtgcaccacgccttcggcgattaccagcggttgtcgcgcaaggtcttcgccggcctgatgagcaagcgcctgagcctgctggcggtgtccgacgcggtgcgcgacgatatccgccgttgcctgccgaagtggccggcggagcggatcgagacgctctacaaccgcatcgacgtcgctgcgctgcaggccgagcaggtcgagcgcctgagtgcgcgccggcaactgcgcctgcccgacgaggcctgggtggtcggcaacgtcggccgcctgcatccggacaaggaccaggctaccctgctgcgcggctttgccgccgcgctgccgcgcctgccgcagaacagcctgctggcgatcctcggcagcggccgcctggaagagcagctcaaggacctggcctgcgaactgggtatcggcgagcgcgtgctgttcctcggccaggtcgaagaggcacggcgctacttcaaggcgttcgacgccttcgccctgagttccgaccacgagccgttcggcatggtcctgctggaggccatggtcgccggtgtaccgttgatcgccaccgcctgtggcggcgcccgcgaagtggtggaaggggtcggcatcctcttcccgctgggcgacgagacggccctggccgagggcctgacccacctggcggcgcttgaccgccgccagcgcgaggcctgtgcgcggctcatgctcgagcgcctggagacacgcttctccgacgctgcggtgcgccgcgaattctggcgcctgccgacgattgccggcttcgcttcggagtctgcatgctga

SEQ ID NO: 318083 - DNA, 897 bp, Pseudomonas aeruginosa
atgctgaacaggttgcgcgccttccgcgaacgcggttggcgcgaagtggacgcgccgacctacgcccaggcctggcagcgtttcggcggcagcgtcgcgacccacccgctggtggtcgagcagctcgccgaaatggctggaatcccggtgcgttacctgggttgggagagcgctggcgaactggttgcggcgatcccgacctggggccgccacctggcgttgtccaaggacgtgctcaagcggcgcggcaagaagggcctgtacgacctgggcaacgccgaactgatcctgccggtggccgacggtgcccgcatcgccctccgccatgcgggacgctacctgtcggcgctgcatgagcggaacatcgtcacgctgcgccctcagaccgagcaactggctttcgctcgtgctcccgaggatttctccaagaagttccgctataaccagcggcgcgaagtgcgcctggtggaggaggccggtggccaggtgcgccaggcagacagcttcgccccggccgagttcgctgccatctatcttgaactgttccagcgtcgctggggtttcccggccaccggcgcggagcgcatggccgaggtcttcgagcggctgcgcgaattgctgcgcggctcggtcctgctgctcaacgaccagcccatcgcggtccaggtactgtatcgcgccgaagcgccgggctggctcagcgtcgagtacatcaacggcggcgtcgatccgcagacccgcgagttcagccctggcagcgtgctcagttacctgaacacccaggccgcctgggaggatgcgcgagcgctgggcaaacccctgcgctattcgttcggtcgcgccgaccgcgaatacaaggatcgctggtgccatccttctccggtcttccaggtctga

SEQ ID NO: 318084 - DNA, 1419 bp, Pseudomonas aeruginosa
atgagcgcacgcaagcagcagttgctcaagcgtcatcgacgcaacaagcggatcggcctactggttgcgctgctggcattgctggccgtcggtctgctggtcagcccctggttgttgccgatcctcctcgtggccctgtgggtcgcccacgaagcctggttcgccgatcacctgttctattcgccgggcgaggactaccgctaccgtttcgcggaaggggtcgagtcgctgccggtacgcctggcggatggccgtctgcgagtcgacggcgagctgcgcgaaggcgatacgctggtgcttggcatcggcgtgcgcgctggctggctggggcgcttcctcgaaccctcggtgctgctggaaggtggcgcggaggccgatgcccaggctttcgaacgtggggtgaacggcttgcgctacctgaacctgacgggactggccgggccgctgggcgagggccggattcgcctgcgcggccggcattgccggctggtcggcgaaccgaccctgtggcgtgcgcgccatcccgactaccgtgatcggcgggtgatggtcatcgctccgcatgccgacgacgccgagctggccgccttcggcctctacagccaggctcgcgaggcctggatcgtgaccctgaccgccggcgagatcgaaaccgagcattaccgccgcatgggcctcgacggaatagctgcggcgcgcctgaagggccgcctgcgcgcctgggatagccaggccgtgccgacgtggggtggggtgccggccgagcgctgcgtgcaactgggttatttctgcctgcaattgcctgccatgcaggcgaacccgggcgaggtggtgccgtcccgtgaggccgatctcgccgatatccgtccgttccgccagttcaaccgcctgcgcctggccagcgatgccgacggcctgtcgacctggaacaatctgctggccgatctccgcgagctgatcctgctggcacgtcccgaggtcatcgtcctgcctcatccgcatttcgatccgcacccggaccatgtccgcgcccaggaggctgtgcgcgaggcgctccagggcctggactggcagccgcaggcattgttgcactatgccaatcacctgcacgacaacgatcgctggccgatgggcgatgcgcacatgggggtcagcctgccaccgctgaccgaagaatgctcgccgctgctgccatggacgctggcgctggagcgcacgcgccaggtggacaaggccatggccttgggcatgatgcacgacctgcaacccaggccgccgttcaagcgccgtctgcgccgccgtctgcagggctggctcgccgggcgtcgctggccggcatacggcgaggacgagttcatgcgcaaggcggtgcgtcggcacgagttgttctgggtggagtcgctggatggggaggcgtga

SEQ ID NO: 318085 - DNA, 957 bp, Pseudomonas aeruginosa
atgaaagttctgtttctggtccagaaagagcagcgcgcgatcctggatcgcctgtacgacggcatcgccgcccattgcgagtgcgatacccgctggctgagcagcgaggagcaggccgacctgcgcggctacttccgcaagcacgtggatgtctcgcgctacgaccgcatcctgttcttcctccgtttcaagaaggaaatgcgccaggtccgcttcatccgcagcgtgcccaacctggtgatcctcgagcacgatgcctaccagaactacattccctgcaagtacaccggcaagttcagcgcccattaccggcgcctgccctgggcacgggtgatcagttcgggccatacggtcagcgaacgcctgcgccaggagggattcgacgcggtattcgtgcccaagggctacgaccagaccctgttgcatgacctgggcctggcgcgcgatatcgagctgggcttcgtcggcagtaccggcagcgtggcctacagtggacgcaaggcgctgctcgacgagttgggcggagtggagaacctgctggtgaccaagaccaagtccggcgaggagtacctgcgcacgctcaaccgcatccgtttcttcgtcagcgcggatgtcggcatgggcgaatacatgatcaagaatttcgaggcgatggcctgcggttgcgtactgctggcctacgaccagggcgagcgggaaaacgaggccttgggtttccgggacatggagaatatcgtgctgtatcgctcggtggcggacatccaggaaaagctcgcgatcctgcgcctcgatacggctctcgccgagcggatcgcgcgaagcggccaggcgctggccatcgaacgattcagcttcgccgctgtcggtcagagtatcgtcgaggccatgcggcccgcgttgcgcgagccggagcgtcccggatggctggagaagacctggcgacgtatttttacctga

SEQ ID NO: 318086 - DNA, 885 bp, Pseudomonas aeruginosa
atggcgctcgtcgatgatggttcgcagccattggtttccgtgatcatcgcttcctataaccacgaaaagtacatagaagcgagcattgccagcgtggctgcgcagacataccgcaacgtggaactgctggtggtggacgatggttccagcgatggcagcgtcgagcttttgcgcgggctccaggcgaagtacggcttcgacctcagggtccagcagaaccagggactgtcgagaacgctcaacgaggcgatcgccagggcccggggaaatctcatcgtgcctttcggttcggacgacatcatgttgccgcaacgcctggagaaacaggtggcacacatgtgggacaagcccgaggtaggtatctgcgcgggcaatatcgagatcatcgactccaatggccgggtcatgccgggaaaggagcagcgcaaacgcgacctgcctttccgccgtctcgacttcgatgacctgttcctggaccgcaagccgggcccgatggcgcccaccttgatgttccggcgggaagccctggagaaggtcggcggtttcgatccggacatacgcctggaagatgtctatatcgaactggcggtgaccaaggctggctacgtcatcgacattcttggcgaggtcctcgcccagtaccgcaagcatcccaccaatacgtacaagaacgcccgtttcatggtggacaacgtattcaagacgtacagccagttcagcgatcaccccgattacgagcaggtgatcatgcgcttccgcaattcgatgttcctcaagtgctcgaaccgggacaaggtactggcccgggagctgctctccggcttgccgctgaagtactggaacgagaagaccttccgcggcattgcgcggctgtttttctcctga

SEQ ID NO: 318087 - DNA, 1206 bp, Pseudomonas aeruginosa
atgttcgcagctacccgactgacccgtctccgccacgataccagccgcatcctcagccactggatcctgccgctgggctggctggccctgctcaccggaatgttctgggtcggcgaccgctccgactaccatcgccttttctatatcctcctggcggcaccgacgctactgtacgtgatactgcaaccgcgtctgcttcgcccgctaatgggctcgccgctgttcatcgccttcctcgccttcagcagctacatgatgctgagcctgtcctggtcggcccccgagaactccaccggctcgctgctcaagcgccccctgtacatcgccctcctgttcttctgcgccgccatcctggcgctcgaagctcccctccgcctcaagaccgcgacctggctggcagcccttggcgcggtgatctccgcggcagccaccttgctgcaatactactgggacgccaacccgctgcgccttaccggttatggcgctctctataacccattactgagcgcccatgtctatggcgccttcacggcactctggctggcctattggatgcaatcccgcctcatcctggcccccttgccactgatatctctggcgctgctcggtggccttctcatcgcgaccggttcacgtactcccctggtagggctcacagcggcccttatgtggctggtcctggccggagacaggaaaaaagccctcatcgccctggcactcgccctggctggagcgctactgggctacatcctgtacccggaagtgatcacccagagaggggcatcgttccgcccggaaatctgggccgacgccctacgccagatcagcgagcatccatggttcggacacggctacgatcatccgatgcgaatcgtcctgagcaacggcatgctgctcgccgacccgcacaacatcgaactgggtgtgcttttcgctggagggatcatcgggctcctgctgtgggtggcgatctacgcactggccttcggcttctcctggaaaaaccggaagtctccagcggttctgctagcctcgacctggctggtgttcggcctggcagccggactcacggagggcaacgccttcctgccccgtcccaaggaacactggttcctgatctggattcccatggcgctgctgtatgcgctgtggatccagcaaaggttcgccgccagcaggcgcggtgaggatatcgccgcgccttga

SEQ ID NO: 318088 - DNA, 651 bp, Pseudomonas aeruginosa
atgcgagtcatagactacccctcctacttgcagttgcgtgacaacgcagaagtgctggaagccgatggtcatggggacaaggtactgcgtctgcgcgacgggtccttcctcaagctgtttcgccgcaagcgcctgatttcctccgcagccctgttcccctatgcggagcgcttcgcccgcaatgccagcgaactggcgcggcgcggcatcgtctgcccgaaggtgctggacgtattgcggatcccacatatccagcgcgacgcggtgcactacgagccgctaccggggcagaccctccgccaactcgaccgcaacgacccggagtgcggcgacgcagtccggacgcaactgggcgagctgatcgccgcgctgcacgccaagggggtgtacttccgctcgctgcacctgggcaacgtggtgcgcacgccggaaggccggatgggcctgatcgacatcgccgacctgcgggtccagcgctcggcgctcagcgccgcccagcgcattcgcaatttcaagcacctgctgcgctacgaacaggatcgaacctggttcctcgacgacagcgagcacctggtgctcaaggcctatctccgcagcagccaggtccactggacactcgagcagctcctcaagcaactgcaactggattga

SEQ ID NO: 318089 - DNA, 1812 bp, Pseudomonas aeruginosa
atgagcgatagtcctcagaatcccggaccttccagtctcaagatctatttccgcctgttgggttacgtgaagccctacatcggaatgttcctactcagcatcgtcggtttcctgatcttcgcctcgacccagccgatgctggcgggcatcctcaagtatttcgtcgacggcctctccaatcctgacgcggcattgtttccgaatgtgcagtggccctggttgcgcgacctgcacctggtctacgcggtgccgttgctgatcatcctgatcgctgcctggcaggggctgggctcgttcctcggcaacttcttcctcgccaaggtttccctggggctggtgcatgacctgcgggtcgccctgttcaacaagctgctggtgctgccgaaccgctatttcgacacgcacagctccggccacctgatctcgcgcatcaccttcaacgtgaccatggtcaccggagcggccacggatgccatcaaggtggtgatccgtgagggcctgaccgtggtcttcctgttcctctacctgctgtggatgaactggaagctgaccctggtgatgctggcgatcctgccggtcatcgcggtgatggtgactaccgccagccgcaagttccgcaagcagagcaagaagatccaggtggccatgggcgacgtcacccacgtcgcctcggaaaccatccagggctaccgggtggtgcgcagcttcggcggcgaagcctatgaagagaagcgcttcctcgacgccagccagagcaataccgacaagcagttgcggatgaccaagaccggcgcggtctacacgccgatgctgcaattggtgatctacgtcgccatggcgatactgatgttcctcgtgctgtggctgcgcggggacgcctcggccggcgatctggtggcctatatcaccgcggcgggcctgttgcccaagccgatccgccagctttccgaggtcagttccacggtccagcgcggcgtcgccggcgccgagagcatcttcgagcagctcgacgaagcggcggaggaagaccagggtaccgtcgagaaggagcgggtcagcgggcgcctggaagtgcgcaacctgagcttccgttatcccggaaccgacaagcaggtgctggatgacatcagtttcatcgccgagcccgggcagatgatcgccctggtcggtcgttccggtagcggcaaatcgaccctggccaacctggttccgcgcttttaccagcacaatgacggcaagatcctccttgatggcgttgaagtcgaggattatcgcctgcgcaacctgcgccgccacatcgccctggtgacccagcaggtcacgctgttcaacgacagcgtggccaacaacatcgcctacggcgacctggctggcgcgccgcgcgaggaaatcgagcgggcggcgaaggctgccaacgccaaggagttcatcgacaacctgccgcaaggcttcgacaccgaggtcggcgagaatggcgtgctgctttccggcggccagcgccagcgtctggcgatcgcccgggcgctgctcaaggacgcgcccctgctgatcctcgacgaggcgacctcggcgctggacaccgagtcggagcggcatatccaggcggcgctggacgaagtgatgaaggggcgcaccaccctggtgatcgcccaccgcctgtcgaccatcgagaaggccgacctgatcctggtgatggaccaggggcagatcgtcgagcgcggcagccacgccgagctgctggcgcagaacggccattatgcgcggctgcatgcgatgggactggatgagcaggcgccggcgcctgtcggctga

SEQ ID NO: 318090 - DNA, 1422 bp, Pseudomonas aeruginosa
atgaagttgtccatgccccgtttcgaccaggccccggtgttggtggtcggtgatgtgatgctcgaccgctactggcatggcgcgacttcgcgcatttcgccggaggccccggtgccggtggtccgcgtcgaacagcacgaggaccgccccggcggcgccgccaacgtcgcgctgaacatcgccgcgctgggcgcgcaggccttgctggtcggcgtcaccggccgcgacgaggccgccgacagcctggccaacagcctcaaggccgctggagtggacgcgcgcttccagcgcatcgatagccagccgaccatcgtcaagctgcgggtcatgagtcgtcaccagcaactgctgcgggtcgacttcgaggagccgttccgcaccgacgcggcggccctggccgtggacgtcgagtcgctgctggccaaggtcaaggtgctggtgctgtccgactacggcaagggcgcgctacagaaccaccaggtgctgatccaggcggcgcgggcgcgcaacattccggtactggccgatcccaagggcaaggacttcgccatctatcgcggcgccagcctgatcaccccgaacctgtccgaattcgagaccatcgtcggccgttgcgccgacgaagccgaactggtcgccaagggccaggcgctgatgagcgaactcgacctcggcgccttgctggtgacccgcggcgagcatggcatgaccctgctccgccatggccagccggccctgcacctgccggcgcgggcgcgggaagtgttcgacgtcaccggtgccggcgatacggtcatctccaccctggccgcggcgcttgccgccggcgaggagctgccgtccgcggtgggcctggccaacctggccgccggcatcgtggtcggcaagctgggtaccgcggcgatcagcgcgcccgaactgcgtcgcgcggtgcagcgcgagcagggttccgagcgtggcgtgctgggcctggagcaactgctgctggcaatcgaagacgcccgcgcccacggcgagaagatcgtcttcaccaatggctgcttcgacatccttcacgccggccacgtgacctaccttgaacaggcgcgcgcccagggcgaccgcctgatcgtcggggtcaacgacgacgcctcggtcactcgcctgaagggcgttggccggccgatcaactcggtggaccggcgcatggcggtactcgccgggctcggcgcggtggactgggtggtgagcttcgccgaagacactcccgagcgcctgctcgagcaggtgcgtccggacgtgctggtcaagggcggcgattacggcgtcgagcaggtggtcggcgcgcagatcgtcagggcctacggcggcgaggtacgggtgctcggcctggtggagaacagctccaccaccgccatcgtcgagaagatccgccagcgctga

SEQ ID NO: 318091 - DNA, 1947 bp, Pseudomonas aeruginosa
atgtgcggtatcagtggatttatccaaagacacactgaaaagacccaaatggtacagatcattggccagatgacggacaagatcattcatcgtggccccgatgacaaaggatattggttggatcattccatcggcctggcgctcggccaccgccgcctggccatacaggacctgtcgacggccggacatcagcccatgccgtctgcatgcggacggtacgtcatagtcttcaatggggagatctacaatcatctggcactccgtgccctgctcggaccgcatccctggagggggcattccgacaccgagacgctgcttgcctgcttctccgtctggggtatggagaaaaccctatccaatatcactggcatgttttccctcgcacttttcgataaagaaacgagtaaaatcttcctcattcgtgaccggctaggagaaaaacctttatattatgggtggcagggaaactgcttcctgttttcctccgagttaaagtccctgaccgtacacccagagttccaaaaagagatcgacagagacagccttgcagcatttctacgttttggatattgccccactcccaacagcatctacaaaggtataaaaaaacttccgcccgggcattacattcaattgaacctggctaatgctacgccaggtgaactcatggatccgctcccctactggtctctgagcaaggtcatcgcacaagggatccatcagccattccagggaagtgactcagaggccgtggatgccctgcaccggcaactgtccgccagcgttacttcgcaaatgctcagtgacgtacctcttggcgccttccttagcggtggcgtcgacagcagcacaatcgtggcccttatgcaggctcggcattcccggcccgtacagacgttcaccattggcttcgacgagcccggctacaacgaagcggaacacgccaaggctgtcgcccagcatctcggcacccagcacaccgagctttacgtcagggccgaagacgcactcgcggtggtgccgtgtcttcccggcatctactgcgagcccttcgccgatagctcacagataccgacctacctgatcagtcgcctggccaagcaatccgtaacggtcgctctcaccggcgatggtggcgatgaactgtttgccggctacaatcgctatctcacggcatgccaggcatggaacaggttgcaacagcttccactggttgccaggatgacgctcgcaaaactgctgagcgctctgccaccggcgatgtgggacagcctgttctctctcgcaagccccttgctaccctcgaagtaccgtttgcgcacaccaggagacaagcttcagaagctcgccggtctcatggcgttttccagtgaagaggacttctacaaggatctggtcagccactggaagaagcctacgaacctcgtcatcggcagcgaggaatcggcttccgtcttttggaatcttgacagcctccccgagatggaaagcttcgaacaatggatgatggccatggatacccggacctacctggccgatgacatactggcgaaggtcgaccgcgccgcaatggccactagcctggaaacccgcgtcccgctcctcgatcatcgcgtggtcgaactcgcctggaaaatgccactgaacctgaagatcagaaataacgacggcaagtggttgctgcgccaggttctttaccagcacgttccccgggaactgatcgagcgtcccaagatgggattcgccatccctctggacacctggctgcggggaccgttgcgggagtgggccgaaagcctcctggctgaggaacgcttgagacgcgagggctacctgcgcccggagccgattcggcgagcctggcaggagcatctcagcggaaaaagaaactggcaaggcccgctctggaatgtattgatgttccaggcttggctggaacatcaatga

SEQ ID NO: 318092 - DNA, 1284 bp, Pseudomonas aeruginosa
atgagcaccgatgtacagggccgtgccctggctgtactgaaccgtgtcgcccaggccgactggccggatcgcttcaatcttcgcaaacccttcgagaagttgctctacagcggcagccgtaccggcttccgcctggccagcaagcgttcggcgaagcaagcgaagggaccgcgcaaggccgatccggacgggttgttcgacctgtcgttctccgacgaccagcagatgctggtggacatgctcgaaggcttcgccctggaggtgttgcgtccgctggctcatgacgcggatgccgaggccagcctgccggcggaactgctcaaccaggcgctggagctgggcctgacccactatggggtcggcgaggtgcacggcggcatggccggtgagcgcaccacggtgaccactgcccttatcgccgaggccctggccaagggcgatctgtcgctggcggcggccctgctggtgccgttgtcggcggccaactgcatccgccgctggggcagcccctcgcagcaggcgcagtggctgccggcgttcgtcagcgaagagggggcgccgctcaccgccatcgcggtcaacgagccgagtctgctgttcgacccgcagaaactggcgacccgcgcccggcgcaagggcagtcactacctgctttccggagagaaatgcctggtcctgcgcggcctggaggccagccgcctgatcgtcgcggcgaagaccgacgaggggcctgcgctgttcctggtggaagcctccgccaagggcgtcgagcgacgtgccgagccggcgatgggactgaaggccggcggcactgcccggttgcgcctgaagagcgtcaaggtgccggcggacaaccgcctggccgccgagcatttcgactaccgggccttcctcgatcacgcgtccctggcctggtgtgccctggcgctgggcaccggacaggcggcgctggactacgtgatcgcctactgcaacgagcgtgaggccttcggcgagccgatcagccatcgccagggggtcgccttcatggtcgccgacatcgccatcgaactggacgccatgcgcctgatggtctggcgcgcctgcgccctggccgagcgcggccagccgttccagcgcgaggcttacctggcgcggctgctgtgcgccgagaaggcgatgaagatcggcaccgacgcggtgcagctgctcggtggccacggcttcaccaaggagcatccagccgagcgctggtaccgcgacctgcgcgcggtagcgctgatggccggcggcctgcacctgtga

SEQ ID NO: 318093 - DNA, 1209 bp, Pseudomonas aeruginosa
atgtacctggaaaccccgaagaaattccgcagcctggccaaccaggcgcatcaggtcgcggaaaactatttccggccgatctcgcgcaagtacgacaaggccgaacacgcctatccgaaggagctggacctgctcgcggccttgctggacggcatgaacagcggctcgcccgaggctgtcggtgcgacctcggcgagcaagcgcgccggcaagcaggtagaggagggcatcaagaacggcggcaacctgtcggcattgctcggcgtgatggaactgtgctggggcgacgtcggcctgctcctggccatgccgcgccagggtctgggcaacgcggcgatcgccgcggtggccaacgaggagcagttgcagcgcttcggcggcacctgggcggcgatggcgatcaccgagccgggctgcggctcggactcggcggcgattcgcaccaccgcgacccaggatggcgaccactatgtactgaacggcgagaagattttcgtcacttccggcgagcgggccgatgccgtggtggtctgggccaccctgaaccgcaacctggggcgggcggcgatcaagtccttcgtggtcgagaagggcacgccggggatgaccgtgacgcgcctggagaagaagctcgggatcaaggcttcggataccgcttcgatcagtttcaatgattgccgggtgccggccgcgaacctgctgggcaacgccgaggtcgacgtgcagaagggtttcgccggggtcatggagaccttcgacaatacccgcccgctggtggccggcatggctgtcggggtggccaaggcggcgctggaccggacccgcgaattgctgaagaaggctggctgcaagttcgactacaggaagccgctgctgaccgtcagccacgccgaggccactctctatcgcctggaggcggagtgggaggcagcgcgcctgttgaccctgaaggcggcatggatggccgacaacaagctgcccaactcgaaggaagcgtccatcgccaaggccaaggctggacgggtggccaacgagatcaccctgaagtgcgtggagctggtcggcgccctcggctacgccgaggatgagctgttggagaagtgggcgcgggactcgaagatcctcgacatcttcgagggcacccagcagatccagctgctcatcgtcgcccgccgcctgctcggcaagtcttccagccagttgaagtag

SEQ ID NO: 318094 - DNA, 921 bp, Pseudomonas aeruginosa
atgccccgtatgctcgcccgcaaggatccgtccgccttcaagaccctgccgctgctggtagaggcctccccggacgggctggtctaccaggccctcggcctgccgctgaacttccagcagatgctcgtacgccgccgccgcatggaggtagccgacccgcagcgcttcgtcgccgagctggccaacctgggggtctcggtgcgcttgaccctgaactggcagggccgcgactactgggtgctggtccgtcagcgccggctggaccgcggcgataccgtgctcaagctgatctccggctacgtaccggcccacgaactgaacctgccgttgctcacggcgatccaggaagtcgccgaggaatgcctggtggagaccgccggcggctggctcggcgggcgcttcggcgacacctggctgccgacgccctaccagggttcgctgcgctaccgggagaacagccacttcgtcctcaccccgctgtccggcgccgcccgtccggtgcaagccggcagcctgcgcttgctggagcgcccgcgcgcctacgtacacctgcccacggcctcgctgcaactggtctacgacatgcgcctggagctgccgcgcgatgcgcgcgagccgagcctctaccatgtcgacgagcggctcgagagcggtccgctggtggcgcgcctggaccgtcggcgccccgatctctacctgctgccgctggaccaggggcgccccaccggcgacctgttcaccctgcgcaagggccagttgcgccctgcggccacccgcggcctgtggttggccgagagctttgccgtacaggacggctggctggtgcatgaggaacgcatccgtttccgcgactggctggcactgtggccatccagcaacggcgaccaggccggcggtggacgcgaccgcgccagcgcctga

SEQ ID NO: 318095 - DNA, 813 bp, Pseudomonas aeruginosa
atgatcagggataccctccacgacctgcaccgcccgctgggcgacaccggcctggccgtttcgccgctgggcctgggcaccgtcaagttcggccgcgaccagggagtgaagtacccttccggcttcaccatccccgacgaccgcgaagccgccgacctgctggccctggcccgcgacctcggcatcaacctgatcgacaccgccccggcctacggccgcagcgaggaacgcctcggcccgctgctgcgcggccagcgcgaacattgggtgatcgtcagcaaggtcggcgaagagttcgtcgacggccagtcagtcttcgacttctccgccgcgcatacccggcgctccgtcgaacgcagcctgaagcgcctggagaccgaccggatcgagctggtgctggtgcattccgatggcaacgacctggatatcctcgagaacagcgaggtctacccgactctcgccgcgctcaagcgcgagggcctgatcggcgcctacggactctccggcaagaccatcgaaggtggcctgcgcgccctgcgcgagggcgattgcgcgatggtcacctacaacctgaacgagcgcgccgagcgcccggtcatcgagtacgccgcggcccatgccaagggcatcctggtgaagaaggcgctggccagcgggcatgcctgcctgggcgccggacaggacccggtgcgtgccagcttcgaactggtcttcgaccagccgggcgtcgccgccgccatcgtcggcaccatcaatccgctgcacctggcccataatgtcgcgatggccgcgcaagccctgaaaaaggcctga

SEQ ID NO: 318096 - DNA, 1176 bp, Pseudomonas aeruginosa
atgccccaagccctttccaccgacatcctcatcgttggcggcggtatcgccggcctctggctgaacgcccgcttgcgccgggccggctacgccaccgtgctggtggaaagcgccagcctcggcggcggacagagcgtgaagtcgcaggggatcatccacggcggcgccaagtacgccctgcatggtgccctgaccggcgcctccgaagccatcgccgacatgccgcggcgctggcgcgcctgtctcggcagcgacggcgaactcgacctgcggggcgtgcgcctgctttccgaggcgcactacctgtggtcgccgggcggcctggccggcagccttaccagcttcttcgccagcaaggctgtgcgcagtcgggtcgagcaggccaagggcgaggatttgcctccggcgctgcgcgacaaggggttcaagggcaaggcctaccgcctcacggaaatcgtcttcgacgtccccgacctgattcgccgcctggcggaactggccggcgacagcctgctcgccggcgaacgcatcgaaccgctgcgcgaaggccgggaactggccggcctgtgcgtcgacggccgggagatccgtgcccagcgcgtggtgctcagtgccggtgccggcaacgaggcgctgctccgcgaactgggcctggaacaaccggccatgcagcggcggccgctgcacatggtgatggtcaaggcggcgaccctgaaaccgctgtacgcccactgcctgggggcaggaccgaagccacggatcaccgtgaccacccatccgacccgcgacggccagtcggtctggtacctcggcggcgacatcgccgaagccgatggcgtggcccgcgacgaagccgcgcagatcgccgaagcgcgtcgcgaactggcaaagctgctgccctggatcgacctcggccaggcgcagtgggccaccttgcgggtggatcgcgccgagccggcacagtccaacctgttgcgtccggacaacgccttcctcgccgaacagggacgcctgctggtcggctggccgaccaagctggcgctggcccctgacttcgccgaccgggtctgcgcccgcctggaagaagacggcatccgccccagcgaacatgccgcgctgccgcaactgccgcgtccgccgctcgccgaaccggcctgggaggtagccttcgcatga

SEQ ID NO: 318097 - DNA, 333 bp, Pseudomonas aeruginosa
atgaccaattatctctacctcgccatcgccatcgccgccgaagtggtcgccaccacctcgctgaaagccgtcgccggattcagcaagccactgccgctgctgctggtggtgggcggctacgtgctcgccttcagcatgctcgtgctggtcatgcgcaccctgccggtcggcgtggtctacgccatctggtccgggctcggcatcgtcctggtcagcctggtggcgatgttcgtctacggccagcgcctggaccccgcggccctcctcggtatcggcctgatcatcgccggcgtgctggtgatccagttgttctcccgcgcttcggggcactga

SEQ ID NO: 318098 - DNA, 885 bp, Pseudomonas aeruginosa
atgcagtggaacctggagcagatccgcctgttcgtcagcgtcgccgagcgccagtcgttctctgccgccgcccgcgaactgaagcgggtgcaatcggcggtgagcaacggcatcgcgctgctggaggcggacctcggcgtcaccctgttcgaacgcagcagcggacgccagccgcgcctgaccgacgagggccgggtgctgctggcggaggcgcgcgaggtgctgcgccagtgcgagcgcctgcaggggcgcgcgctggggctggcgcgcggcgaggagccgcggctgcgcctggcccaggacgaggcgatgccctaccagccggtgctggacagcctggaagcgctggcgcagcgctttcccagtctggaggtgcaggtgtccagcggcggccagggtgacgtcacccgtcgtttgctcgaggagcaggctgacctcggcctgctgttccaccatgagcgcatgcctgagtcgctggagcggcggcgcctcggcagcgtcgagatggtcacggtgtgcggtgccggccacccgctggccgggctgcaacgggtcagtcgccgcgagctggcacagcaccggcaacttttgatcgtgccccagcagagcggctatccgggcggcgagcagatcagcccgcaggtctggcggctggacagcttctattccatggccgagctgctgatgcgcaacctcggctgggcctggctaccgcggcacgtggtgcagtaccccacctacgaccggctgatggtggagctgaccagcgactggacgccgccggcgctggtggtcgaactggtctggcggcgcaacgaggtgctcggcccggcggcggcctggctcggcgaaaccttcacccgccacctgcgcgccatcggctga

SEQ ID NO: 318099 - DNA, 1278 bp, Pseudomonas aeruginosa
atgaaccgtaccctctataccctgctgttccacctcggcttgccgctggtggcgttgcgcctgtggtggcgcgcgcgccaggcgccggcctatgccaagcgcatcggcgagcgtttttccctgtccttgcccgaggtgccgcccggcggcatctgggtgcacgccgtctcggtgggcgagagcatcgccgccgcgccgatggtgcgggcgctgctggagcgccatccgcagctgccggtcaccgtcacctgcatgaccccgaccggctcggagcgcatccgcgcattgttcggcgagcaggtccggcactgctacctgccctacgacctgccctgggcggcggcgcgcttcctcgaccgggtgcggccgcgcctggcggtgatcatggaaaccgagctgtggcccaaccatatccatgcctgcgccgtgcgcgggatcccggtggcgctggccaatgcgcgcctgtccgagcgctcggcgcgtggctacgcgcgcttcgccgggctgacccggccgatgctcgccgagctgtcctggatcgccgtgcagaccgaggccgaggccgagcgcttccgtcgtctcggcgcgcgtcctgagtgcgtcagcgtgaccggctcgatcaagttcgacctgcgcatcgacccgcagctgccgctggccgctgccgccctgcgcgaggaatgggacgcgacggcgcgaccgctgtggatcgccgccagcacccatgccggcgaggacgagatcgtcctggcagcccaccggcgcctgctggaaacgcgtcccgacgcgttgctgatcctggtgccgcgccatccggaacgcttcgccggcgtccacgagctatgccgccgcgaaggcttcgccacggtccggcgctccggcggcgagccggtggcacgcgcgacccaggtgctgctcggcgataccatgggcgagctgctgttcctctatgccctggccgacatcgctttcgtcggcggcagcctggtgcccaacggcgggcacaacctgctggagccggcggccctgggcaagccggtgttcgccggtccgcacctgttcaacttcctcgacatcgccgcgcaattgcgcgacgccggggcgctgctcgaggtgacggatgccggcgagctgtgcgacggcctcgcgcgcctgtgggcgcagccggaggtcgcgacggccatggccactgccggagagaaggtgctgcgcaacaaccagggcgccctggagcggctgctggcggggttggcgcggttgctcgggcgcggcgggtag

SEQ ID NO: 318100 - DNA, 600 bp, Pseudomonas aeruginosa
atgccccgcccgtcaccgccggacgccaccgacacgccgcgcagcgaaacgcacttcctcggcacccgcatccgcggcctgcgcaagcgccgcggcctgaccctggccgagctggccgcacagagcgaactcaccgccggctacatcagccagttggaacgcaacctggcgtatccgtcgattccggcgctgttcaacatcgcccgcagcctcggcgtgaccatccagtggttcttcgccagcgaggccgcggtggacccggcggacgccggctacgtggtgcggcgcaacacgcgcatgagcgtgcattacgaagacggcatcatcgacgaactgctcaccccgcagcccagccgccagttggagatcctccactcgcgtttcccgccgggcacctacagccagcagagctacagccatgagggcgaggaagccggctacatcctcagcggaatcttcgaactctgggtcggcgaccgccatttccagctccgcgagggcgacagcttcagctactccagccaggaaccgcatcgctacggcaacccgggcgacagcgataccctggtgctctgggtgatcaccccgccgacgttctga

SEQ ID NO: 318101 - DNA, 1947 bp, Pseudomonas aeruginosa
gtgaatttcccgcacctgttcagccccctggaaatccggggcaaacgcctgaaaaaccgcatcatgtcgagcggccacgacacgtcgatgcctaccgacaacctggtcaacgagccactcgtcgcctatcaccgcgcccgggcccgcggcggcgccggactgatcgtcatgcaggtggcgggggtccacgacagcgcgcgctacacctcgcacgtgctgatggccaccgacgatgcctgcatccccggctaccggcgggtcgccgaggcctgccacgccgaaggctgcgtggtgctgtcgcagatcttccatcccgggcgcgagatcatggagtccgccgacggcctgctggcggtggcctattccgcctcggcctcgcccaacgaacggttccgggtgatgccacgcgaactcgaccagccgctgatcgacgagatcgtcgccggctacgccgccgccgcgcgccgcctgcacgaggcaggactggacggggtggaggtggtcgccagccacggctacctgccggcgcaattcctcaacccgcgggtgaaccgccgcaaggatggctacaacggcgacctcgatgcccgcctgcgtttcctccgcgaagtgctggcggcggtgcgcgcggccacctccgaggacttcatcgtcggcctgcgcctgtccgccgacgagcgcgaccccgagggtctcagcgaaagcgagtcgctgcaggcggccgaggcggtccagggcgagctggactacctgcacatcgtcgccggcacttcggcctccctcggcggcgccatccatatcgtcccgccgatggccatcgagccggcctacctggcccgcgaagccggtaccttcaaggcgcgcctggcgatcccgctgttcgtcaccgggcgcatcaaccagccacaggaggccgaggccatcctcgcccgaggccaggccgacgtctgcggcatgacccgcgcgctgatctgcgacccgcagatgccgaacaaggccgaggccgggcgcagcgacgacgtgcgcgcctgcatcgcctgcaaccaggcctgcatcggacatttccaccgaggctatccgatctcctgcatccagcacccggaaaccggccgcgagctgacctacgcaacgcccaatccggcctcgcggcgcaagcgcgtgctggtcgccggcggcggcccggcggggatgaaggcggcggcggtggcggcacagcgcggccacgaggtagtgctctgcgaggccggcgcccagctcggcggccaggtcaacctggcgcaactgctgccgcgccgcgcggaattcggcggcgcctccaccaacctgcaacgggagatgcaactggccggcgtcgaggtacgccgcaacacgccggtcgaccgcgcgctggtggagcgcgaacggccggacctggtgatcgtcgctaccggcgccgaaccctattggccgcctttcgagcgcggcggcgagctgcaggtggtggatgcctggcaggtgctgcgcggcgaggtgcgggtcggtcgttcggtgctggtcaccgactggcggggcgactggatcggccccggtatcgcggaaaagcttgtacgcgagggccaccaggtgcgcctggcggtgaacggcacccactgcggcgagagcctgccgctgtatgtgcgcgaccagttggccggcgagctgcaccgcctgggtatcccggtcacgccctacgcccgcctgtacggctgcgacgataccacggtgtacatgcagcacagcgccagcggcgaggcgatgctgttcgaggaggtcgataccctggtgctatgccagggccaccagccggtggaccgcctggccgacagcctgcacggcctggcggaggtgttgcggatcggcgactgcctggccccccgcaccgccgaggaggcgatctacgaagggctcaaggccgcctggagcatctga

SEQ ID NO: 318102 - DNA, 1092 bp, Pseudomonas aeruginosa
atgaaccgttcctttccgttgcgccgcgcggccagcgcccgtccgcacccggtttttccttgccgcgtcctgctcggcgccgtcctgctggcgttcggcggcctcgcgccggtccaggccgatgatggcctggtggtggtcggctacggcggcgccggacagaaggcccaggaggtggcgttcttccagcccttcacgcagcagaccgggattcccgtggtgcagagcgagtacaacggcgagatggcccggatcaaggtgatggccgacaccggtcacgccgactgggacctggtccaggtcgaggggccggacctggcgcgcggttgcgacgacggcctgttcgagcgtctggactggcaggccatcggcggcaagcagcagttgatcgccaatgccgcccaggaatgcggttccgccgcgctggtctggggcgtggcgatcggctacgacgccgaccggctgcaacagccgccggcgtcctgggccgacttctgggacgtccagcgcttccccggcaagcgcggcctgcgcaagcgggcgatctacaacctggagttcgccctgctcgccgacggcgtgccacgcgagcaggtctatccgctgctggcgacccgcgccggtgccgaccgtgccttcgccaagctgggccagctcaagccctacatccagtggtgggaggcgggagcgcagccggcgcagtggctggccgccggcgacgtggtgatgacgtccacctacaccgggcgcatcgccgacgcccaccgcgcggggcgcaacctggccctggtatggccgggcagcctgtacggcatggactactgggcggtggtcaagggttcgaagcgcggcgccgaggcgcgtcgcttcatcgccttcgccaatgccccggatgcccaggtgcgctacgtcgagaacattccctacgggccgaccaaccgccaggccgcccagcgcctgcccgcgcaactggcgagctgggtgccgaccgcgccggcgaacctggagcagggcctggcgatggacgacgaattctgggtcgagcacggcgaggagctggaggagcgcttcaacgcctgggccagccagtga

SEQ ID NO: 318103 - DNA, 648 bp, Pseudomonas aeruginosa
atgaaccaggaagtgcgcttttcccgtctggagccagagcagcgcaaggcgctgctgatcgaggcgaccctggcctgcctgaagcggcatggcttccagggcgcctcggtgcgcaagatctgcgccgaggccggggtatcggtgggcctgatcaatcaccactacgatggcaaggacgcgctggtggccgaggcctacctggcggtcaccggacgcgtcatgcgcctgctccgcggtgccatcgacaccgcgccgggcggcgcccgcccgcggctctcggcgttcttcgaggcatccttctccgccgagctgctcgatccgcaattgctcgacgcctggctggcgttctggggtgcggtgggcagcatcgaagcgatcgggcgggtccacgaccattcctatggcgagtaccgggcgctgctggtcggcgtgctgcggcaactggcggaggagggcggctgggcggacttcgacgcggaactggcggccatcagcctcagcgccctgctcgacgggctgtggctggagtctgggctgaatcccgcgaccttcacgccgcggcagggcgtgcagatttgcgaggcctgggtggatggcctggaggcgggcgcccatcgccgcttccggcgtgcgatggaagcttgttga

SEQ ID NO: 318104 - DNA, 735 bp, Pseudomonas aeruginosa
atggcgatggttccgcgcgtattggtggtcgacgacgacccggtgattcgtgagcttctccaggcctatctcggcgaggagggctatgacgtcctctgcgccggcaacgccgagcaggcggaagcctgccttgccgagtgcgcccatctcggcgagccggtcgagctggtgctgctggacatccgcctgcccggcaaggacggcctgaccctgacccgcgagctgcgggtgcgctccgaggtggggatcatcctgatcaccgggcgcaacgacgagatcgatcgcatcgtcggcctggagtgcggcgccgacgattacgtgatcaagccgctgaacccgcgcgaactggtgtcgcgggcgaagaacctgatccgccgggtgcgccatgcccaggcccgcgccggccccgcccggcaggccctcaggcagttcggcgactggctgctggacgccgaccggcgccgcctgatcgaccacgcgggcaacgaaaccctgctcacccatggcgaattccaattgctcggcgctttcctgcgcaacagcgggcataccctgagccgcgaccagttgatggaccagatccgcaaccgcgagtggctgcccagcgatcgctccatcgacgtgctggtcggccgcctgcgtcgcaagctgcgcgacgacccggccgaaccgcaactgatcatcaccatccacggcgccggctacctgttcaccgccgcggccagcgacgcctga

SEQ ID NO: 318105 - DNA, 777 bp, Pseudomonas aeruginosa
atgcaggcctgctggctggcgctctgcggatggctgctgggcggcctggtacaggctgcggagaccatccgctattgcgactatccggtatacccgccgatctcctggagcgacggccagcaggtccgggggctggcgccggagctggtgaagcggctgttcggcgcgctgggctaccgggtcgaggtggtggtgctgggcaactggcggcgctgcctgctcgacgccgccgccggacgggtcgacctgatactggcctaccgcacgcccgcgcgcgatcgcgacctggcgttttccgccgagccggtgctgcgcgaggaggtggcgatcttctacaaccgccagcggccggtgcgcatccaatccctcggcgacctcgccggctatcgcggcgggctgttgttcggcgaaagctacggggcggacttcgaccgcttcgtcggccgccacggcaacgtcgaatgggtttccgacagccgacagaacttcggcaagctggtgcgccagcgcatcgactacatcgcccacgaacgccgcaccggcacgctgttcgccgagcgcctggccggcggcgagaacatccgtgcgctgcccgaaccgctgacggtggactacctgcgggtggcggtctcgcggcactcgccgctggcggcgaagatggacgagatcgaccgggccctgcgtggctatcgcgacgacggcagcatccagcgttggctggacgacagcgtgcgcgactatcggcgcctcgccggcaaccgcgcggacgcctggtga

SEQ ID NO: 318106 - DNA, 1800 bp, Pseudomonas aeruginosa
atgggcagtttcctttgcggcctggcggtggccctcagttggctgttccacagcctggtcactcgccatctgtggcgcatgtccgagttcgccgggcatatcgccgaaggcgacctgcaacagccgctgcgactggacaaggtggaccgcgagcgcgatgagatcgacgccgtcgccgccgccctggaagacatgcgccaggccctgcgcaccgaccgccgccggcgcgatgccgatcgcgacgagttgcgtcggcaggtcgagcggcgcaccgccagcctgcgccgggcgaaggaccaggcggaagccgccgaccgcgccaagagccgttttcttgcgaccatgagccatgagatccgtaccccgctgaacggcatcctgggcatggccgagctgctgcgcgaggcatcgctcggcgagcgtgaccgccagcgcctgcgggcactggcgacagcgggggagggactgctggcgatcctcaacgaggtcctccacttcgcccggctggaggaagcgccggatgtgccggaagcggtggacttttccttgcggagcctgctcgaggacgtcctcaccctgctcgaaccacgggcgcgggagaacgccacacggctggacctgtggctggacccacaggttcatgacggccatcgcggcgccgagcagttcctgcgccaggtgttgaccaacctgctgggcaacgcggtgaagttcaccgaggccggcgaggtgcgcgttcgcgtcgagcggctggcgcgcagcgcaggaagcgagcgcctgcggctgagcgtcgcggacgatggaatcggcattcccgaggaaatgcgcgaacgcatcttcgaacgcttcacccagggcggcgacgccgtgacccgccgttacggcggaaccggcctgggcctggcgatcagcaagcggctggtggaagcgctggggggacggatcggcgtggaaagccgggtcggccagggcagcacgttctggttcgagatcgagctggcgctggcgagcttgtccggcgcgacgccgccggcggcatcggtgtctgcgctggaggtgctgctggtggaggacgtggcgctcaaccgcgaggtggcccagggcctgcttgagcgggacggccaccgggtgatgctggccgaggacgcggggccggccctggcgttgtgccggcagcggcgcttcgacctgatcctgctggacatgcacctgccggggatggctggcctcgagctttgcgccgggattcgccggcagctcgacggcctgaaccgctccacgccgatcttcgccttcaccgccagcatccagccggacatggtgcgtcggtacttcgccgcgggcatgcagggcgtgctcggcaagcccctgcggatggacgagctgcgccgcgcgctgggcgaggtcggcaccagcgtgcctgcgcttgcggtggaggccgcgctggaccggcaaatgctcgagacccaccgccgcctgctggggcggcacaagctcgccggactgctgggcaacctgctgggaagcctggacgagcagttgccgctgctggccgaagccctggaccaggcggacctggccgaggcggcgaacatcgcccatcgcctgtccggaagctgccactccatgggcctggtggcgctcggcgccggcctgggcgagctggagcgcgaggccctgggcgcggccggggtcgacccgcgagcctggggcgcacgcctgggtagcctgcgccgcgacggcgccgaagccctgcgccgcgccggcttcctcggcgaagccgactcagcggccggttga

SEQ ID NO: 318107 - DNA, 1413 bp, Pseudomonas aeruginosa
atggctgacggcaaggaaaggctgcaactcacccgggccctggcgagccgccacatcttcatgctgtccctcggcggggtgatcggcaccgggctgttcatgggctccggcgtgaccatcaaccagggcggcccggccggcgcggtgctggcctacctggtggccggggtgctgatgtacctggtgatggtctgcctcggcgagctgtcggtgcagatgccggtctccggttcgttccaggcccacgcgacgcgtttcatcggcccggcgactggcttcatgatcggctgggtctactggatgagctgggcctccacggtaggcctggaattcaccgcggccgggatgctcatgacccgctggttcccggaggtgcccgtgtggctatggtcgggtttcttcgtggtcgtgctgttctctctcaatgccctggcgacccgcgccttcggcgaggccgagtactggttcgccgggatcaaggtggcggcgatcctggtgttcatcgtggtcggggggctggtgatcttcggcggtatcgaactgaagagcggtgcgccggcgccgatgttctccaacctggtcggcgagcggctgttccccaacggcctgtcggcggtgttcgcggtgatgatgacggtggtctatgccttccagggttgcgagatcatgggcgtcgccgccggcgagaccgagcgaccggagaagagcatcccgcgggcggtgcgcaacgtggtgttccgcgtactgatcttctacgtgctggccatcgtcgtgctttccgccatcattccctggcaacaggccgggctgatggaaagcccgttcgtgcaggtgttcgacatggtcgggattccctacgcggcggacctgatgaacttcgtcatcctcaccgccatcctctcggtaggcaactcgggcctgtacgcctcgacgcggatcctctgggcgatgtccaggaccggcatggccccgcgcggcctgtcgaagctcagcgcgcgcggcgtaccgctctacgcgttgctgatcaccctgtgcttcgccctgctctcgttgctgaccagcgtggtcgccgccgacaccctgttcatggtgctgatggcggtgagcgggatgtccggcaccgtcacctggatcgtcatcgcctacgcccaataccgcttccgccgcgagcacatggccagcggcggcacggtcgccgaactgaaatatgccgcgccgctgttcccgctggtgccgctggcctgcatcgccgtgtgctgctcgctgttcgtcttcctcgccctcgatcccacccagcggccgtccttgtactggggcttcggcttcatcgccgcctgctacctggcctattacgtggttcgtcgccggcagccgcagggactgggcgaccccgccctgggacgggccggctga

SEQ ID NO: 318108 - DNA, 792 bp, Pseudomonas aeruginosa
atgactgacctttccccattgcagacgcgggtcgaagccgggatcgcctggctcgtcctgaatcgtccgcaacagcgcaatgcactggatatccccaccctggaggccctgcacgtccgactcgatgcctgcgagcgcgacccggcagtgcgcgccgtggtcctcggcggcagcggacgcagtttctgcgccggggccgatctcgccgaatgggcggcggctgaagcccgtggcgagctggaaagctatggctggaccgaggccgcccacgccctgatggggcgcctgcacgccctcgacaaacccacagtcgccgccgtcaacggcagcgccgtgggcgctggcatggacctggcgctgtgctgcgatttccgcatcgccgccgcctcggcgcgcttcaaggccggctacaccggcatggcctactgcccggacgccggcgccagttggcatctgccacggctgctcggcagcgaggcggccaagcgcctgctgttcctcgacgaagcctggagcgcggagcgcgctctgggcgccggactggtcggcgaggtggtcgccgacgagcgcctggttgagacggtcggcgccttcgctgcgcgtctcgccagcggcccgaccttcgccttcgcccagaccaagcgcctgctgcgcgacggcgccgggcgctcgctggccgagcagttgcgtgccgagcaggccgccgggctgctctgcgggcgcagcgaggatgccgccgaggcgctgcgcgccgtggccgagaaacgttcccctcaattcagcgggcgctag

SEQ ID NO: 318109 - DNA, 1161 bp, Pseudomonas aeruginosa
atggatttcaggctgacccaggaacaggacatgctggtcgaggcggtgcgcagcttcgtcgagaaggaactgctgccccacgaggacgatgtcgaccgcgccgacgcggtgtcgccggagctggccgcacagattcgcggcaaggccctcgccgccggtttctatgccttcaacatgcccgaggaagtgggtggcggcggcctcgactacctgtcccaggcgctggtcgaacgcgagctgtcgaaggtctcctgggccctccacgtattcgtcgcgcggccctcgaagatcctcatggcctgcaccggagaacagctcggcgactacctgttgccctgcgtgcagggcgaaaagaccgattgcttcgccctcaccgagccgggcgccggctccgacgccaattcgatcaagacccgcgcggtgcgcgacggcgacgccttcgtgataaacggtagcaagcacttcatcagccacgccgggcacgccgacttcgccatcgtcttcgccgtcaccgacagctacgagcacaacggccgcaagcgcaacgcggtgaccgccttcctggtggacaagggcgcgcccgggatgaccgtgcgccgcgggccgaaatgcgtgagcaaccgtggctaccacacctacgagatcttcttcgacgattgccgggtgccggcctccaaggtgctcggcgaggtcggcaagggctgggaagtggccaacgcctggctcaccgccggacgggtgatggtcgccgccaactgcgtcggccaggcccggcgcgccctcgacctgtcgctgcgctgggcggccgatcgcaagcagttcggccagccgatcggcagctaccagggcgtttccttcaagctcgccgacatggccacgcagatccgtgccgccgagctgatgaccctgcacaccgcctggaagatggaccagggcaccatgaccgacggcgaggccggcatggccaagctgttcgccagcgagaccctcggcaaggtcgccgacgaagcggtgcagatcttcggcggcatgggcctgatggatgaaggaccggtcgagcgcatctggcgcaacgcgcggatcgaacggatctgggagggcacttcggaaatccagcggcacatcgtttcccgcgaactgctgcggccgttgctgcgttga

SEQ ID NO: 318110 - DNA, 2091 bp, Pseudomonas aeruginosa
atgaatcgtgaaaacctcaagcgcctgctggcacccaggcatctcgccttcattggcggccgtggcatggcgcgtgccctgaaacgctgtgccgaaggcggtttcgccggccagttgtggctggtcaatccgcagcacgccgaactcgaaggcgtaccctgcgtggccagcgtcgccgacctgccgtgcggcccggacgcggcgttcgtcgccaccaaccgcgaactgaccctcgacgcggtcgccgcgctcgccgccaaaggcgccggcggggcgatctgctatgcctccggcttcgccgaaaccggcgaacagggcctggccgtgcaacgccggctgctggccgccgccggcgaaatggcgctgctcggcccgaactgctacggcttgctcgactacctgcacggcgccgcgctatggccggtggcacatggcggtcggcgggtggagcggggcgtcgcggtgctgacgcagagcggcaacttcgcctacaacctgtcgatgagcgaccgttcgctgccggtggcctatatggcatcggtgggcaaccaggcgcagctgggcatcgccgagctgatggacgtgctgctcgacgagccgcgggtgactgccatcggcctgcatctggaagggctgaagaacgtcccggggttcgcccgcgcggcctacaaggcgttgcagaaaggcgtgccggtgatcgccctgaagaccggggtgtcggagatcggcgcggccctcgcgctcagccacaccagttccctggccggttccgacgcgctctacgacagcctgttcgagcgcctcggggtgatccgcgtgagcggcccggtgagcttcgtcgaaaccctcaaggccgccgcctgcggccacctgcctggcgggccgagcctggtcgcgctggcctgttccggcggcgacgccgggttgatcgccgattacgccgagcgcaacggcctggggttgccgtctttcgacgccgaacagcgcgacgaactggccggggtgctgcccgactacgccaacatcgccaacccgctggacttcaccaccgccatctggggcgatgccgcggccctggaggaaatgctcgacagcgctttgcgcagccctgccgacgccgccctgctggtgctcgactatccgggcgaggaaaccggcgagcggccgcagtgcgacctgcttctgcaacgctactgcgccgcgctgaagcgccacggaaaagtcggcttcatcgcctcggcgttcccggaattgctgccggcccgggcccgcgagctgttgcacggcgagggcgtcgccgcgctgcagggcgtcgaggatggtctcgccgcctggggacggatcgcccgctaccgccagcgccgcgcggcgctgctggagcgcggtgaggcggcgttggtgccgatctgcccagggccgctggcgggcgacggctacctgctcgacgagtggcaatccaagcaggcgctgaaacccttcggcctgccactgccccagggggtgctgagcacccccggccaggcccgcgaagcggccctcgacctcggcttcccgctggtgctcaaggcggtcagcgccgcactgccgcacaagaccgaggccggtggcgtggcgctcggcctacgcaacgaggcggcgttggaggcggcattgttcgacatgcgcgaaagcctggcccggcacgcgccgcaactggtcttcgagcgtgtgttattggagcgcatggctggcgcgccgctggccgagctgatcgtcggggtcaagcgcgaggagggcttcggcctggcattggtgatcggtgccggcgggatactcgtggagctgctgcgtgacagtcgcagcctgctcctgccaaccaccgacgcggcgatccgcgatgccctgctgagcctgcgcagcgcgccgttgctcagcggcttccgcggtcgcccggcagtgtgcatggaggccctggtggcggcgatccgcgcggtcgccgaattcgcctgcgaacatgccgagcgcttgctggagctggacgtcaatccgttgctggcggatgccgagggagcgctggcggtggatgcgttgatccggctggccaatggctga

SEQ ID NO: 318111 - DNA, 1611 bp, Pseudomonas aeruginosa
atgcaaccacagaagaccctcaccgccggccaggccctggtccgcttgctggccaactacggcgtggataccgttttcggcatccccggcgtgcataccctggagctgtaccgcggacttccgggcagcggcatccgccacgtgctgacccgccacgagcagggcgccggcttcatggccgacggttatgcgcgggtcagcggcaagccgggagtgtgcttcgtcatcaccgggccgggcgtgaccaacgtcgccaccgccatcggccaggcctacgccgactcggtgccgctgctggtgatttccagcgtcaaccacagcgccagcctgggcaagggctggggctgcctgcacgagacccaggaccagcgtgccatgaccgcgccgatcactgccttctccgccctggccttgagcccggaacagctgcccgaactgatcgcccgggcctacgcggtgttcgacagcgagcgtccgcgcccggtgcatatctcgatcccgctcgacgtgctcgccgcgccggtggcccatgactggagcgctgccgtggcgcgccgccctggtcgtggcgtgccgtgcaccgaggcattgcgggcggcggcggagcgcctggctgcggcccggcgaccaatgctcatcgccggcggcggcgcgctggcggccggcgatgcgcttgccgcgctgagcgagcgcctggccgcgccgctgttcaccagcgtcgccggcaagggcctgctgccgccggacgcgccgctcaacgccggggccagcctgtgcgtagcgccgggctgggagatgatcgccgaggccgacctggtgctggcggtgggcaccgagatggccgacaccgacttctggcgcgaacgcctgccgctgtccggcgaactgatccgcgtcgatatcgacccgcgcaagttcaacgacttctatccctctgccgtagcgctcaggggcgatgcccggcagacccttgaggcgctgctggcgcgcctgccgcaggaggcccgcgacgccgcgccggccgccgcgagggtggcgcgcctgcgcgcggagatccgcgcggcacacgcgccgctgcaggcgctgcaccaggcgatcctcgaccggatcgccgccgcgctgccggccgatgctttcgtcagcaccgacatgacccaactggcctataccggcaactacgcgttcgccagccgagcgccgcgcagctggctgcatcccaccggctacggcaccctcggctacggcctgccggccggcatcggcgccaagctcggcgccccgcagcgcccgggcctggtgctggtcggcgatggcggcttcctctacaccgcgcaggaactggccaccgccagcgaggaactggacagtccgctggtggtgctactgtggaacaacgacgcgctcggccagatccgcgacgacatgctcggcctggacatcgagccggtcggcgtgctgccgcgcaaccccgacttcgccctgctgggccgcgcctacggttgcgcggtgcgccagccgcaggacctggacgaactggagcgcgacctgcgcgccggcttcgggcagcccggcgtgaccctgatcgaactgcggcacgcctgcgcgcgctga

SEQ ID NO: 318112 - DNA, 1182 bp, Pseudomonas aeruginosa
atgcgctattccgacttcactcaacgtatcgccggcgacggcgccgctgcctgggacatccactatcgcgcgctggcgcgggtcgagcagggcgaggaaatcctcctgctgtcggtcggcgaccccgacttcgagaccccggcgcccatcgtccaggcggccatcgatagcctgctggccggcaacacccactacgccgacgtgcgcggcaagcgcgccctgcgccagcgcatcgccgagggccaccggcggcgcagcggccaggcggtggacgcggagcaggtggtggtgctggcaggtgcccaatgcgcgctgtacgcggtggtgcagtgcctgctgaatccgggcgacgaggtgatagtcgccgagccgatgtacgtcacctacgaagcggtgttcggcgcctgtggcgcgcgggtggtgccggtgccggtgcgctccgagaatggcttccgcgtgcaggccgaggaggtcgccgcactgatcaccccgcgcacgcgcgcgatggcgctgaacagcccgcacaacccgtccggcgccagcctgccgcgggccacctgggaaaccctggccgagctgtgcatggcccatgacctgtggatgatctccgacgaggtctacagcgaactgctgttcgacggcgagcatgtcagcccggccagcctgccggggatggccgaccgtaccgcgaccctcaacagcctgtcgaaatcccacgccatgaccggctggcgggtcggctgggtggtcggtcccgcagcactctgcgcgcacctggagaacctcgccctgtgcatgctctatggctcgccggaattcatccaggatgccgcctgcaccgcgctggaagcgccgctgccggagttggaggcgatgcgcgaggcctaccgccgccgccgcgacctggtaatcgagtgcctggccgacagccccggcctgcgtccactgcgcccggacggcggcatgttcgtgatggtcgacatccgtcccaccggactttccgcccaggccttcgccgaccgcctgctggaccgccatggcgtatcggtgctcgccggcgaagccttcggcccgagcgccgccggtcacatccgcctcggcctggtgttgggcgccgaaccgctgcgcgaagcctgtcggcgcattgcgctgtgcgccgccgagttgctcggccaggcctga

SEQ ID NO: 318113 - DNA, 705 bp, Pseudomonas aeruginosa
atgaacgtactgatcgtccacgcccacaacgaaccgcaatccttcacccgcgcgctctgtgaccaggcatgcgagaccctggcaggccagggccacgcggtgcaggtctcggatctctacgcgatgaactggaatccggtggccagtgccgccgacttcgccgagcgcgccgatcccgactacctggtgtacgccctggagcagcgcgagagcgtcaagcgccagagcctggccgccgacatccaggccgagctggacaagctgctgtgggccgacctgctgatcctcaactttccgatctactggttctcggtgccggcgatcctcaaggggtggttcgaccgggtactggtgtccggggtctgctatggcggcaagcgcttctacgaccagggtggcctggccggcaagaaggcgctggtcagcctgaccctgggcgggcgccagcacatgttcggcgagggtgccatccacggaccgctggaggacatgctgcggccgatcctgcgtggcaccctggcctatgtcggcatgcaggtgctggagcccttcgtcgcctggcacgtgccatacatcagcgaggaagcgcgcggcaacttcctgcgcgcctaccgggcgcggctggaaaatctcgagcaggatgtacccctgcggttcccgcggctggagcagttcgacgcgctgctccagccgctggcgcgctga

SEQ ID NO: 318114 - DNA, 1449 bp, Pseudomonas aeruginosa
atgctgcgcagactctccctggcggccgccgtggccgctgctaccggtgtcgcctgggccgcccagccgaccccgctgccgaccaagaccgacctgatcagcgtctacaaggaagccgtcgacaacaacgccgacctcgccgccgcccaggccgactacctggcgcgcaaggaagtggtgccccaggcccgcgccggcctgctgccgcaactcggcgccggcggccgtatcggcgactcacggatcgctctcgacgaaccggccgccacggtcaaacgcagcagtcatgtggtccaggccagcctcagccagccgctgttccgcgccgaccgctggttccagtggcaggccgccaaggaaaccagcgaccaggccaagctggaattctccgcgacccagcaggacctgatcctgcgcagcgccgagacctacttcacggtgctccgcgcccaggacaacctggccaccagcaaggccgaggaagccgccttcaagcgtcaattggaccaggccaacgagcgcttcgacgtgggcctttccgacaagaccgacgtgctcgaggcccaggccagctacgacaccgcccgcgccaaccggttgatcgccgaacagcgcgtggacgatgccttccaggccctggtgaccctgaccaaccgcgactacagcgccatcgagggcatgcgccataccctgccggtggtgccgccggcgccgaacgacgccaaggcctgggtcgacaccgcggtgcagcagaacctgcgcctgctggccagcaactacgcggtcaacgccgccgaggaaaccctccgccagcgcaaggccgggcacctgccgaccctcgatgccgtggcccagtaccagaagggcgacaacgacgccctcggcttcgccaacagcgccgccaatccgctggtgcactacggcaaggatgtcgaggaacgcacgattggcctggaactgaacatcccgatctacagcggcggcctgacctcctcccaggtccgcgagtcctaccagcgcctcaaccagagcgagcaatcccgcgaaggccagcgccgccaggtggtgcaggacacccgcaacctgcaccgcgcggtgaataccgacgtcgagcaggtccaggcgcggcgccaggcgatcatctccaaccagagttcgctggaagccaccgagatcggctaccaggtcggcacccgcaacatcgtcgacgtgctcaacgcccagcgccagctgtacgccgccgtgcgcgactacaacaacagccgctacgactacatcctcgataccctgcgcctgaagcaggcggccggcaccctcagcccggccgacctggaggcgctcagcgcctacctgaagcaggattacgatccggacaaggacttcctcccgccggacctggccaaggccgcctccgagcagttacagagcaagccgcgccagcagtactag

SEQ ID NO: 318115 - DNA, 1884 bp, Pseudomonas aeruginosa
atgagcgcaacgcagaagaacaacatcacccgccttgagcagctcgaccgccagtcgacgcagcctttcccgaactcgcgcaaggtctacctgaccggctcgcgcccggacatccgcgtcccggtgcgggaaatctccctcgccgacacccccaccgccttcggcggcgaaaaaaacccgccggtgttcgtctacgacacctccggcccgtataccgaccctgaggtccgcatcgacctgcgcaagggcctgcctgacgtgcgttcgcgctggatcgacgagcgcggcgacaccgagatcctccccggcctgacctccgagttcggccaggcccgcctggccgacgccagcctcgacgccctgcgcttcgcccacgtgcgcacgccgcgccgggccaagccgggcgccaacgtctcgcagatgcactacgcgaagaaaggcatcatcaccccggagatggaatacattgccatccgcgagaacatgaagctgcaggaagcccgggccgccggcctgctcgaccagcagcacccggggcacagcttcggtgccaacatcccgaaggaaatcacccccgagttcgtccgcgaggaagtcgcccgcggccgcgcgatcattccggcgaacatcaaccacaccgagcttgagccgatgattatcggccgcaacttcctggtgaagatcaacggcaacatcggcaacagcgcgctgggctcctcgatcgaggaagaagtggagaagctcacctggggcatccgctggggcgccgacacggtgatggacctgtccaccggcaagcacatccatgaaacccgcgagtggatcctgcgcaacagcccggtaccgatcggcaccgtaccgatctaccaggcgctggagaaggtcaacggcgtcgccgaggacctgacctgggaaatcttccgcgacaccctgatcgaacaggccgagcagggcgtcgactacttcaccattcacgccggcgtgctgctgcgctatgtgccgctgaccgccaagcgggtcaccggcatcgtttcccgcggcggctcgatcatggccaagtggtgcctggcgcaccaccaggagaacttcctctacacgcatttcgaagagatctgcgaaatcatgaaggcctacgacgtcagcttctcgctgggcgatggcctgcgtccgggctcggtggccgacgccaacgacgccgcccagttcggcgagctggaaaccctcggcgagctgaccaagatcgcctggaagcacgatgtgcaggtgatgatcgaaggtcccggccacgtgccgatgcaattgatcaaggaaaacatggacaagcagctggagtgctgtgacgaggcgccgttctacaccctcggcccgctgaccaccgacatcgcccccggctacgaccacatcacctccggcatcggcgcggcgatgatcggctggttcggctgcgccatgctctgttacgtcacgcccaaggagcacctgggtctgccgaacaaggatgatgtgaagaccgggatcatcacctacaagatcgccgcccatgccgccgacctcgccaagggccacccgggcgcgcagatccgcgacaacgcgctatccaaggcgcgcttcgagttccgttgggaggaccagttcaaccttggcctggacccggacaccgcgcgggcgttccatgacgagaccctgccgaaggactcggccaaggtcgcgcacttctgctccatgtgcggaccgaagttctgctcgatgaagatcacccaggaagtccgcgactacgccaaggagaacggcctgtccgacgagagcaaggccatcgaggccggcttccaggagcaggcggcgcgcttcaaggacgaaggatcggtgatctacaggcaggtctag

SEQ ID NO: 318116 - DNA, 747 bp, Pseudomonas aeruginosa
atgcgccttctgaaattcgccgccctcggcagcctggtcgttctgctgagcgcctgccagagcctcttcaagcccggcctcgacgacccgctgcccaccgagcgcctcgccagcgagcacctgaagcccggctgtcagggcgaacagtgtcccttggtaaacatcgacaccttgaagttccccgacgaaccgcagttggacccgatcgtcgagcgcgccctgctggaaatgacccgggaaaacaacgaaacgcccctgccggcatcgctggcggcctacgagcggcagttcctggacagcgccgagccgggctggagcagctacctgcaagccaaggtgcgcgaacaacatgacggtctggtgatcatcgagctttccagctacctgttcaccggcggcgcccacggcatgcccggtcgcggcttcatcaactacgaccgcaggcagcacaaggtgctgagcctgcaggacatgctggttcccggccaggaagaagccttctggaaacaggccgagctggcgcacaaggcctggctgctggccaacaagctcgaccaggacgccgatttccagaagacctggccgttccagcgcaccccgcacgtggcattgaccttcggcgcggtgacgctgaagtacgacgcctactccatcgcgccgtattcctatgcccaccccgaactgaagatcccgtatccgcgcctgaacggcatcgtcaagccgaacctgttccccggccgaggctga

SEQ ID NO: 318117 - DNA, 618 bp, Pseudomonas aeruginosa
atgtccgaaaccttcaaacccgcccccggtgacgtcgagctcgtgcagcgcgaggaatgcttccgcggcttctatcgtctcgatcgcctgcgcctgcggcatcgccagttcgacggcagcatgggccgggaaatcagtcgggaactgttcgtccgccatgacgcggtctgcgtgctgccctacgacccgcagcgcgattgcgtggtgctcatcgagcaattccgcgtcggggcgatgcagaagctcgccaacccctggctgctggagctggtcgccggcctgatcgacaaggacgagcaaccggaggaagtggcccatcgcgaggcgatggaggaggccgggctgactctcggtgcgctctggccgataacccagtacctgccgtcgccgggcggcaccgacgaagtggtgcacctgttcgtcggccgttgcgacagcgaaggcgtcggcggcgtgcatggcttgccggaggagggcgaggacatccgcgtccacgtctggccgttggaagatgcgctgcaggccgtgcgcgacgggcggatcaacaacgcggcgagcatcatcgccctgcagtggctggccctgaaccgggccgaggtgcgtgggctatgggcctga

SEQ ID NO: 318118 - DNA, 459 bp, Pseudomonas aeruginosa
atgggcctgaacctgctgcgcgagcgctaccgggtcgacctggccagcctgcaggcgacctgcgaagcgaactacgcgcggctcatgcgcctgctcccggacatgcgcgaggcgcaggcctcgcgccgggtcgcgctgagcgaaggggagcggctgctcggcgtacttgcgctggaagtgaccgaggcctgcccctacaccaccaccctgcaggtgcgccaggaactgggcctgccctggttgccggcgccgcggctggaagtgcgggtctaccacgatgcgcggatggccgaggtgatcggcgccgaacaggcgcggcggctgatggcgatctatccctacccgaaccaggcgatgcaccagcccgacgagaagaaccagctcaacctgttcctcggcgagtggctcgcccattgcctggcctgcggccacgaaatggagccggtggcccagcgctga

SEQ ID NO: 318119 - DNA, 819 bp, Pseudomonas aeruginosa
ttgtcacgccattcgaacactcccgccaccgacgcctccgtactgctggtgcagctctcggacagccacctgttcgccgaggatggcgcgcgcctgcttggcatggataccgcccatagcctggagaaggtggtcgagcgggtcgcccgggagcagccgcggatcgacctgattctcgccaccggcgacgtctcccaggacggcagcctcgattcctacacacgcttccgcaggttgagcgcccccctggacgcgccgttgcgctggttcgccggtaaccacgacgaacgcgagccgatgcaaagggcgaccgagggcagcgacctgctggagcaggtcgtcgacgtcggcaactggcgcgtggtgttgctcgactcgagcattcccggcgcggtgccgggctatctcgaggaggatcagctggagctgctgcggcgcgccatcgacagcgccggcgaacgcttcctgctggtttccttccatcaccacccggtgccgatcggcagcgactggatggatcctatcggcctgcgcaacccgcaggcgctgttcgacctgctggcgccctatccgcaggtacgctgcctgctgtgggggcacattcaccaggagttcgaccgccagcgcggcccgctgcgcctgctggcttcgccgtccacctgcgtacagttcgcccccggcagcagcgacttcaccctcgaccgcctggcgccgggctaccgctggttgcgcctgcacgacgacgggcgcctggaaacggggatctcgcgggtcgacgacgtcgtcttcgaagtggactacgacaccgccggatactga

SEQ ID NO: 318120 - DNA, 687 bp, Pseudomonas aeruginosa
atgaagcctggaagctggtaccgttcggctttccctaccgagttgaagcccattagcccgttcccgatgaccgcgaccagcccatccctgctgtatatccacggcttcaacagttcgcccgaatcgcacaaggcgcgtcagctgcaggcggccttcggccacttgggcctggccgaaggcctgcgcgtcccggccctgcaccatcacccacggcaggctatcgcccagttggagcgggccattgccgagctcgggcgaccggtgctggtcggcagctccctgggtggctactatgcgacccatttggcggagcgccatggcctggcggcgatcctggtcaatccggcggtcgccccgcatcgctccttcgacggctacctgggcgcgcagaccaaccactacagcggcgagacctgggaactcaccgaggaccacgtggcggcgttggccgaactggaagtcacgcacctgcaacgtcccgaacgctaccaggtatggctgcagaccgccgacgaaaccctcgattatcgcgtcgcgcaggccttctaccgagcctgcgcgctacgtatccaggccggcggcgaccacggtttccagggcttcgcccggcacctgccggcgctgctggcgttcgccggctacccgtcggcgctgtggcgcgacaccgacttttcgacttttgactga

SEQ ID NO: 318121 - DNA, 1890 bp, Pseudomonas aeruginosa
atggctacttacaacgcagacgccatcgaagtcctttccggcctcgacccggtgcgcaagcgcccggggatgtacaccgacaccacccgccccaaccacctggcccaggaagtcatcgacaacagcgtcgacgaagccctggccggccacgcgaagagcgtgcaggtgatcctgcaccaggacaactcgctggaagtcatagacgatggccgcggcatgccggtggacatccacccggaagagggcgtgccgggcgtcgagctgatccttaccaagctgcatgccggcggcaagttctcgaacaagaactaccagttctccggcggcttgcacggggtcggcatctcggtggtgaacgcgctctcgacccgggtcgaggtacgcgtcaagcgtgacgccaacgagtaccggatgaccttcgccgacggcttcaaggacagcgatctggaagtcatcggcacggtcggcaagcgcaataccggtaccagcgtgcatttctggccggatccgaagtatttcgattcggcgaagttctcggtcagccgcctcaagcatgtgctcaaggccaaggcggtgctgtgcccgggcctgagcgtggtgttcgaggacaagaacaccggcgagcgcgtcgagtggcacttcgaggacggcctgcgctcctacctgaccgacgcggtcgccgagctgccgcgcctgcccgatgaacccttctgcggcaacctcgaaggttccaaggaagcggtgagctgggccctgctgtggctgcccgagggcggtgagtcggtgcaggaaagctacgtcaacctgattcccacggcccagggcggcacccatgtgaacggcctgcgccagggcctgctcgacgccatgcgcgagttctgcgagttccgcaacctgttgccgcgcggcgtcaagctggcgcccgaggacgtctgggagcggatcgccttcgtcctctcgatgaagatgcaggagccgcagttctccgggcagaccaaggagcgcctgtcgtcccgcgaggcggcggcgttcgtctcgggcgtggtgaaggacgccttcagcctgtggctcaacgagcacgccgaaatcggcctgcaactggcggaactggcgatcagcaacgccgggcgtcgcctcaaggcgggcaagaaggtcgagcgcaagaagatcacccaggggccggcgctgcccggcaaactggccgactgcgccggacaggaaccgatgcgcgcggaactgttcctggtcgagggcgactccgccggcggctcggcgaagcaggcgcgggacaaggaattccaggcgatcatgccgctgcgcggaaagatcctgaacacctgggaagtggacggcggcgaggtgctcgccagccaggaggtccacgacatcgcggtagccatcggcgtcgatccgggcgccagcgacctggcccagctgcgctacggcaagatctgtatcctcgcggatgccgactccgacggcctgcacatcgccacgctgctctgcgcgctgttcgtccgtcatttccgcccgctggtggaagccggccacgtctacgtggcgatgccgccgctgtaccgcatcgacctcggcaaggaaatctactacgccctcgacgaagccgagcgcgacggcatcctcgagcgcctggccgccgagaagaagcgcggcaagccgcaggtcacccgcttcaagggccttggcgaaatgaatccgctgcaactgcgcgagaccaccatggatccgaatacccgacggctggtccagctcaccctggaggacgccaccggtaccctggagatcatggacatgctgctggccaagaagcgcgccggtgaccgcaagtcctggctggaaagcaagggcaacctggccgaggtgctggtctga

SEQ ID NO: 318122 - DNA, 1014 bp, Pseudomonas aeruginosa
atgcgccgcctgctggccatcctcggcctgttcgggggcctggtccaggcggccgaggcgccgccagagccaccggttccggcagccttgagcttcatctccgaacatgcggtggagggcatgcgcggcggcaacctctccgggctggcctggtgtggcggcgcgctgtggacggtttccgaccgcgacgacgaccgcctgtatcgcctgcaaccctcggccgaaggctccgaccagccctggcaggccgaggccgagagtttcatcgctccgaccccgccggacagcgggttgccctggggcatgagcacgcgggtctggctcagtggcctggtgcgcggcggcaacctcgacttcgaaggcatcgcctgcgatgccgccggcaatcgctacctggtcagcgaggcgcacgcggcggtcctgcaactgccggtgagcggcgcgccgaactggctgcgcctgccgcccggcctgctgccgcaagcgcgggccagcggcatgctgatgaatttcaacgcgctgttcgaagggatcgccgtcgaccccgagggcaagcgcctctggctggctgccgagcgcgagcgccgcggcctgctggtgtcccaccgcgacaacagtgcctggcgctgcgagggcagctgcgtactgctcgccgagggcggcaagatcgagccgccgccggaactgggcagcgcgcgcaagctgccgaaggatttctccgacctcgccttctaccgcggcaagctgttcaccctggagcgcctggcgcatcagatctgtcgccgcgacctggcccaggccaaggtcgagcgctgctggtcgttcgcctcggcggtcctggcgccggagcgtcgctacgagctgccttatggcgtcgcggaagccctgtcgctggacgacaagggcgcctggctgggcatcgacaatggcgaccatgcgcgcgccgatggcgacgtgcggcccttcgtcctgcgcttcgccgcgcccgccggcggctggttgggggacaagtga

SEQ ID NO: 318123 - DNA, 486 bp, Pseudomonas aeruginosa
atgctggtgctggcctggatcgccgggctggcgctggcgacgcgctatttcggcgtctgggaagatcgacagcgcaacccgaaccaggcgccgcaatcgatccatggcgacggctacgtcgagttgcgcctggccagcagccgccagggccattacctgctgaacgggcagatcaacggccagggcgtgaccttcctgctcgataccggggcgacccaggtggcggtgccggaagccctggcggcaagactcgcgctggagcgcggcgcgccgatcaccctgagcacggccaacggccgcgccacgggctggcgcacgcggctggaccagctgcaactcggcgatatccgcctgtccggggtcgcggcgctgattgcgccgggcatggacggcgatgaggtgctactcggcatgagcgccctgaaacaactcgaattcacccagcgcgacggcaccctggtgctgcgccaaaacacttctccgtga

SEQ ID NO: 318124 - DNA, 2265 bp, Pseudomonas aeruginosa
atgagcgaatccctcgatctgagcctggaaggggtcgaacgccggtcgttggccgagttcaccgagcaggcctatctgaactattccatgtacgtgatcatggaccgcgccctgccgcatatcggcgacggcctgaaaccggtgcagcgacgcatcgtctacgccatgagcgaactggggctggatgccgattccaagcacaagaagtcggcgcgcaccgtcggcgacgtgctcggcaagttccacccgcacggcgactcggcctgctacgaggccatggtgctgatggcgcagccgttctcctatcgctatccgctggtggacggccagggcaactggggggcgccggacgatcccaagtccttcgccgccatgcgttataccgaggcgcgcctgtcgcgctattccgaggtgctgctcagcgaactgggccagggtaccgtggactgggtaccgaacttcgacggcaccctcgacgagccggccgtgctgccggcccgcctgcccaacctgctgctcaacggcaccaccggcatcgcggtgggcatggccaccgacgtgccgccgcacaacctgcgggaagtcgcgtcggcctgcgtgcgcctgctcgaccagccgggcgcgacggtcgccgaattgtgcgaacacgtgccgggcccggacttccccaccgaagccgagatcatcaccccgcgcgccgacctgcagaaggtctacgagaccggccgcggttcggtgcgcatgcgcgcggtgtaccgcgtcgaggacggcgacatcgtcatccacgccctgccgcaccaggtgtccggttccaaggtgctggaacagatcgccgggcagatgcaggccaagaagctgccgatggtggccgacctgcgcgacgagtcggaccacgagaacccgacccgcatcgtcatcatcccgcgttcgaaccgggtcgatgtcgaagagctgatgacccatctgttcgccaccaccgacctggagaccagctaccgggtcaacctgaacatcatcggcctcgacggcaagccgcaggtcaaggacctgcgccagttgctctcggagtggttgcagttccgcatcggcaccgtgcgtcgacgcctgcagttccgcctggacaaggtcgagcgccgcctgcatctgctggatggcttgctgatcgccttcctcaacctcgacgaggtgatccacatcatccgcaccgaggaccagcccaaggcggtgctgatggagcgcttcgaactcagcgaggtgcaggccgactacatcctcgacacccgcctgcgccagttggcgcgcctggaagagatgaagatccgcggcgagcaggaagagttgctgaaggagcagaagcgcctgcagaccctgctcggcagcgaggccaagctgaagaagctggtgcgcgaggagctgatcaaggatgccgagacctacggcgacgaccgccgttcgccgatcgtcgcccgcgccgaggcccgcgcgctgtcggaaaccgagctgatgcccaccgaaccggtgaccgtggtgctctcggaaaaaggctgggtgcggtgcgccaagggccacgacatcgacgccgccggcctttcctacaaggccggcgacggcttcaaggccgccgcgccgggacgctcgaaccagtatgcggtgttcatcgactccaccgggcgcagctactcgctgccggcccacagcctgccgtccgcgcggggccagggcgagccgctcagcggccggctgacgccgccgccgggggccagcttcgaatgcgtgctgctgccggacgacgatgcgctgttcgtgatcgcttccgacgccggctatggtttcgtggtcaagggcgaggacctgcaggccaagaacaaggccggcaaggccctgctcagcctgcccaacggctccgccgtggtggcgccgcgcccggtgcgcgatgtggagcaggattggctggcggccgtgacgaccgagggccgtctgctattgttcaaggtctccgacctgccgcagctcggcaagggcaagggcaacaagatcatcggcatccccggcgaacgcgtggccagccgcgaggaatacctcaccgacctggctgttctgccagccggggcaacgttggtcctgcaggccggaaagcgtaccctgtcgctcaagggcgacgacctggaacactacaagggggagcggggccggcgaggcaacaagctgccgcgcggtttccagcgcgtcgacagcctgctggtggatattccgccacaggattga

SEQ ID NO: 318125 - DNA, 711 bp, Pseudomonas aeruginosa
atgagcgcgtggcgcgtcttcgcatgtctttccctcgtcagcctgctcgggctgacgggttgtgcggtccatccgccggcccagctctaccagttggacgtcggtgccgctgcggtaccgaaaaaggacggcggtgcggccgtcctgctcgggccggtacaactggccgactatctcaagcgcgatgtgatggtgcagcggcaggccgatggtattctcagtctgtccaccgaagcgcgctgggccggcaacctggagaccaatgtcagccagcaactgctgcggcagatgtccagcgagctgggcagcagccgcctggcgctgttcccggaaaaacccggtttcaccccccaggtccaggtgatgctgaccatcagtcgcctcgactccggccccaagcagccggcagtgatcgaggcgcgctggcgcctgttggaccagaagggcgacctgaaggacagccgggtgttccacgaggaagaacagcatcagggcagcatcggcgaccagatccgtgcccagagcgacctgctcaagcgcctggcggcgcagttggccaaggacgtcaagccgatcgccgtggcggccgaggcgccgccgccggcgaccgcgcgcaagccggtggccaagccgaaggtcaaggaagaggaaggtccgaaaatgccactggtggtgccgattcgcaccgacgccgaggtctatcggttctga

SEQ ID NO: 318126 - DNA, 537 bp, Pseudomonas aeruginosa
gtgaccaccctgatcacccacccgctgccggtcctggcggtgggactggcccttggcagccgggtgatcccgccacgcctgctgctggcaggcatgctcgccgcctgcctgccggacttcgacgtagtcgccttcaagctcggcatcgcctatcacgatgccttcggccatcgcggcttcagccattcgctattgttcgccgcgatcctcggcgcgctcgccgccctcgcctgccggccgctgcatagcggaccgctgaaagccgggctgtgggtggcgctggccaccgcctcgcacagcctgctggacgcgatgaccaatggcgggctgggcgtcgcctggttctggccctggagcgacgcccgctacttcatgccgttccatccgatcgccgtgtcgccgatcggtctgtcgcgcttcctcagcgaacgcggattgctggtgctgcaatcggaggcgcgctgggtctggctgccctgcctgctgctggcgctcgccggcatggccctgcgcttcctgttgcgccgctcacgctga

SEQ ID NO: 318127 - DNA, 1539 bp, Pseudomonas aeruginosa
gtgacccggcccacgtccgtcaagcccgacaatttcttcctcctgctgtttcgtgccttgcgccagcgccgcgtcccgatcgccctgcggctcgccagccatagcctgatcctggtggccctggccctgctgatctacgcctgggtcatgggcatgcagtttcgccaggccatgcaacagcaggccgatgccctgggccagagcctgatcacccagaccgccgcgtccgccaccgagttgctggtgtccaacgacatcctcagcctcaacgtgctgctgaacaacctggtgaagaacccgctggtggcccatgcggcgatctacagcgtcgaccagcgcatcctcgccgaggccggcagccgtccgaagcagagcctgctcggcgccaccgaaggcctgtactcgacgccgatcaccttccaggaagtgatcgccgggcacctgcgcatcagcctggacatgcagcagttccagcagccgatgatgatcagcctgcagagcatgggcctgatcagcctgatcctgctgatcctcgccctgtatttcagcctgcgcctggggcggcagatttccacacccttgttgcaattgcgtgtctggttgcgcgatccggacaatccggcccccggcgccgaactgcagaacgagctgggcgacctggcacgcgacctggaagagcgcctggtgccggagaagccgccggcgccggagccggaagaagcaccgctgccgcagaacttcgacgacatcctgctggaagacgacgaagccgacctgcgcagccgcaaggtcgaggcctcggccttcgaggaagacgacattccgctgggcgacgccctgctggacgagaccaagccggtggaattcacctccatcgacgaagacccgctggaccaggacgccttcgacgagaacggagccgaagccggggaacagcccgcagcgcccgccgctgcgcgcgaaccgcaacacagtgcggtgctggcgatccagctcggcgcccaggaacagttgcgccggttgccgcgcagccgcctggtggatctcctgcaacgctatcgcgactgcctggaacaggccgcccgccagtacaagggcagcctgcacacgctcagcgacggcggcagcctgattctcttccacagccgcgacaaccgcgccgactacctgaccaacgcgctctgctgcggtgaactgatgcgtgcgctcggccatgccctgcagatcgaggtcgccgacagcggcatcaccttgcaactgcaactgggcctgagcctcggcgaagacctcagcgaacagacccaggccgacctgctgctcaacgaaaccgtgcagaacgccctcgccctcaaccagcacagccgcaacctgctgctggtcgaacgcagcatcgccgacgacgcggtggtccgcgagcgcgcccgtatccgcgccatcgccagtccggaaggagcctgctgcgtcgagcgtctgctggagccgtatccgtcgatgctcgagcgccaactggcgcgcatgcacgaccgcgcccgcccgtga

SEQ ID NO: 318128 - DNA, 1215 bp, Pseudomonas aeruginosa
ttgcgcgaaattgtcctgatcaacatcaccggggaagaccgccccggtctcaccgctgccatcaccggcgtactggcccagggcggggtgaacatcctcgacatcggccaggcggtgatccacgacaccctgtcgttcggcatcctggtggaaatcccggataccgaggccggttcctcggtcctcaaggacgtgctgttcaccgcctacaagctggaccagcaggtgcgcttcaccccggtctcggaagaggactaccggcaatgggtcgacggccagggcaaggcgcggcacatcgtgaccctgctcacccgccgggtgactgccgagcaactgcagagggtcagctcgatcaccgccaagtacgcgctgaacatcgaccacatcgaccgtctctccgggcgtatgccgctggacatgcccgccgaccagggcaagggctgcatcgagttctcggtacgcggcgaaccggccgatccggcggcgctgcgtgcggaattcctcagcgtcgcccaggaattgaacgtcgacatcgctttccagcaggacagcgtgttccgccgcaaccgccggctggcggtgttcgacatggattcgacgctgatcgaggcggaagtcatcgacgaactggccaaggccgccggcgtcggcgagaaggtcgccgcgatcaccgagcgggcgatgcgcggtgaactggacttccgcgccagcttcaaggagcgcctggcgctgctgcaggggctgtcggaagacgtgctggaggagatcggcgcctcgctgcgtctgaccgagggtgcggaaaccctgttcgccgaactcaagcgcctgggttacaagaccgccatcctgtccggcggcttcacctatttcgcccgtcaattgcaggcgaagctggggatcgactacgtgttcgccaacgagttgcagatcgtcgacggcaaggtcaccggggtggcggtcgagccgatcgtcgatgcccagcgcaaggccgacctgctgcgcgaactggcggcgaaggaaggcctgagcctggagcagaccatcgccgtcggcgacggcgccaacgacctgccgatgctcggcctggccggcctgggcgtggcgttccgcgccaagccgctggtcaagcagtcggccaagcaggcgatctcgaccctgggcctggacggcatcctctacctgctcggctaccgcgaccgcgaaggacgagcctga

SEQ ID NO: 318129 - DNA, 2076 bp, Pseudomonas aeruginosa
atggccatcgaaaagaaaaccatccgcctgctgattctggaagactcgcagaacgaagccgaacgcctggtcagtctgttccgcaatgccggccacgcgacccgcgtacatcgactgacctctcccgaggacctcgccgaaaccctccagcaaagctgggacctgctgatcgccgcgccgaccagcgagtgtctcgagcccggcgaggcgctcgccaccttgcgccgccagtcgcgcgacatcccgttcatccagctggtggccgacaacaactccgacgccatcaccgacgccttgatgctcggcgcccaggacgccctgccgcaaggcgaggacgagcgcctggtgctggtcgccaaccgcgagctggccggcctcgccgaacgccgcgcgcgccgcgccgccgaactcgccctgcgcgaggcggaaaaacgctgccagttgctgctcgacagctcggtcgacgccatcacctacgtccacgacggcatgcacatctacgccaaccgctcctacatggcgctgttcggctacgaggacgccgaggaactggaaggcctgccggtcatcgacctgatcgcctcctgcgaccagggcgccttcaaggatttcctcaagggctaccagaacgaccagcgccagaccgaactggtttgcaccggggtcaagctcgacggccaggaattcaaggcgcgcatcagcctctccgccgccacgtacgacggcgaaccctgcatccaggtggtgatccgcggcgaggtcgacaacgccgagctggaagaaaagctccgcgaagtcagcagccaggacccggtcaccggtctctacaaccgcagccacttcctcgacctgatggatgccgccgtgcagcaggcggtgaccgcccgcaagccgtcgaccctggcctatatccatctcaacggctacccctcgctccaggccgaccacgggctttccgggatcgacctgctgctcggccagttggccggactgatgcgtgaacagttcggcgaggaagccgacctggcgcgtttcggcgattcgatcttcgccgccctgttcaagggcaagactcccgagcaggcgcaagcggcgctgcaacgactgctgaagaaagtcgagaaccaccttttcgagctgaacggccgcagcgcccaggccaccctcagcatcggcgtcgccggtctcgacgagaagaccgccaaggcccaggacgtgatgaaccgtgcgcatcgctgcgccgatgacgcggcacgcaagggcgggtcgcagatcaagcagtacaacccggcggaagagcttgccgccgccgcccagcgcggcgacgtcatcgcgatcctccagcaggcgctggagaccaacagcttccgcctgctgttccagccagtcatcagcctgcgcggcgacagccacgagaactacgaggtgctcctgcgcctgctcaatccgcagggccaggaagtgccgccggcggagttcctgcatgccgccaaggaagccgggctggcggagaagatcgaccgctgggtgatcctcaattcgatcaagctgctcgccgagcatcgcgccaaggggcaccagaccaagctgttcgtccacctgtccagcgcgagcctgcaagaccccggcctgctgccctggctcggggtggcgctgaaggccgcgcgcctgccgccggagtcgctggtgttccagatcagcgaagccgacgccaccagctatctgaagcaggccaagcaactgacccagggcctggccaccctgcattgccaggcggcgatcagccagttcggctgctcgctgaacccgttcaacgcgctgaagcacctgaccgtgcaattcatcaagatcgatggttccttcgtccaggacctcaaccaggtggaaaaccaggagatcctcaagggcctgatcgccgaactgcacgaacagcagaagctcagcatcgtccccttcgtcgagagcgccagcgtcctcgccaccctgtggcaagccggcgccacctacatccagggctactacctgcaggggccgagccaggcgatggactacgacttctcctcgggagacgaatga

SEQ ID NO: 318130 - DNA, 1824 bp, Pseudomonas aeruginosa
atggaaaaccagagcccccacctctcgttgcgcgtccccactccgacgcagcagaacctgagcttctgcgacgccaccccgaaggacatcaagtactggctggcgcacctgcccaaggccaacctcggggaaaccgcgcgccagctctaccagggcctgatcgaactcaaccagttggtgctgcccgtcgaggcccgcctgcaactgctcgaactgttccgtccagaggtgcatttcgtctgcgcccacctggaacggcacttcctcaaccaggccatcgtcctcgacgaacggccgcgcaagatcgccaacctctgccaggccctgcagaaccacctggccatcggctacaagctgatcgtggtccaggaagcgccgcgcaacagccgcgaccgcgcgcagctgttcgcggtcggcatccagcgggcgatccgcagcctgtgcgggccgctgatccgcgccagccagttgtactgcccggtccccgaggggctttggctggaactccaccagctctaccagttggccagccagcgcggcgtgcatcgtctcgcggtgcgcgacgaactggccaagcacacccccggcctgagcgtcgagcaggcctacctgattccgctgctgctcggctgcgcgcgctgcaaccagatgcgccagaacaacattgcacggctcgccgaggtgctcgaaccctggagccagctgctgtcgatacagagcgcgacgctgcccggctcgctgttcatcgccgtgccgcagatcgacggcccgccgcgctaccgttcgctgtacccggagacccaactggccagtgccctgggcatcgacacccagccgctggtcgagctgatccgcgaatacctgctgcagcccgaggccgaacgcgcgaaagcacgcctgccgctgatcgaaggggtgaccctggacctgctgcaacatctctcctcggcctggggtgacatcgccgaacgtaccttccagcgcacccagggccagggccagttgaccctgtgcatcggcatgagcgccctgcactacttcctcgccgggcgccgcccgttcaacgaggtcctgcagatccaggaagcgcccgaggcgcctcgcttcaaggccgacgtccaggacgcctgggccggcgccttcgatgcacagaaggtcaccgactggcagcccggcatgccgctggaggaaatcgagtaccgcccgcaccagtcgccccgcagtgtgcaacccgggcacccgcaggcccacgcacaggctgacgccaccgaggactacccgacctacgccctgcccatcgtcaaccacagccccggcggctattgcctgagctggccgaaggaggtgcccgcccaactgcaggcgggcgaactggtcggcctgcaggaccttccaggccaggcgtggagcatcgcggtggtgcgctggatccgccaggtacgcaatggcggcacgcagatgggcatcgagatgatcgccccggcggcacagccctgcggcctgcaactgctgcgcaagaccgagcagagcagccactacctgcgcgccctgctgctgccggcgatcgccgcgatctcgcggccggcgacggtgatcaccccgcgcctgccgttccaggagggcagccgggtgcagatcaacctgcacggcgaggagcggcgcgcggtgctgaatcgccggcaggcctcgaccggcagcttcagccagttcgaataccgctcggcggaaccggtgaacaccccgagcgataagccggtcacagcgccagtggcccggccgcctgcgggggaggaagattttgactcgctctggaagtctctgtag

SEQ ID NO: 318131 - DNA, 870 bp, Pseudomonas aeruginosa
atgtcgttcaaagatcgtctgttcatctgcagccagtacctgctgccgcaccacctgctgtcccggctgatcggcttcgccgccgactgccgggcgacctggttcaaggaccgcctgatcgcctggttcgcccggcgctaccaggtcgacatgcgcgaagcgcaggtcgaggacctgcaggcctatgaacatttcaatgccttcttcacccgcgccctgaaggatggcgcccgcccgctggcccaggagcccggcgcggtgctctgcccggccgatggcgcgatcagccagctcggcccgatcgagcacggacggatattccaggccaaaggccacagctacagcctggccgaactgctcggcggcgacgccgaactggccgcgcccttcatgggcggcgacttcgccaccgtctacctgtccccccgggactaccaccgcgtgcacatgccgctggccggcaccctgcgcgagatggtctacgttcccggccggctgttctcggtgaaccagaccaccgcggaaaacgttcccgagctgttcgcccgcaacgagcgggtggtctgcctgttcgacaccgagcgcggtccgatggccgtggtgctggtaggcgcgatgatcgtagcctccatcgaaaccgtctgggccggcctggttacgccgccgaagcgcgaactgaagaccttccgctacgacgaagccgcccgtgcgccgatccgcctggaaaaaggcgccgagctcggtcgcttcaagctgggctccaccgccatcgtcctgttcggcccgcagcaggtcgcgttcaacgacggcctcggggcagcgagcccggtgcgcatgggcgaatgcctggcactgccgaaacagtcctga

SEQ ID NO: 318132 - DNA, 816 bp, Pseudomonas aeruginosa
atgtccgtcttctccgacctgccattggtgatcgagcccagcgacctcgcgccgcgcctgggcgcgcccgagctgatcctggtcgacctgaccagtgccgcccgctacgccgaagggcatatccccggcgcgcgtttcgtcgaccccaaacgcacccagtggggacaacccccggcacccggcctgctaccggcgaaggccgacctggaagccctgttcggcgagctgggccaccgcccggaggcgacctacgtggtctacgacgacgaaggcggcggctgggcgggccgcttcatctggctgctggacgtgatcggccaccaccactaccactatctcaacggcggcctgccggcctggatcgccgacgcccaggcgctcgaccgcgaggtcccggcgcctgtcggcggcccgctgccgctgacgttgcacgacgagcccagcgcgacccgcgaatacctgcaaagccgcctcggcgccgccgacctggcggtatgggatgcgcgcaaccccagcgaatacgccggtaccaaggtgctcgccgcgaaggccgggcatgtgcccggcgcgatcaatttcgaatggaccgccggcatggacccggctcgcgccctgcgcatccgcgcggatatcgccgaagtcctggaggacctcggcatcacgccggacaaggaagtgatcacccactgccagacccaccatcgctccggcttcacctacctggtggccaaggcgctgggctacccgcgggtcaaaggctacgccggctcctggtcggaatggggcaaccaccccgatacccctgtagaggtttga

SEQ ID NO: 318133 - DNA, 1512 bp, Pseudomonas aeruginosa
atgacagaccgcctcgccgcctggctcgaagagctcgaccggcaacccctgccgatccccgccagccactatgccggcctgcacgccgcgctgagcgacagccgccgctcgctgcgcgagatcgccgaccagttgcagggcagcccgacgctggcgttgtccatcctgcgcgaggccaatcgcgccgagagcgcccgcgacaaccccgcggaaagcctggaggtggccctcagccgcctcggcctggcgcgcgcgagccaacttctgaagaccctgccgagcatccaggatgcggagatgcccagggtcctcgggcagatgttgctgatcagccagcacgccatgcagcaggccagcggcctgttcggcgcgcgcctggccaggctctggcaggaaatccactggggcagcctgctgaccatggctccggtctgggcgctggccaacgcccgcccgcagctactggagcaatggcagcaacgcgtgctggtacagggcgaaccgaccctgcgagtggagcgcgaactgctcggcatgcgcctgctgccgatctgcctggcgctggccgaacgctggcggctaccgcagtgggtcatccagggctatcgcctgctcgcctgcgaccgtcgcctgctggttcgagccttgcgtatcgcccgcgaccatcagtcgcccctgctccagcaacagcaactcgatgcccagcccgatctcgcccgctggctgacccagccggccaactgcactctcctcgccaatggcctggccatcgccgcacaccagagctgggacgggccgcacatgctgcgctggcagcgcctgaccggcctgtacctgggccagccgctgaccgaagtccagcagcaggtgcacatgctcgccgcgcaaagcgcgcgcctgcacgcccggccgccgctgtggcatccggcggtggccttgatctggccctggcaggccagccgctggcgtgccgaagcggcgcccccgccgccgccctcggcggaagccctggccgagtggcggcagcattgcgccgagttgctccgcgagcccagcccgttcagcaacgtcgtgcagctcaccgcctgtgcccgcgatgcgctgcgcgcctgcggcttgcaaaggatgctgctgctggtggccgatcgcacccaggtacacgtgctggcgcagcagagcgccggactcgaaccgggccaggagaaattgcaactggagattgccggcagcccgctgctgaagaaactgttccagcagcctgccctgctgcgcatcggcccgaacaaccaggaccagttgctgccggccctcggcgaacccttgcgccaactgttccccggacctcacctgctgctgcgctcgctgggcaacggctcgcgggtggtgatgctggtcctggccgacctcggcggccagccgttcagcgacctgcatgcccaggccttcgccaagaccgcccagtgcaccgagcgcgcgatccagcagttcggccgccagcgccgcacggaatga

SEQ ID NO: 318134 - DNA, 852 bp, Pseudomonas aeruginosa
atgtcaaaaatcatcggcatcatcgtcgttttcgccagtgtcctcgggggcttcctgctctccggcggcaagatcggcgccatcatccagcccttcgaggtcctgatcatcggtggcgcggcactgggggcgttcctccagtccaacccgggcagcacgttcatggtggtgctgaagaaagcgccgaagatgttcagcaaccgctttacccagacctactacctcgaggtgctgggcatgctctacgagatcctcaacaagagccggcgcgaagggatgatggcgatcgaggcggacatcgaggaccccgcggccagtcccatcttcagcaagtaccccggcgtgctgaaggacgagcggatgaccgcctatgtctgtgactacctgcgcatcatgtcctccggcaacatggcgccgcacgagctggaaggcctgttcgacatggagctgtccagtctcaaggaggacctggagcatccgtcccacgcggtgaccaaggtcgccgacgccctgccgggcttcggtatcgtcgccgcggtactcggcatcgtcatcaccatggcgttgcttggcgaaggcagccaggcggagatcggccaccacgtcgccgccgccctggtgggtaccttcctcgggattctcgccgcctacggcttcgtcggcccgctggcgggcgccctggagcacgatgccaaggaagagttgaacatgttcgaggcgatcaaggcctgcctggtcgcttccgcttccggcatgccgccttcgctggccgtcgagttcggccgcaaggtgctgctgcccgcccatcggccgaccttcgccgagctcgagcaggccgtgcgtggccgctga

SEQ ID NO: 318135 - DNA, 1044 bp, Pseudomonas aeruginosa
atggacaataaccagccgatcatcgtcaagcgcgtcaagcgctatgccgccggccaccacggcggctcgtggaagatcgccttcgccgacttcgccacggcgatgatggcgttcttcctggtgctctggctgctgtcttcggccaccccggagcagaagaaggcgatttccggatacttccaggaccccatcggtttcagcgaaagcgccagcccctacgtcatcgacctcggcggcacgccgacgccggcgccggacaagaccctcaatccgcaggtccaggcccagccggactccaacgaaagccggatcagccccgagcaggaccaccaggtcaacgccgaccaggccgagaacctcgccgagcaggttgagcgagagcgcctggcgctgctgctgcaggagttgcagaacaaggtcgacgaaaatccgatgctcaaggacttcaaggaccagatccacttcgagatcacccgcgacggcctgcgcatccagatcgtcgacgccgccaaccggccgatgttcgacctcggcagcgcgcgcctgcagccgtatttcgaggacatcctgctggccatggccgagaccatccgccaggtgccgaacaagatcagcatcagcggccacaccgacgccaagccctatgccggcaacggcgacttcggcaactgggagctatcggccaatcgcgccaacgccgcgcgccgtgcgctggtcgccggcggctatccggaagggcagatcgcccaggttgtcggctatgcctcggcacgcctgttcgacgacaaggacccgctgaacccggtgaaccggcggatcgacatcgtggtcctgacccgcaaggcgcagaaggccatcgaaggcgagaccggcgctcccgaagccagcgcccctgcggctgccccgggcgagcagccgaagccggctgccgaggcaccggcggcgggcgcgcaaccttcgctaccggcggacgaggtgcagaagaagctcaacctgttcgacgacggcggcagcctgaagctggagcagatcaagggcgactga

SEQ ID NO: 318136 - DNA, 1020 bp, Pseudomonas aeruginosa
atggccaaacgccacttgacccgccggcagagctggcgtatcgaaaagatccaggaagaacgcgcggcccgggcggcccgtcgcgagtcgcgtgccgtggaagagctggagggcggcgacctgggaccggagcagaccggccaggtgatcgctcatttcggggttcaggtagaggtcgagtccgccgacggccaggtttcccgctgtcacctgcgcgccaacctgccggcactggtgactggcgaccaggtggtctggcgcgccggcaaccagggcatcggcgtgatcgtcgcgcaattgccgcgccgctccgagctgtgccgcccggacatgcgcgggctgctcaagccggtggcggccaacgtcgaccgcatcgtcatcgtcttcgccccgcgtcccgaaccgcacgccaacctgatcgaccgctacctgatcgccgccgaacatgccggcatccagccgctgctgctgctgaacaaggccgatctggtcgacgagagcaatgccgaaggcatcgatgcgctgctgaatgtctaccgcaccctgggttacccgctgatcgaggtgtcggccttcaatggcctggcgatggacgaactgcgcggcgcgctggacggtcacgtgagcgtcttcgtcgggcagtccggggtgggcaagtcgtcgctggtgaatgccttgttgccaggtgtcgacacacgtgtcggcgacctctccacggtgaccggcaagggcacccataccaccaccaccgcgcgactgttccattttcccggcggcggcgacctgatcgactcgcccggcatccgtgagttcggcctggggcacgtgtcgcgagacgatgtcgaggccggtttcatcgagttccgcgacctgctcgggcattgccgcttccgcgactgcaagcacgaccgtgaaccaggttgcgccctgctccaggccctggaggacgggcgcatcatgccgcaacgcatggccagctaccggcacattctggcaagcatgccggaaacggactactga

SEQ ID NO: 318137 - DNA, 543 bp, Pseudomonas aeruginosa
atgcagaacccgcagaaccttatctggatcgacctggagatgaccggcctcgatccggaccgggacgtcatcatcgagatggccaccatcgtcaccgacagtgacctcaacaccctggccgaaggaccggtgatcgccatccaccagccagaggaaatcctcgccggcatggacgagtggaatacccgccagcacggccagtccggcctgacccaaagggttcgggaaagtaccgtgagcatggccgaggccgaggcgcagaccctggccttcctcgagcagtgggtgcccaagcgcagctcgccgatctgcggcaacagcatctgccaggaccgccgcttcctctataggcacatgcccaggctggaaggctacttccactaccgcaacctcgacgtctccaccctcaaggagctggccgcgcgctgggcgccgcaggtccgcgagagcttcaagaagggcaacacccacctggcgctggacgatatccgcgagtcgatcgccgagctgcgccactaccgcgaccacttcatcaagctctga

SEQ ID NO: 318138 - DNA, 1086 bp, Pseudomonas aeruginosa
atgactccccagcctctggccgacaacctttccccgccggaccccgcccgcctcgcccagtccatcaaggactggggccgcgagctggggttccagcaggtcggtatcagcgacgtcgagctgggcgagcacgaagcgcacctgcagcgctggctggaggccggctaccacggcgagatggactacatggcggcgcacggcagcaagcgctcgcgacctgccgagctggttcccggcacgctgcgggtgatctccctgcgcatggattacctgcccggcgacacgcgcatggcgcaggtcctcgcgacgccggaaaaagcctacgtctcgcgctacgccctcggccgcgactaccacaagctgatccgcaagcgtctgcaacaactggccgagcgcatccaggccgaagtcggcccgttcggtttccgcgccttcgtcgacagcgcgccggtgctggaaaaggccatcgccgaacaggccggcctcggctggatcggcaagaacacgctggtgctcaaccgcaaggccggcagctacttcttcctcggcgagctgttcgtcgacatgccgctacccgtcgacccggcgatggacagcgagcattgcggacgctgctcggcctgcctggacatctgcccgaccgcggccttcgtcggcccctaccggctggacgcgcgacgctgcatctcctacctgaccatcgagtacaagggcgcgattccgctggagctgcgaccactgatcggcaaccgggtattcggctgcgacgactgccagatcgtctgcccatggaatcgcttcgcccgccccaccgggcagggcgacttccagccgcgccacagcctggacaacgccgaactcgccgaactgttcctctggagcgaggaggagttcctcggccgcaccgagggttcgccgctgcgccgcgccggctacgagcgctggttgcgcaacctggcggtggggctgggcaacgcgccctcgaccatcccggtgctggaggcgctgaaggcgcgccgcgggttcccttcggagctggtccgcgagcacgtggaatgggccctgcggcgccacggggaaacctag

SEQ ID NO: 318139 - DNA, 1509 bp, Pseudomonas aeruginosa
atgaccatgaccttccagcacgacgacctgccactcgccctctattccgccgcccaggtgcgcgacctcgatgcgcgcctgatcgccgccggcacgccgggcttcgaactcatgcagcgcgccgcccacgccgcctggcgtgccttgcgccgccgttggccggaggccgcggcgctgacggtgctcgccgggcacggcaacaatgccggcgacggctacctgatcgcggcgctggcgcaacgtgcgggttggcgagtgcgggtgctggcggtcgcggcgccgcagcggcttgccggcgacgcggcgcaggcgcatgccgccgcgctggcgaccggggtcgtggtggagccctggagcgagtgcgccgtgctcgagggcgtagtagtggatgcattgctcggcaccggcctggcaggtgccgtgcgcgagccctttgcgcaggccatccgcctggccaacgccgccgacctgccggtgctggcggtggatattccttccggcttgagcgccgacaccggtgcggtattgggggaagcgatcagggcggatctgacagtgactttcatcggcctgaagatcgggttgttcactggcgaggcgccggcacgggtcggcgagctggtgttcgacgaactcggcagcgacgccgtcgtgttgcaagggctccagccccgggcccaccgtttggcacgaaatgccctgccgagtctggcagcgcggccgcggaccgcgcacaaggggctgttcggccacctgctggtggtcggcggcgacaccggcatgggcggggcagtgctactggccgcggaaagcgccctgcgctgcggcgccgggctggtctcggtggcgacccgcgtcgaatatgtgccggcgttgctgagccgttgtcccgaggtcatggcccatggcgtggcgtcggcgaaccaactgctggcccttgccgaacgcgccagcgtgctggtgctcggtcccggtcttggccagcgcgcctgggggcgtagcctgctgagcgctgtccggtcgcgaccgttgccgcaggtctgggatgccgacgcgttgaacctgctggccctggaaccggtcggagcagggccgcggacatggattctgacgccgcatcccggcgaggccgcgcgcctgttgggtcgctcgaccaccgaggtgcaggcggaccgcccggcggcggcgctggaactggcgcgtcgctaccaggcggtggtggtgctgaagggcgccggcagcctggtcgccgcgcccgacggacgacttgccgtctgttcccaggggcatccggcgatggctggtgccggcctgggtgacgtgctgtcgggcatcaccggtgccttgctggcccagcgcgtggaggcgttcgaggcggcctgcctggcggtctggctgcatgccgccgccggtgagcggctcggcgcccaggggcgtgggctggcggcgaccgatctcatacctaccgttcgtcagttgctcgaggagtgcagtccgtgtctgaagtga

SEQ ID NO: 318140 - DNA, 468 bp, Pseudomonas aeruginosa
gtgtctgaagtgatcctgtccgccgaaggggaagacgcgatgctcgaactgggcgggcgcatcgcccgggccagcggggggcagggggtgatctacctgcatggcgacctcggcgccggcaagaccaccctctcgcgcggcatcctgcgcggcctcggccatgccggctcggtgaaaagcccgacctttaccctggtcgagccttacgaaatcggcgagctgcgcgcctaccatttcgacctgtaccggctcgccgatgcggaggaattggagttcttcggcatccgcgactatttcgacggcagcgcactctgtctgatcgagtggcccgagcgcggtgcgggcgttttgccaaccgccgatctggacattaccattactgcccaagcgggtggacggacactgcgcctggtaccgcacggtgcgcggggcgaagcctggtgtgccaccctgaccatgggagcatga

SEQ ID NO: 318141 - DNA, 1428 bp, Pseudomonas aeruginosa
atgggttggggcttgcgtctgcggacgttgttgactggggtgatgattctgctggcctgccaggtcggcgaggttctggccgccgcgcaaatcaagagcgtgcggatctggcgcgctccggacaacacccgtctggtcttcgatctctccggtccggtgcagcacagcctgttcaccctggccgcacccaaccgtatcgtcatcgacgtcagcggcgcccagctggcgacccagctcaacggtctcaagctcggcaacaccccgatcaccgcggtgcgctccgcccagcgcacgcccaacgacctgcgcatggtcctcgacctgtcggcgcaggtcaccccgaaaagcttcgtcctgccgcccaaccagcaatacggcaaccgcctggtggtcgatctctacgaccagggcgccgacctgaccccggacgtacccgcgacgccgaccccgagcgtgccggtcactccggtgacgccgacccagccggtggccaagctgccgctgccgaccaagggcggtacccgcgatatcgtcatcgccatcgacgccggccacggcggtgaagaccctggcgcccttggcccgggcgggttgcacgagaagaacatcaccctgtcgatcgctcgcgagctgcaacgccagatcaaccaggtgcgcggttaccgggccgagctgacccgtaccggcgactatttcatcccgctgcgcaagcgcaccgagatcgcccgcaagaagggcgctgacctgttcgtctcgatccatgccgacgccgcgccgagccgcagcgccttcggtgcctcggtgttcgccctgtccgaccgcggcgccacttcggaaaccgcgcgctggctggccgacagcgagaaccgttccgacctgatcggcggcgatggcagcgtcagcctcggcgacaaggaccagatgctcgccggcgtgctgctcgacctgtcgatgaccgccaccctctcgtcgagcctggatgtcggccacaaggtactgaccaatgtcggccgcatcacttcgctgcacaagcgtcgtgtcgagcaggccgggttcatggtgctgaagtcgcccgacatcccgtcgatcctggtggaaaccggcttcatctcgaacgtcaacgagtcgcgcaagctggccagcgccagccatcagcaggccttggcgcgttcgatcaccagcggcatccgccagtatttccagcagagcccgccgcccggtacctacatcgcctctttgcgcgcccagggcaagctctccatggggccgcgcgagcacgtggtgcggcccggagagaccctggcgatgatcgcccagcgctatgaagtgagcatggccgcgctgcgtagcagcaacagcctgtccagcgacaacctgaaagtcggccaggccctgtccatcccgagcaccgccctggcggcccagtga

SEQ ID NO: 318142 - DNA, 1710 bp, Pseudomonas aeruginosa
atgagtgaagcaccgcgtatccagctgctgagtccgcggctggcgaaccagatcgccgccggtgaggtggtcgagcgtcccgcctcggtggccaaggaactcctggaaaacagccttgacgccggttcccggcgcattgatgtggaggtcgagcagggcggcatcaagttgctgcgagtgcgcgacgacggtcgcggcatccccgccgacgacctgccgctggccctggctcgccacgccaccagcaagatccgcgagctggaagacctggagcgggtgatgagcctcggcttccgtggcgaggcgctggcctcgatcagctcggtagcgcgcctgaccatgacctcgcgtaccgccgacgccggcgaagcctggcaggtggaaaccgagggccgcgacatgcagccgcgggtacagccggcggcgcacccggtggggaccagcgtcgaggttcgcgacctgttcttcaacaccccggcgcggcgcaagttcctgcgtgccgagaagaccgagttcgaccatctgcaggaggtcatcaagcgcctggcgctggcccgcttcgacgtggctttccacctgcgccacaacggcaagaccatcttcgccctgcacgaggcgcgagacgagctggcccgcgcgcgccgggtcggcgcggtgtgcggccaggcattcctcgagcaggcgctgccgatcgaggtcgagcgcaacggcctgcacctgtggggctgggtcggcttgccgaccttctcccgtagccagccggacctgcagtacttctatgtgaacgggcgcatggtgcgcgacaagctggtcgcccacgcggtgcgccaggcttatcgcgacgtgctgtacaacggccggcatccgaccttcgtgctgttcttcgaagtcgatccggcggtggtggacgtcaacgtgcacccgaccaagcacgaagttcgcttccgtgacagccggatggtccatgacttcctctatggcaccctgcatcgtgcgctgggcgaggtccgtcccgacgaccagctcgcgccgcccggggcgaccagcctgaccgagccacgtccgaccggcgctgccgccggcgagttcggcccgcagggcgagatgcgcctggccgagagcgtgctggagagtccggcggcacgggtgggctggagtggcggctcatcggcctccggcggctcctccggctattccgcctatacccggccggaggcgccgccctctctggccgaggccggtggcgcctacaaggcctacttcgcgccgttacccgcgggcgatgcgccagccgcgttgcccgagagcgcccaggacatcccgccgctgggttacgccctggcgcagctcaagggcatctacattctcgccgagaacgcccacggcctggtgctggtggacatgcacgcggcccacgagcggatcacctacgagcgcctcaaggtggcgatggccagcgaaggcttgcgtgggcagccgttgctggtgccggagtcgatcgcggtcagcgagcgcgaggcggattgcgcggaagagcattccagctggttccagcgcctgggcttcgagctgcagcgcctgggccggaaagcctggcgatccggcagatccctgcgctgctcaagcaggctgaggcgacccagttggtgcgcgatgtcatcgccgacctgctggaatacggcaccagcgaccgtatccaggcgcacctga

SEQ ID NO: 318143 - DNA, 174 bp, Pseudomonas aeruginosa
atggcctgccatggtgcggtgcgcgccaaccggcgcctgaccctgccggaaatgaacgccctgttgcgcgacatggaaatcaccgagcgcagcggccagtgcaaccatgggcgtccgacctggacccagttgggcctggacgagctggacaagctcttcctgcgcggacgctga

SEQ ID NO: 318144 - DNA, 972 bp, Pseudomonas aeruginosa
atgtcttccctgcctcccgccatctttctcatggggccgaccgccgccggcaagaccgacctggcgatggcgctggccgatgcgctgccctgcgagctgatcagcgtcgactcggcgctgatctaccgcggtatggatatcggtacggccaagccttcccgggagctgctggcgcgctatccgcaccgcctgatcgatatccgcgacccggcggagagctattcggccgcggaatttcgcgccgacgccctggcggcgatggccaaggccaccgcgcgcggcaggattcccctgctggtggggggcaccatgctctattacaaggcgttgctcgagggcctggccgacatgcccggcgccgatcccgaggtgcgcgcggcgatcgaggccgaggcccaggccgaaggttgggaggcgctgcaccggcaactcgccgaggtcgacccggaatcggctgcgcgtatccaccccaacgacccgcagcgactgatgcgggcgctcgaggtgtatcgcctcggcggggtgtcgatgagcgacctgcgtcgccggcaaagcgctgaaaaggcggattttgacgcgtcaggcaggaatcaattgccgtatactgtcgctcagctggcgattgctcccgagcagcgccaggtgttgcacgcgcggattgcgcagcgttttcgccagatgctggaacagggtttcatcgccgaggtcgaagcactgcatgccagaagtgacttgcatgcaggattaccgtctattagagccgtgggttaccgtcaggtgtgggattacctggatggcaagctgtcctacgctgaaatgaccgagcgcggcatcatcgctacccgccagttggccaagcgccagttcacctggctgcgaagctggagccatctacactggatggacagcctagcaggtgacaatctgccgcgtgccttgaaatacctgaaaacggtctccatattggcctga

SEQ ID NO: 318145 - DNA, 249 bp, Pseudomonas aeruginosa
atgtcaaaagggcattcgctacaagacccttacctcaataccctgcggaaagaacgcgtcccggtttccatctatctggtcaacggcatcaagctgcaaggccagatcgagtctttcgaccagtttgtcatcctgctgaagaacaccgtcagccagatggtttacaagcacgcgatctccaccgtggtaccgagccgtccggtgcgtctgccgagcggtgaccagccggccgagccgggcaacgcttga

SEQ ID NO: 318146 - DNA, 1260 bp, Pseudomonas aeruginosa
gtgcatctggaagggcagaaccccgaggcgcgtgaagacccgcaggagttccaggagctggtgcgttcggccggcgcggaaacggtggcattcgtcagcgtctcccgccaccagccgagcgccaaatatcttatcggcagtggcaaggtcgaggagttgcacgacctggtcaaggccgaaaacgtcgagctggtgattttcaaccacaccttgacgcccagccaggagcgcaacctcgagcgtgcgttcgagtgccgcgtactcgaccggaccgggctgatcctcgacatcttcgcccagcgcgcacgtacccacgaaggcaagttgcaggtggaactggcgcaactggagcacatgagcacgcggctggtacgcggctggacccacctcgaacggcagaaaggcggtatcggcctgcgcggtccgggtgagacccagctggaaaccgaccgacgcctgctgcgcgtgcgcatccgccagatcaagcagcgcctggagaaggtccgcagccagcgcgagcaggctcgacgcgggcgcaagcgcgcggatatcccggcggtctccctggtcggctataccaacgccggcaaatcgaccctgttcaatgcgctcaccgcctccgaggtgtatgccgccaaccagttgttcgccaccctcgaccccaccctgcgtcgcctgcaactggacgatctcgggccggtggtgctggccgacacggtgggcttcatccgtcacctgccgcacaagctggtggaggccttccgcgctacgctggaagagtcgagcaacgccgacctcctgctgcacgtgatcgacgcctacgagcccgaacgggatgcgcaggtcgagcaggtgctggcagtgctcggcgagatcggcgccaacgaattgccgatgctcgaggtctataacaaggtcgacctgctaccctcggtcgagccgcacatccagcgcgacgattccggcaagccggtgcgcgtctggctgtcggcgcagaccggcgaaggcctcgacctgttgcgccaggccgtcgccgagctgctcggcgaggacctgttcgtcgggaccttgcgcctgccccagcggctcgggcgcctgcgcgcccagttgttcgaactgggcgcggtgcagtccgaggcgcacgatgaggaaggttgtaccctgctgcaggtgcgcctgccgcgggccgagttgaaccgcctggcgagccgcgctggctggcagccggcggagttcgttgcgcaacacactttgcaataa

SEQ ID NO: 318147 - DNA, 1203 bp, Pseudomonas aeruginosa
atggcttggaacgagccgggtgacaactcgaacaacaacgatcgagacccgtggggaggccgccgcggtggtggtggcggcggtggtgaccgcaaggggccgcccgacctggatgaggctttccgcaagcttcaggacagcctgaacgggctgttcggtggaaaaaaacgcagtggcaacggttccggctccggttccggcggcaagggcggtggcctgggcctgttcggcatcggcctggcgatcctcgccgtgctctggctatacaacgccatctatgtggtggacgagcaggagcaggcggtcatcctgcgcttcggcaagtattacgagacggtcggtcccggcctgaacttctacttcccgccgatcgacaagcgcttccaggagaacgtcacccgcgagcgtgcgtacagcaagcaggggcaaatgctcaccgaggacgagaacatcgtcgaagtgccgctgaccgtgcagtacaagatcagcaacctgcaggacttcgtgctcaacgtcgaccagcccgaggtcagcctgcagcaggcgaccgagagcgcgctgcggcatgtcgccggttccaccaccatggaccggatcctcaccgaaggccgcgagcagatggcgaccgaggtgcgcgagcgcctgcaacgcttcctggatacctacaggaccggtatcaccgtgacccaggtgaacatccagagcgcccaggccccgcgtgaggtgcaggaagcgttcgacgacgtgatccgggcccgcgaggacgagcagcgcgagaagaaccaggccgaagcctatgccaacggcgtggtgccggaggcgcgtggccaggctcagcgcatcatcgaagaggccaacggttaccgcgacgaggtgatttcgcgcgcccagggtgaggcggatcgcttctccaagctgctggtggaatatcgcaaggctccggaagtgacgcgcgagcgtctgtacctggacaccatgcaggaagtcttcagccagaccagcaaggtgctggtgaccggtcagcaggggcagaacaacctgctctacctgccgctggacaagatgatcgatggtcgtaacgccgcgcctgctacgggtgccggtgcttccgccggtggtggcagcgccagcgcttccgacctggggtcgcggatcgtcaacgatctgcgccagcaagacgcgcgtacgagggagagccgctga

SEQ ID NO: 318148 - DNA, 870 bp, Pseudomonas aeruginosa
atgggcaacaagtctttgatcgctctgatcgtcggtgtcgtcgccgccatcgtcctgtggaacagcgtctacgtagtccagcagaccgagcgcgcggtcatgttgcgcttcggccgggtggtcgagtccgacgtcaagccgggcctgcacttcaagatcccgtacgtcaaccaggtgcgcaagttcgacgctcgcctgctgaccctggatgccccgacccagcgcttcctgaccctggaaaagaaagcggtgatggtggatgcctatgccaagtggcgggtggcggatgccgagcgcttctacaccgccacctcgggcctcaagcagatcgccgacgaacgcctgtcgcggcgtctcgaagcgggtctgcgcgaccagttcggcaagcgtaccctgcatgaagtggtatcgggcgagcgcgacgcgctgatgggcgacatcaccgcttcgctgaaccgcatggcgcagaaggagctgggtatcgaggtgatcgacgtgcgggtcaaggccatcgacctgccgaaggaagtcaaccgcagcgtcttcgagcggatgagcaccgagcgtgaacgcgaggcccgcgagcaccgcgccaagggtcgcgaactggctgaaggcattcgtgccgacgccgatcgccagcgccgggtaatcgttgccgaagcctaccgcgagtcggaagagacccgcggtgacggcgactccaaggctgccgcgatctatgccaaggcctacaaccaggatccggagttctattccttctaccgtagcctgaaggcgtatcgcgaaagcttcgccgagaagcgcgacgtactggtgctcgatccgagcagcgagttcttccgctatctgaacaaggccaacaagtaa

SEQ ID NO: 318149 - DNA, 234 bp, Pseudomonas aeruginosa
atgatgagccagccgggaaatcccggcttttttgcgtccgcgagaatcatgtggcaggaattcggcatcgctttttgtctcgtgctggtgctggaaggcatcctgccgttcctgtgtccgcgacaatggcgcgaggcggtcaccggcatcggccggctgagcgaccgtcacctgcgtctcgtggggctgggcagcatgctgctcggcaccctgcttctttactggattcactga

SEQ ID NO: 318150 - DNA, 1185 bp, Pseudomonas aeruginosa
atggcaacggtagaccgctggctgctgccagatgggatcgaagaggtgctgcccccggaggcggcgcgcatcgaagcagcccgccgtcaggtgctggatctgttccaccgctggggttacgagttcgtcgtgaccccgcatatcgaatacctggagtcgctgctcaccggcgcgggacaggatcttgacctgcgcaccttcaaggtgaccgacccggcgtccggccggctcatgggtttccgtgccgacattacgccgcaagtggcgcggatggatgcgcacagcctgcgccgcgagggaccgagccgcctgtgctatgccggcagcgtgctgcatgcgcagccgcgcgcgctgtccacttcgcgtagtccgatccagctgggcgccgagctgtacggcgatccgagccccgccagcgatgtcgaggtgatcagcctgatgctggaaatgctcgagatggcggaagtgccggatgtgcacatggacctcggccatgtcggcatctaccgtggcctggcgcgcgcggcagggctgtccggcgaagtcgagcagcagttgttcgatgccttgcagcgcaaggcggtggacgaggtcgaggcgctgactgcagacctgcctgccgagctgcgcggcatgttgcgtgcgctggccgagctatgcggcggccgcgatgcgctggagcagggccgtgcccgtctggcggcggcgccggccgatgtccaggtggcgctgaacgagctgatcgagatcgccgattcgctggccgggcgcttccccggcttgccgctgtatttcgacctcggcgagctgcgtggttatcactatcacaccggcgtggtgtttgcggccttcgtgcccggcgttggccagtccatcgcccagggcggtcgctatgatgatatcggtgccgatttcgggcgcgcccgcccggccaccggtttctccaccgatctgaaaagcctggtcactctcggccaggcccggttggaccaggctgtatcgggtatctgggcgccggccgaaggggccgggctctggcaggtggtgcaacgactgcgccgcgacgggcagcgtgtcgtccaggctctgcccgggcaggatgcggcttctgcgcgcgaggcgggctgcgaccggcagctggcgctgcgcgatggcaattggcaggtggcgccgctggcgtcctga

SEQ ID NO: 318151 - DNA, 1293 bp, Pseudomonas aeruginosa
atgggtaagaatgtcgtagtcctgggcacccaatggggtgatgagggcaagggcaagatcgtcgacctgctcaccgagcaggcggctgccgtagttcgctaccagggtggtcacaacgctggccacaccctggtgatcgatggcgagaaaaccgtcctgcacctgattccatcgggcatcctgcgcgaaggcgtgcagtgcctgatcggcaatggcgtggtgctggcgccggatgcgctgctgcgcgaaatcaccaagctggaagagaagggcgtgccggtgcgcgagcgcctgcgcatcagtccttcctgtccgctgatcctgtcctatcacgtcgccctcgaccaggcgcgcgagaaggcccgcggcgaagccaagatcggcaccaccggtcgtggcatcggcccggcatacgaggacaaggtggcacgtcgcggcctgcgcgtcggcgacctgttccaccgcgagcgcttcgccgccaagctgggtgagctgctggactaccataacttcgtcctgcagcactactacaaggagccggccatcgacttccagaagaccctggacgaggcgatggagtatgccgagctgctcaagccgatgatggccgatgtcgccgcgaccctgcacgacctgcgcaagcacggcaaggacatcatgttcgaaggcgcccagggatcgctgctggacatcgaccatggcacctacccctacgtgaccagttccaacaccaccgctggcggtaccgccaccggttccggcttcggcccgctgtacctggactacgtactgggtatcaccaaggcctataccactcgcgtcggctccggtccgttcccgaccgagctgttcgacgacgtcggcgcctacctggccaagcgcggccacgagttcggtgccaccaccggtcgcgctcgtcgctgcggctggttcgatgccgtgatcctgcgccgcgccatcgagatcaacagcatctccggcctgtgcctgaccaagctcgacgtgctcgatggcctggatgtggtgcgcctgtgcgtcggctacaagaatgccgatggcgatgtgctggaagcgccgaccgatgccgacagctacatcggcctgcagccggtctacgaggaaatgcccggctggagcgagtcgaccgtgggtgcgaagaccctggaagagttgccggccaacgcccgcgcctacatcaagcgcgtggaagagctggtgggtgcgccgatcgatatcatctccaccggtccggaccgcaacgagaccatcatcctgcgccatccattcgcctga

SEQ ID NO: 318152 - DNA, 2715 bp, Pseudomonas aeruginosa
atggccgattggcaaaacctcgatcccgaggccgctcgcgaagcggaaaagtacgaaaaccccatccccagccgggaactgatcctggctcacctatccgagcggggcgctccggcgactcgctcccagttgctcgacgagttcgggctcgccggcgaggagccggaagaggccttgcgtcgtcgcctgcgcgccatggagcgcgacgggcagcttatctatacgcgtcgtggcgcctatgcgccggtggacaagctggacctgatccgcggccgcatcagcgggcaccgcgacggcttcggcttcctgatccccgacgatggcagcgacgacctgttcctcagtcccacccagatgcgcctggtgttcgacggcgaccgcgccctggcccgggtgtccggccatgaccggcgcggacgccgcgaaggccagctggtcgaggtgatcgagcgggcccacgagatcgtggtcggccgctacttcgaggaaagcggcatcggcgtggtggtcgcggacaacccgaagatccagcaggaagtcctgatcccgccgggcaaggccggcaaggccaggcacaaccagttcgtccaggtgcgcatcgagcaatggccgagcatccaccgccaggcccagggcgagatcgtcgaggtgctcggtgactacatggcgccggggatggagatcgaagtcgccctgcgcagctacgatatcccccacgtctggccggccgcggtggagaaggaagcggccaagctcaagccggaagtggcggagaaggacaaggaaaagcgtgtcgacctgcgccaggtgcccttcgtcaccatcgacggcgaggatgcccgcgacttcgacgacgcggtgtacgccgaggccaagcgcggcggcggctggcgcctgttcgtggcgatcgccgatgtctcgcactacgtgaaggtcggttcggcgctggacgaagaggcggccaggcgcggcaactcggtgtatttccccgagcgggtgatcccgatgctgccggaggtgctgtccaatggtctctgctcgctgaatccgctggtcgaccggctggccatggtctgcgagatgaccctgtccaaggctggcaagctgaccggctaccagttctacgaagcggtgatccactcccatgcccgcctgacctacaccaaggtcagccagttgctcgagcatcccgacagcgtcgaggccgagaacctgcgccagcagttgcccggcgtggtgccgcacctgcagcagctgtatgcgttgtataaagcgctgctggccggccgccatgtccgcggcgcgatcgatttcgagacccaggaaacccgcatcgtcttcggcgccgaccggaagatctcggaaatccgcccgacccagcgcaacgatgcgcaccgcctgatcgaagagtgcatgctctgcgccaacgtggcgaccgcacgcttcctgcagaagcacgccatcccggcgttgtaccgggtgcatgacggcccgccgcaggagaaactcaacaacctgcgccagttcctcggcgagctggggttgagcctcggccgcggcaaggccgcgccgaccccgggcgactaccaggagttgctggagaagatccacgaccgcgccgacttccgcctgatccagacggtcatgctgcgttcgctcagccaggcggtgtacagcccggacaacaatggccacttcggcctcaactacgacgcctacacccacttcacctcgccgatccggcgctacccggacctgctggtgcatcgtgcgatccgcagtgtgatccgctccaaggcggagactccgcacgtgcagcgggccggcgcggcgagcatgcccaaggcgcgtatctatccgtacgacgaattgcgcctggaccagttgggcgagcagtgctcgatgaccgagcggcgtgccgacgaggccacccgcgacgtgaccaactggctgaagtgcgaatacatgcgcgagcgggtcggcgagaccttccctggcgtaatcactgcggtcaccggtttcggtctgttcgtcgagctgaccgacatcttcgtcgaaggcctggtccatgtgaccgcgctgcccggcgactactatcatttcgacgccgtgcaccatcgcctcagcggcgaacgcaccgggcgcagcttccgtctcggcgacaccacggaagtggtagtggcgcgggtcgacctggacgagcggaagatcgatttcgagctggccggaaacgtgctgagcgcgccgatcggacgcaagaagcgcaacggcgacaagtcggcgaacgccggcaaggcgccgaaggggcgcaagggcgcatccgtgcccgaggtcgacctggagccggcgctggccagtcccgacgccgcggtggtgccgcggcgcaaggccggcaaggtgcaggcgctgccgccggtcgcgccggagctgctggcgcaggccgcggagatgctcggcaacaccgacgtgcgcaagagtcgcgaggtgaagcaggcgctgctcgccgaggcgcgtgtcggcggcaaggacaagggcgggaagaagggcaaggtcgttcctgcgggcaagagcgcgaagggcaaggccaaggacggcaagcccgccgctgccgccaagccgggcaagccgaccaagcatcgcaaggggccttccaagccgaaggccgacaacgctccggccgccaccggggcgcgcaaacgtaaggccaagtcatga

SEQ ID NO: 318153 - DNA, 747 bp, Pseudomonas aeruginosa
atgagtcagtgggaaaaggtctacggcgtgcatgccgtggaagcgttgttgcgtcatcacccgaagcgggtcaagcagttgtggctggccgaggggcggcatgatccgcgggtccaggtgctcaccgagctggccgccgggttccgtattccggtagggcagcgcgatcggcgcgaactcgacgagtgggcggaaggcgtccaccagggcgtggtcgcggaagtcagccccagccaggtctggggcgaaaacatgctcgaggaactgctcgagcggagcgagggcgtgccgctgctgctggccctggatggcgtcaccgatccgcacaacctcggcgcctgcctgcgtaccgccgatgcggcgggggtgcaggcggtgatcgtgcccaaggacaagtccgcgaccctcaacgccaccgtgcgcaaggtcgcttgcggcgccgccgaggtgatcccgctggtggcggtgaccaacctcgcgcgcaccctggaaaagctccagcagcgcggcctgtgggtggtcggcaccgctggcgaggcggacaagaccctctaccagctcgacctcaaggggccgaccgtgctggtgatgggcgcggaaggcaagggcatgcgccggctgacccgcgagcactgcgacttcctcgccaggttgccgatggccggcagcgtcagcagcctgaacgtctcggtcgccaccggcgtctgcctgttcgagatcctccgccagcgcaccccgctggagtga

SEQ ID NO: 318154 - DNA, 420 bp, Pseudomonas aeruginosa
atgcgtcattacgaaatcgtgttcctggttcacccggaccagagcgaacaagtcggtggcatggtcgagcgttacaccaaggccatcgaagaagacggcggcaagatccaccgtctggaagactggggccgtcgtcagctggcctacgccatcaacaacgtgcacaaggcccactacgttctgatgaacgtcgagtgcagcgccaaggccctggctgagctggaagacaacttccgttacaacgatgccgtgatccgtaacctggtcatgcgtcgcgacgaagctgtcaccgagcagtccgagatgctcaaggctgaagaaagccgcaacgagcgtcgcgagcgtcgtgagcgtccgaacgataacgctgaaggcgccgatggcgacgacaacagcgatagcgataacgctgacgagtaa

SEQ ID NO: 318155 - DNA, 231 bp, Pseudomonas aeruginosa
atggcacgtttcttccgtcgtcgtaagttctgccgcttcaccgccgaaggcgtgaaagagatcgattacaaggatctcaacaccctgaaggcctacgtttccgaaaccggcaagatcgttccgagccgtatcaccggcaccaaggccaagtaccagcgtcagctggcgaccgctatcaagcgcgcccgctacctggccctgcttccttacaccgacagccacggccgttga

SEQ ID NO: 318156 - DNA, 870 bp, Pseudomonas aeruginosa
atgcgcgcactggctgagttcaccatgcgcggccgcatgcaggccacgctcgccgtggcaggctccgcggttgttccactgttgttctggctgagtgccgccgccggtagcctggtgctgctgcggcgcggattcggcgacgccttcggcgtcctggcctgggcggtgctaccggcgatgttctggtggtacctgggcgatccgagcatccttctggtcctgctcggtaccctgacgctggcgcagatcctgcgcgccagcacgtcctggagccatgtgctgctgggcagtgttgcagttggcgtggtattcgcgctggtgctggggcatacctccagcgagctgatcggcgccctggcgacggaagtcaccaaggtcctgacccagcttcgcggggagtcccagctgtcgggcgaagagctggacaagttgcaggtggcgctggtgccgaccctgaccggggtcatggcttcctcgctgcaggtgacctgcctgctctgcctgatgctcgcgcggtactggcaggcttcgctgtacaacccgggcggcttcggccgcgaattccggagtttgcggctggcgccggcggttgccgtgatcctgctgctgggggccgtcgtggtcccggcgctggaagtgcaggccgcggtgctcggtccgttgtgcagcgtgccgctgatcatcgccggcgtggcgctcgggcatggcctgatcgccctgaagcgcctcgcgggtggttggctggtgggcctgtacctggctgtattgctgctggggaacctgatctgtcttttggcggttgtcgacagtctgtttgattttcgtggacgcctggcccggcgccagggttccacgaacggtgaaggttaa

SEQ ID NO: 318157 - DNA, 447 bp, Pseudomonas aeruginosa
atggaagtcatcctgctggaaaaagtcgccaacctgggcaacctgggcgacaaggtgaacatcaagggcggttacgcccgtaacttcctgctgccgcagggcaaggccaccgtcgccaccgccgagaacgtcgctgcgttcgaagcacgccgcgccgagctggaaaaggctgccgccgagaagaaggccgctgccgaagcccgtgctgcccagctctccgagctggtggtaaccctcggcgcccacgctggcgacgaaggcaagctgttcggttcgatcggcacccgcgacatcgccgaagccgtttccgctgccggttacccgctggaaaaagccgaagttcgcctgcccaacggcgcgctgcgcaacaccggtgagttcgacgtcgccgtgcacctgcacaccgacgtggaaaccactctgaagctgatcatcgtcgctgagtaa

SEQ ID NO: 318158 - DNA, 1395 bp, Pseudomonas aeruginosa
atgaacgagatcaccagccccgagcaatacgacctggaaaccacagccctgaaggtgccgccgcactcgatcgaggccgagcaggccgtgctgggtggcctgatgctggacaacaacgcctgggagcgtgtgtcggattcggtgtccgacggcgatttctaccgccatgaccatcgcctgatcttccgcgccatctacaagctggccgaggccaaccagccgatcgacgtggtgaccctctccgagcagttggagaaggaaggacaactggcccaggtcggcggcctggcctatctcggcgaactggcgaagaacattccctcggtcgccaacatcaaggcctacgcgcagatcatccgcgagcgcgccaccctgcgccaactgatcggcatcagcaacgagatcgccgacagcgccttccacccggaagggcgcggcgccaacgagatcctcgacgaggccgagcggaagatcttcgagatcgccgaagcgcgaccgaagaccggcgggccggtagggatcagcgatatcctggtcaagaccatcgaccgcatcgactacctgttcaacaccaccgaggcgctgaccggggtgtccaccggtttcaccgacctcgacgagaagaccagcggcctgcagccggccgacctgatcatcgtcgccgggcgtccgtcgatgggtaagaccaccttcgccatgaacctggtcgagaacgcggtgatgcgcaccgacaaggccgtgttggtgtactccctggagatgccctccgactcgatcgtgatgcgtatgctctcgtcgctcgggcgtatcgaccagaccaaggtgcgttccggcaagctcgacgacgaggactggccgcgcctgacttcggcgatcaacctgctcaacgacaagaagctgttcatcgacgataccgctggcatcagtccctcggaaatgcgcgcgcggacccgtcgcctggtgcgcgagcacggcgacctggcgctgatcatgatcgactacctgcaactgatgcagatacccggctccagcggcgacaaccggaccaacgagatttccgagatttcccgctcgctgaaggccctggcgaaggaattcaactgcccggtgattgccctgtcgcagctcaaccgctccctggagcagcgacccaacaagcgcccggtgaactccgacttgcgcgaatccggggcgatcgagcaggacgccgacgtgatcatgttcgtctaccgcgacgaggtgtaccacccggagaccgagttcaagggcgtcgccgaaatcatcatcggcaagcagcgtaacggtccgatcggtacggtgcgcctggccttcatcggcaaatacacgcgcttcgagaaccttgccgccggcatgtacaacttcgaggacgaatga

SEQ ID NO: 318159 - DNA, 1077 bp, Pseudomonas aeruginosa
atgcgtcccctcgttgccaccgtcgacctttccgccattcgccacaactatgccctggccaagcgctgcgcgccgcagcgccaggcgttcgcggtggtcaaggcgaacgcctatggccacggtgcgcgcgaagtggttaccgcgttgcacgacgatgccgatggcttcgccgtggcctgcctggaggaggccgcggaagtccgcgccttgcacgccagcgcgcgcatcctgttgctggaaggctgcttcgaggcgagcgaatacgccctcgccgggcaattgcgcctggacctggtgatccagggcgcggaacagggcgaggcgttcctcgccgccggcctggatattccactcaacgtctggctcaagctcgactccggcatgcaccgcctgggcttcgatcctgccgcgctgcgcgcctggcatgcgcgcctgcgcagccatcccggtgtgcgcgagctgaacctgatcagccatttcgcctgcgccgacgaacgcaaccatccgctcaccgaacagcagctggagagtttcctcggcctgctcgacctggacttcgaccagcgcagcctggccaattcggcggcggtgctgactatcccggccgcccacatggactggctgcggccgggaatcatgctctacgggtcgaccccgctggccgacctcagtgctgccgaactgggcctgaagccggccatgagcctgggcgcgcagttgatttcactgcgcgaggtggccgtgggtgagagcgtcggctacggcgccacctggatcgccgagcggccggcgcggatcggcacggtcagttgcggctacgccgacggctatccgcgtaccgcgccagccgggactccggtactggtcgggggacgccgcgcgaccctggccgggcgggtctcgatggacatgctggcggtcgacctctccgacctgccggaggctcgcgttggcgacccggtggagttgtggggcgccgggttgtcggtggacgaggtcgcccgtgcctgcggcacccttggctacgagcttctgagcaaggtcacggctcgggttccgcgacgctacagccactga

SEQ ID NO: 318160 - DNA, 1902 bp, Pseudomonas aeruginosa
gtgcgccatcctcttgccctgctcgcggtcatcttcctgctactggccagcgccgtttcgcgcgccgcgccggagtttccggcgcctccggccagcggcgcctggttgaacggctcgctggacctgctcgaagaccccgatggcaacctggcggtggaggacctcgaacaagcggagcaggccggccgcttcgtcgccgccgccggccgcaccagcgtcggcctcagccgcagcgcctggtggctgcgcctcgacctgccgagacgcgaggcggtatccggcggctggtggctggaagtcgccagcgccagcctgcacgacctgcgcctgtatctccccgacgagcgcggcgggttccgtgaacatcgcagcggcgaagcggtgcccttcgccgagggccgcgaccacgcctatcgtcatccgctgttccggatccctcccggcgatgggccgttgcgcgtctacctgcgcagctacgatcccggcggcaacgcctttccgctgaggctctggagccacgacgaactgctggaataccgcagccagggcaacctgctgttcggcatggcctacgggctgatcctcgccctgctgctgtacaacctgttcctcttcaccagcctgcgcgatcgcgcctatttctggtacgtgctgaccgctgccagcgcgctggtgctgaccctgagcatcagcggccatggtttcgagtatttctggcccgagcgggcggtgccctggtggcttgaccgcctggcgctgctggcgatctggggcatctgcgtgatccgcttcagccagaacctgctgcaaagccggcagcacgcacgctgggcccatcacctgctgaacgcctgttgcctgctgttccttgcctgcctggcgttcaacgccgccggctggcgctggcaggcggccggcgtgctggcgctgaccctgctggccaacctgccgatcgccatcggcctggcagtgcagcgctggcgccagggttcggccacggcgcgcctgtacctggtcggcttcggcctggtgctcggcagcgtcagccttggcgtgatgcgcgccaccgcgctggtccagccgacctcggccaacgccatggtcttcccgctggcgctgaccctggaggccctgctgttctccctggcgctcgcctcgcgcatccaggacctgaagcaggaaagggccctggccctggaccaggccgaccaggaaaagaacgcgcgcctggccctgctgcacagcgcccagcgcgacctggcacgcgccgtggaagtccgtaccaacgagttgagcgaggccaatcgccagttgcagatgcgcgaagcgcaactgcagtacgccgcccatcacgacccgctgaccgggcttggcaaccgcaggcacctgatggagttcgccgaaagcgccctggacgacgcgcgccgccacggcaacagcatggcgctgctgctgatcgacctggatcacttcaagccgatcaacgatacccatggccacgatgccggcgacttcgtcctgcagaacgtggcccagcggctgcgccattgcgtgcgcaccgaggattgcgtggcgcgcctcggcggcgacgaattcgccgtgctggtcggcgggtcgaatgccgagcagcatgcccgcgacatcgccgaacgcctgctgcgagaactggcgaaaccggtggagttcgccaagcagtggctggtgatcacaccgagcatcggcgtcgccctgtttcccggcgacgccctgcagttcggcaaactctacaaggccgccgaccaggcgctgtaccgggtcaagggcgccgggcgcgccggctatgcgatggctgccgacgatgaacgcgagaccgcgccggcgctcccctggccgaccgccctggcaccggagcgtatctcctga

SEQ ID NO: 318161 - DNA, 2244 bp, Pseudomonas aeruginosa
atgcaagccgccaagccgctgttcgactatcccaagtactgggccgagtgtttcggtccggcgcccttcctgcctatgagtagggaagagatggatcagctcggctgggactcctgcgacatcatcatcgtcaccggcgatgcctacgtcgaccacccgtccttcggcatggccatcatcggccgcctgctggaggcccaggggttccgcgtcggcatcatcgcccagccggactggcagtcgaaggacgacttcatgaagctcggcgagccgaacctgttcttcggcgtggcggccggcaacatggactcgatgatcaaccgctataccgcggacaagaaggtccgttccgacgacgcttacacccccggcggcctggccggcaagcgcccggaccgcgccagcctggtctatagccagcgctgcaaggaggcctacagccatgtgccggtgatcctcggcgggatcgaggcctcgttgcgccgtatcgcccattacgactactggcaggacaaggtccgccgctcgatcctgatggacgccacggccgacatcctgctctacggcaacgccgagcgtgcggtggtggaaatcgcccagcgcctggcccagggcgaactggtgagcgcgatcaccgacgtgcgcggcaccgccttcgtccgtcgcgacaccccggagggctggttcgagatcgattccacgcggatcgaccggccgggcaagatcgacaagatcatcaatccctacgtgaacacccaggacaccgccgcctgcgccatcgagcaggaaaagggcgcgcaggaggacccgcaggaagccaaggtcgtgcagttgctggcgaaccccaggctgacccgggagaagaccgtgatccgcctgccgtctttcgagaaggtgcgcaacgacccggtgctctatgcccacgccaaccgcgtgctgcacctggagaccaacccgggcaacgcccgtgccctggtgcagaagcacggcgaagtggatgtctggttcaacccgccgcccattccgatgagcaccgaggaaatggactacgtgttcggcatgccctatgcccgcgtgccgcacccggcctacggcaaggcgaagattcccgcctacgagatgatccgcttctcggtgaacatcatgcgtggctgcttcggcggctgcaccttctgctcgatcaccgagcatgagggacggatcatccagaaccgctcgcacgactcgatcatccgcgagatcgaggagatgcgcgacaaggtgcccggcttcaccggcgtggtctccgaccttggcggaccgacggcgaacatgtaccgcatcgcctgcaagagcccggacatcgagcggcactgccgcaagccatcctgcgtgttccccggcatctgcgagaacctcgataccgaccacagctcgctgatcgagctgtaccgcaaggcccgggcgctgccgggggtgaagaagatcctgatcgcctccggcctgcgctacgacctcgccgtcgagtcgcccgagtacgtcaaggaactggtgacccaccacgtcggcggctacctgaagatcgccccggagcacaccgagcgcggtccgctggacaagatgatgaagccggggatcggcacctacgaccgcttcaagcagatgttcgagaagttctcgaaggaagccggcaaggagcagtacctgatcccgtacttcatcgccgcccatcccgggaccaccgacgaagacatgatgaacctggccctgtggctcaagcgcaacggcttccgcgccgaccaggtccaggcgttctatccttcgccgatggccactgccaccgctatgtatcactcgggcaagaacccgctgcgcaaggtcacctacaagagcgatggcgtgaccatcgtcaagagcgaccagcagcggcgcctgcacaaggccttcctgcgctaccacgacccgaaaggctggccgctgctgcgcgaggcgctggagcggatggggcgcgccgacctgatcggcaatggcaagcaccacctggtcccgacctaccagccggataccggcgaataccagagcgcccggcggaagaactcgacgccggccggcagcaagaaggccggcaagctgctgacccagcataccggcctgccgccacgcgccagcgacggtggtaagccgtggagcaagggtcagcagaacaaggcgacggccttcgccaagggcaagaagaagtcgcgccagccgaacatcccgcgctga

SEQ ID NO: 318162 - DNA, 2499 bp, Pseudomonas aeruginosa
atgcccgagctgcttgcccactatccgttcaccgatacggcctaccacgagttgctcgatcgccagggcggcgtgcgtccccattggcagcggctgttccgccaactggagcgcagcagccctgagcaattgcgccagcgccaggccctggtggaacggcagatccaggagaacggcgtcacctacaacgtttacgccgatcccaagggcaccgaccgcccctgggcgctggaccttctgccgaacctgctgtccgccgccgagtggcagccgatcgccgctggtgtggcgcagcgtgctcggctgctcaatgcgctgctggccgacctgtacggcgaccagcgtctgctcgccgaagggctgctgcccagcgaactggtcttcggccatccgaacttcctctggccggcgctcggcatccggccgcccggcgggattttcctgcacagctatgccgtggacctggcgcgcgatgccgacggacgctggcaggtccttgccgaccgcacccaggctccgtccggcgcgggctatgcgctggagaaccggcagatcgtctcgcgggccttgccggaactctatcgcgacctgcgcgtgcagcatctcgccgggtatttccgcaccctgcaggagaccctcgccagccaggccgccggcgacggcgagacgccgctggtggtgctgctgactcccggacgtttcaacgaaacctacttcgagcatctctacctggcgcgccagctcggttttccgctggtcgaggggcacgacctgacggtgcgcgacgccaccctctatctcaagaccctcggcggcctgaaacgggtgcacgcggtattgcggcgcctcgatgacgatttctgcgacccactggaattacgtaccgactcggcgctgggcattcccggcctgctcgaggcggtacgccagggacgcgtgctggtggccaacgcactgggcagcggagtgctggagtcgcccggcctgctcggcttcctgccgcaggcctgtcgccgcctgcttggcgaggaactggcgctgccctcgctcgacacccgctggtgcggcgagccgcaagccctcgaggcgatactcgcggcactgcccgacctggtgatcaagccggcctttcccggccagcgctgcgaacctctgttcggccacgccctcgacagtgccggcctggcatccctcggcgagcgcttgcgcgagcgcccgcaggcctacgtggcgcaacgcctggcgcagttgtcccaggcaccggtctggcgcgacggcaaggccggcgtcggcctgcagtcgcgggccatcggcatgcgcgtattcgccgtcgccgccagcgacggccgctactgggtgatgcccggcggcctgacccgcgtagcctcggcggcggacgccgaagtggtgtcgatgcagcgcggcggggcgagcaaggacacctgggtgctggccgagcgagcagtcggcggcgagccgttgcgaccgcgccggctcggcgtgcgcgacctggtccgcgaagacccctacctgccgtcgcgggtggtggagaacctgttctggtacggccgctatgccgagcgttgcgacgaccatgcgcgcctgttgcgggtggtgctgttgcgctacgtggatgccgatggcgacgaagaggcgttgcgcagcgccctggccctggccggcggcatcggcctgctgcccggggatggcgagccgttggaaaggtgcctgttgcgggcgttgctcgacgagcactggccggcgagcctgtgcgccaacctgcggcgcctgcactgggcggcggcgcaggtgcgcgggcgcttgtccggggagaactggctggccttgctggagctgcaacgcgacatgcaggcgctcgatccggcacgcaccgacctcggcgaagcgctggacttcctcaaccggctagtgatgtccctggccgcgttgtccggtttcgccctcgacgacatgacccgcgacgacggctggcgtttcctgatgatcggccggcgcatcgagcgcgtgcgcttcttcgccgagagcatcgccgccttcctcgacggcggtagcgcctgggacgccggcgcgctggagtggctgctggagctgggtaacagcggcatcacctaccgctcgcgctacctggcgtcgccgcagctggtcccggtgctcgacctgctcctgttgcacgagcagaacccgcactcgctgcgcttccagttgcaggccctggagcgttcgctggagcgcctgcacgaggagttcggcgcgccacgcgagcgggaactcaggaccctgggcgaacgcctgcgcagcttcgatctggcggccctggaaagcccgctgttcggcgcggcaggactcgacgaggtgctcgtcgggctggcgcgactgctgcgcgacatcgccgcctgcgccggacaggtctccgatcggctaggcttgcgctatttcgcccatgtcgacgatgtcagccagagaacggtatccacctga

SEQ ID NO: 318163 - DNA, 936 bp, Pseudomonas aeruginosa
atgtccgcacccgcgcttcgctccgttccgctccagggcgcccgctaccaggtgctgcacgacacccattaccgctatgcgacgccggtctcgctgtcgcggcaactggcgcatctctggccacgcgaatgcgcctggcaggcctgtcatgagcgggcactgctgatcgagccggggccgagccggcgcgaggatggccacgacgcattcggcaatccgctgagccggctggccttcgagcgtccccacgaggcgctgcgggtcagtgcgcgactgcaggtcgaagtgttcgcccatgcgccggcgcaactgaccgcgtcgccggcatgggaaaccgtcgccgccgggctggcattttccgggcgggcgctgtccgccgccgagctggaagcctgccgctatcgcgtcgagtcgccatatgtgcgcatccagcggcgattcgccgagttcgccgccgactgcttcccgcccggacggccgttgctggtggcgggggcggcactgatggagaagatcttccgcgagttcgccttcgatgcgcaggccacccaggtggcgacgccgctggacgaagtgctggagcgccgtcgcggggtctgccaggacttcgcccacctgatgctcgcctgcctgcgcgcgcgcggactggcggcgcgctacgtcagcggctacctgctgacccgcccgccgcccggacaggcgcgactgatcggtgccgacgcctcgcatgcctgggtctcgctgtattgcccggagaacggctgggtggatttcgacccgaccaacgacctgttgcccgacctggagcacatcaccctggcctgggggcgggacttttccgatgtgtcgccgctgcgcggggtgatcctcggtggcggtagccatgacccggaggtgcgggtgacggtgctgccgctacaggaaacagccggctga

SEQ ID NO: 318164 - DNA, 870 bp, Pseudomonas aeruginosa
ttgcgcacggtgagcgatatggatgacacgacgatcgtcaacgtaggtaccgagaagatcaacgcgctctgggcgacggtgtcccagtacgccttcgccttcggcatcaagattctcgcggccatcgccttctgggtgatcggccgctggctgatcggcttcgccgtcggcatggtgcagaaatccctcgagcggcaaaaggtcgatcccaccgtgctgcgctacgtgggttcgttcatcacggtgaccctgaacgtgctgctggtggtgggcatcctcggtttcttcggcatccagaccaccagcctggcggcgctgatcgcggcggtcggcctggccattggcatggcctggtcgggattgctggcgaacctggcggccggcggcttcatcatcgtcctgcggccgttcaaggtcggcgacttcatctgcgccggcggagtgaccggcacggtcaaggagatcggcctgttcaccacggcgatcaacactccggacaacgtgctgaccatggtcggcaacaacaagatattcggcgacaacatccagaacttcacccacaacccgttccgccgggtcgagttgaaggcgcagctttccggtgccgccgactaccaggcggccatcgccctgctcaagcagcgcgtcgcggcgattcccaacgtgctcggcgagccgccggtggacgtggagatcctcgagttcaacctggtcgggccggtgctggcggtgcgcccgtattgccacaacgaccattactggcaggtctatttcgataccaacaaggtgatcaaggacgccctcggcgccgacttcccggcaccgatgccggcgcagacggtgatcgtgcagcagtccgccggcgcctga

SEQ ID NO: 318165 - DNA, 696 bp, Pseudomonas aeruginosa
gtgttcttcagattgctcttgatcgccgtcctgctggcggtatccgcgtgcagctccaaggctcccggcccgggggcgtcggtgccgaaggtcgtgcgcggcgagtatcgcgtcaagcgcggcgacaccctctattcgatcgccacccggcacggctggaactacaaggacctggcgcgcgccaacggcatccgcccgccctacgcggtcaaggtcggccaggtggtgcgcttcgacgggcgcaagtcgacctacgtcgccagtagccgctcttcgtctaacacccgtgcgcgcaagccgccgcctccgccgccgtcggtgaccctgcgcggctggcagtggccgatgaaggggccggtgatccgccgcttctccagttccgacaagctcaacaagggcatccgcatcgccggcaccctgggccagccggtgcaggcctcgctggccggcaaggtggtgttcgcggtgaacaacatgcgtggctacggcaacctggtgatcatccagcacggtacctcgtacaccagcacctacgcgcacaacagccgcttgctggtgaaggaggggcagatggtcggcaagggccagaagatcgccgaggccggttcctcggatgccgaccgggtgcagctgtacttcgagatccgccagaacggccggccgctcgacccgctgagcctgctgccgccgtcctga

SEQ ID NO: 318166 - DNA, 588 bp, Pseudomonas aeruginosa
atgaccttgcgttccgtctgcgtattctgtggcgccagccccggcgcttccccggtctaccaggaagccgccgtggccctcggccggcacctggccgagcgcggcctgaccctggtctacggtggcggcgcggtcggtctgatgggcaccgtggcggacgccgcattggccgccggcggcgaagtgatcgggatcatcccgcagagcctgcaggaggccgagatcggccacaagggcctgacccgcctggaagtggtagacggcatgcacgcgcgcaaggcacgcatggccgaactggccgacgccttcatcgccctgcctggcgggctcggcaccctggaagagctgttcgaggtctggacctggggccaactgggctaccacgccaagccgctgggcctgctcgaagtgaacggtttctacgacccgctgctgactttcctcgaccacctggtcgacgaacgcttcgtccgcgccgaacaccgcggcatgctgcagcgcggtgccagcccggaggcgctgctcgattccctcgccgcctggacgccaagcgtggcgccgaagtgggtcgaccgcaccccgcagtga

SEQ ID NO: 318167 - DNA, 447 bp, Pseudomonas aeruginosa
atgctacgtaaactcgctgcggtatccctgctgtccctgctcagtgcgccgctgctggctgccgagtgctcggtggacatccagggtaacgaccagatgcagttcaacaccaatgccatcaccgtcgacaagagctgcaagcagttcaccgtcaacctgtcccaccccggcaacctgccgaagaacgtcatgggccacaactgggtactgagcaccgccgccgacatgcagggcgtggtcaccgacggcatggcttccggcctggacaaggattacctgaagcccgacgacagccgcgtcatcgcccacaccaagctgatcggctcgggcgagaaggactcggtgaccttcgacgtctccaagctgaaggaaggcgagcagtacatgttcttctgcaccttcccgggccactccgcgctgatgaagggcaccctgaccctgaagtga

SEQ ID NO: 318168 - DNA, 924 bp, Pseudomonas aeruginosa
atgcgcacccgtctccccgccctgctcctcggtgtcctgctggccggccaggcctgcggacacacatccccgctgctcgcgccggtacggcagatccacgccttcggcgacagctattcggacaacggcgaaagccagcgactgacccgcgagatgctcgccaagggcatcgccggcgcccaggcattgcccggcgaagtctactggcagggccgctggagcaacggcccgaccgccgtcgaggtgctcgcccgccagcttggtgcgcaactggccgaccatgcggtgggcggcgccaagagcggagcggacaactactacggctggatgagcgcctaccgccataccggcctcgccggccaggtcgacgcctacctcgccacgctggacggcaagccggtcgatggccaggcgctgcacttcatcttcgtctccgccaacgatttcttcgagcacgaggatttcgccggcgagcagcccctggaacaactggccggcagcagcgtggcgaacatccgcgccgcggtgcagcgtctcggagaggccggcgcacgacgcttcctggtggtcagttcgaccgacctgagcgtggtcccggcggtggtcgccggtaaccgggtcgagcgggcgcagcgctacctgcaggcagtcaacgccagcctgccgatccagctcgccgccctgcgcaagacccgcggcctggagctgagctggttcgaccatctcaccttcagccgccacttgcggcgcaacccggcgcgctatggcctggtggagctggacgcgccctgccagccgacccagcccagcgtccgcccggcctgcgccaacccggaccagtactacttctgggacgagtggcatccgacccggcgcgtgcaccaactggccggcgaggcgatggcggcacgctacgcgcgctga

SEQ ID NO: 318169 - DNA, 828 bp, Pseudomonas aeruginosa
atgcaacagatccaacgcgacatcgcccaagccctgcaggtccagccgccgttccagtcggaggccgacgtgcaggcgcagatcgcccggcgcatcgccttcatccagcagtgcctgaaggattccgggctgaagaccctggtgctggggatcagcggcggcgtcgactcgctcaccgccggcctgctggcccagcgcgccgtcgagcaactgcgcgagcagaccggcgaccaggcctaccgcttcatcgccgtgcgcctgccctaccaggtgcagcaggacgaggccgatgcccaggcctcgctggcgaccatccgcgccgacgaagagcagaccgtcaacatcggtccgtcggtgaaagccctggcggaacagctggaagccctggaaggactcgagccggcgaagagcgacttcgtcatcggcaatatcaaggcgcgcatccgcatggtcgcccagtacgccatcgccggcgcccgcggcggcctggtgatcggcaccgaccatgccgccgaggcggtcatggggttcttcaccaagttcggcgacggcgcctgcgacctggctccgctcagcggcctggccaagcatcaggtgcgcgccctcgcccgcgccctcggcgctccggagaacctggtggagaagatccccaccgccgacctcgaggacctgcgccccggccatccggacgaggcttcccacggcgtcacctatgccgagatcgacgccttcctgcacggccagccgctgcgcgaggaagctgcgcgggtgatcgtcgacacctaccacaagacccagcacaagcgcgaactgccgaaggcgccctga

SEQ ID NO: 318170 - DNA, 1200 bp, Pseudomonas aeruginosa
atggccgaaagcgtctttgccgagcgcatcgtgcagaacctgctcgataccgatttctacaagctgaccatgatgcaggcggtgctgcacaactaccccaacgccgaagtggagtgggaattccgctgccgcaacgccgaggacctgcgtccgtacctggcggagatccgctaccagatcgagcgcctcgccgaagtcgaggtaaccgccgaccagctcgccttcctcgaacgcatcccgttcatgaagccggacttcatccgcttcctcagcctgttccgcttcaacctgcgctacgtgcacaccggcatcgaggatggccaactggcgatccgcctgcgcggcccatggctgcacgtgatcctcttcgaggtgccgctgctggccatcgtcagcgaggtgcgcaaccgttatcgctaccgcgaggtggtcctggaacaggtcggcgagcagctctatcgcaagctcgactggctctccgcccaggccagcagcgaggaactcgcggaattccaggtcgccgacttcggcacccgccggcgcttctcctaccgcacccaggaggaagtggtgcatatcctcaagcgcgacttccccgggcgcttcgtcggcaccagcaacgtgcacctggcccgcgagtacgacctcaagccgatcggcaccatggcccacgaatggctgatggcccaccagcaactcggcccgcggctggtcgacagccagcaagcggcgctggactgctgggtccgcgagtaccgcggacagctcggcatagccctgaccgactgcattaccatggatgccttcctcgacgacttcgacctgtacttcgccaagctcttcgacggcctgcgccacgattcgggcgacccgctggcctgggcggagaaagccatcgcccactaccgccgcctgggtatcgacccgctgagcaagaccctggtgttctccgacgggctggacatgcccaaggcgttgcagctgttccgcgcgctacgtggcaagatcaacgtcagcttcggcatcggcaccaacctgacctgcgacatcccgggggtcgagccgatgaacatcgtcctgaagatgacggcctgcaacggccatccggtggcgaagatatccgacgccccgggcaagacccaatgccgcgacgagaacttcgtcgcctacctccgccacgtcttcaacgtgccggcctaa

SEQ ID NO: 318171 - DNA, 660 bp, Pseudomonas aeruginosa
atgaatcgtcccagcaagatcgccagcttcgatgtcgacgcccagaaaggcttcaccccgctgtgcccggacgaactgccggtgcccggcggcgacgccatcggcgccgccctcaaccaactggccagccgcgccgcgctgcgcctgggcagcaaggacgcgcacagcccgaaggctgcctgggtagtggaaagcgccgagcagatgctgcggccgctggcctatccggatgccgacctgacctgggtgagccactgcgtaccgggtacgccgggtttcgagctgctcgacgaactgccgcggccgatcgactacgacttcttcgtctggaagggcgtggagccggacctgcatccctacggcgcctgctaccacgatctggcggaacgccgcagcaccggggtcatcgaatacctgaggcagaatggcgtgagccatgtgctggtgggtggcctggcgctggactactgcgtgaagaacaccgccctgcaactgcgccgcgccggtttcgaggtgctgctctacctgcccgcctgccgggccatcgccgaggacaccgcgcagcgggcctgcgacgagatgcgcgacgccggggtgatcctctgcgccgacctggaacgactggatagcgccctcgccggcgccgacaaggagaagtga

SEQ ID NO: 318172 - DNA, 603 bp, Pseudomonas aeruginosa
atgcgtgatgaaataagttcccggattcgccgactgcctgccgggatgagcggcggacgcgcccccgacttcgccctcgcggtctacggtggggcgttcgacccgccgcaccccggccatgagtcggtgatccgccgggcgctgctttgcgccgaaagggtcgccctggtgccgagccaccgccacgccttcggcaagcgcatgggcgatttcgagctgcgctgccgctggctggcgcggctggcccggcggatcgatccgcggcgggtgtattgcgaaccgatcgaagcaggattgatgcctgatcgtccggcggtctacagcatcgacctgctggaagcgctggccgcgcgtagcggcctggcgtcaccgcggatcgccctgctgatcggcgccgacaacgaggcggagctgccgcgcttcgaacgcgccgccgaattgtgctggcgcttcggccggctggtggcggaggagcggctgccgctgcacagctcgatgatccgccagcgcctgcgtgaagggctggcggtaccggaggcctggtgcctgccggaagtgaaggacgaactgcactgctatggcggcgaacgccaggcgggctga

SEQ ID NO: 318173 - DNA, 696 bp, Pseudomonas aeruginosa
atgagttcagcggaagtattggccagcgtggatatcgtggcgttgcgcctgaaccccgggcacggactggagctgttgctgatccgccgcgcccaggcgcctttcgccggccagtgggccttgcccggcgtgctggtcaacggccgcagcgccgaccacagcctcgacgacgcggcggtgcgcgccctgcgcgacaaggcgcggctggagccggcctacatcgagcaggtggccacggtcggcaacgcggtacgcgacccgcgcggctggtcgctgagcgtgttctacctggtgctggtcggtccggacacccgggtggaggacgacgacctcgacttcgtgccgctgcgcgacgttcgcagcgagcgcttcgccctgccgttcgaccacgcccaactggtacagcaggcctgcgagcgcctggcgagcaagtcggtgtacagcgccctgccgctgttcctgctggcgccgcgcttcaccgtggccgaggcgctgaaggccttcgagtgcgccatcggccaggaagtccagcattccagcctgcgcgggcgcctggagcggatgaaggaggctggctgggtcgaggacaccggcgaacgccagcgtccgcccatggggcgcccgcaacacgtcctgcatttcaccccgaagccgggcggcgccttcgttttcgaccgcagcctgctggcgtcctga

SEQ ID NO: 318174 - DNA, 1626 bp, Pseudomonas aeruginosa
atgctcactggcgtcacggttcgaatccgcctgctggtcctggcgctgctaccgctgacgatgctcgtcacggtcatcgcgatggcgctggccaacgccagtcgactcgatgccagcttccaggaccttttcaacaaccggatgaagcccatcagccagctcaagatcgtcgccgacgccgttgcggtcagcgtggtcgacgccctgcacaagtaccgtgcgggggtcttcgatgaagagcgcctgcagcaggagttgagtggggcgctgtcgcgcatcgagaagtcgtgggccgactattccgcagaccaccggactgccgccgagaaggaaatcatcgagtcgctggtccccaccctggaacgggtcaagcggatgaccctggcatacggcgagcaggccagggccggaagcctgcgaaacgtcgaggccggcacgttcaatcgcgagatgtatggtgcgttcgatccgctgggaaccgcgctgtcgacgctgatcgacctgcagctcagtgaaggcgccaagctcaacgagcagatggagaaacgctacgactccatgcgcaccaccttcctgctcatcggcgccgcagccctggtcctcatcgtcgccgcggcctggttcatcagcctgtcgatcatgcgcccgctttccgatctgcgcggggtgatccgccgcgtgcaggactcctcgaatctcacgctccgcgccgatgcgcgcgggcgcgacgaagtgtccgatacggcgcgcgccttcaatatgatgctggaaagccagcaggcgctgcttcggcatctcgccgagacagccaggaagctcaccatcacctcggacgagatgagtgccatcagcaaccaggtcagccatgtcgccacgtcccagggcgaccagaccgacatggtcgccacggcggtacaccagatgagcatggcggtccaggacgtggcgcggaacgcccaggccgccgcagccagcgcggaatcggcgaacagcgaggcgcacaccggaaccggactcgtgcatgcgaacctcgacgccatccagggcctgtcggtcatggtcggagaggcgggagccgtcatcgacacgctacgcaacaagaccgaggaaatcagcaccgtcctggaagtcatccagaacatcgcccagcaaaccaacctgctcgccctcaatgccgcgatagaagccgcacgggcgggcgaggccggacgcgggttcgcggtggtcgccgatgaagtgcgcagcctggccaccaatacgcacaaggccaccgaaaccatccgcgagatgatcgaagccctgcaggcaggcgccagcagcgcggtcagcgtgatgcagcagtcacgcgagcaggcccaggtcagcgtccagcgcgcccacgaggcgggaaaggcgctcggtctcatcgcccaggcggtcgaaggtatcgcccagagcaacgcgcagatatccacggcgacggaagaacagaccgccaccgcgagcgaggtcagccagaacatcgactcgctcaatgccagcatcggcgaagtcgccgagggcgcggtgaagacctccacctccagtgtcgagctggcgaagctggcaaacggactggagcagcagatccagcgcttcaccgtctag

SEQ ID NO: 318175 - DNA, 939 bp, Pseudomonas aeruginosa
atgctgaacaaacgccgcctgccgtcgatgaccgccctgcaatgcttcgaagcggtagcccggcacctgagcttcacccgcgccgccgaagagttgagcctgacccagagcgccatgagcaagcaggtcgcgcaactcgaggagcaactgcagcacgccctgttccgccgggtgcgcaagcgcttgcaactgaccccggccggcgagctgtacctggccgaggtacgacgcatcctgcaacaggtagagctgtccacccgcttcctgctttcctacggcggcgagaccgaagtgctgcgagtggcgaccccgccgaccttcggcgcgcgctggctgatcccgcaactgaacggctggcgccaccgccacccgaacatccacctcgacctgcgccaggaactggaaccggacgacctgcgccagggccattgcgacctggcgttcttcttcggccccggcaccctgccgggcgccgagtgcatccgcctgttcggcgaacaactggtggcggtctgcgcgccatccctgctgccggccggcggactggacgaaccgacccaactggcggggctggtgctgctgcagaacgccagccgcgcggaggcctggcacgactggttcgccagcctggagcgaaattgccagggttgctaccacggtccacgcttcgacaccttctacatgtgcatccgcgccgcccaggccggttgcggggtagccttgctaccgcgcttcctggtcgaggaggaactcgccgaaggcaagctggcgatcgcctggccgcacgccctgcccagccaggaggcctactacctggcctatcccgagcatgccgcggaagtccccaaggtgcgccatttcatcgagtggatggtagagcgcctggagcaggagcaaccctcagcgggcccccgccagacgcgccacggcccggtttga

SEQ ID NO: 318176 - DNA, 1125 bp, Pseudomonas aeruginosa
atgtccaagaagctgttcagaaaaggcatcctggctctcgcggtttcatccgtgatgggtctttccacgcatgcgctggccgacgtcgtgatcggcgtggccggaccgcataccggcgccaacgcctccttcggcgagcaatactggcgcggcgcgtcccaggcggcggaagacatcaacgcggcgggtgggatcaacggcgagaagatcaagctggtcaaggccgacgacgcctgcgaaccgaagcaggccgtggccgtggccaaccgcctggtggaccaggacaaggccatcgccgtggtcggccatttctgctcttcttcgaccatccccgcatccgaggtctacgacgaggccgggatcatcgccatcacccccggttccaccaacccgcaggtcaccgagcgcggactctccgggatgttccgcatgtgcggccgcgacgaccagcagggcgtggtcgccggcgactatatcgtcaacgtgctcaaggccaagaaggtcgcggtgatccatgacaaggacacctacggccagggcctggcggacgccaccagggcgcaactgaacaagctcggcgtgaaagaggttctctacgagggcctgactcgtggcgagaaggacttcaacgcgctggtcaccaagatccgcgcctccggtgccgaggtcgtctacttcggcggcctgcatccggaagccggtccgctggtacggcagatgcgcgaacagggactgaccgccaggttcatgtccgacgacggcgtggtcaccgacgaactggcgaccaccgccggcggtccgcagtacgtcaagggcgtgctgatgaccttcggcgccgacccgcggctgatccccgacggcaaggcggtggtggagaaattccgtgccggcggtttcgagccggaaggctacaccctctactcctacgcctcgatccagtccctggcggcggccttcaacggcgccggcgccaacgatccggccaaggccgccgagtggctgaagtcgcatccggtgcagaccgtgatgggcaagaaggaatgggacaagaagggcgacctgaaagtctccgactacgtggtctacgagtgggacgacaagggcaagtaccaccagttgccctga

SEQ ID NO: 318177 - DNA, 915 bp, Pseudomonas aeruginosa
atggacggcatcttcctccagcaaatgatcaacgggctgaccctcggctcggtctacggcctcatcgccatcggctacaccatggtctacggcatcatcggcatgatcaacttcgcccacggcgaggtgtacatgatctccgcctacctgtcggccatcgcccttgccctgctggccttcttcggcctgcagaacttcccgctgctgatcctcggcaccttgctgttcaccgtgctggtgacctgcacctacggctgggtgatcgagcgcatcgcctacaagccgctgcgcaactccacgcgcctggcgccgctgatctcggcgatcggcatgtcgctgatcctgcagaactacgtgcaggtggcacaggggccgcgccagcaggggatcccgaccctgctcgacggcgccctgaaattccacgtcggcgacggtttcgtccagctcacctacaccaagctgttcatcctgatcgcttcgctgatcggcatggcggtgctgacctacgtgatccgctacaccaagctcgggcgcatgtgccgggcgacccagcaggaccgcaagatggcttcgatcctggggatcaacaccgaccgggtgatctcctacgtgttcgtcatcggcgcggcgatggccgccctggccggggtgctgatcaccatgaactacggcaccttcgacttctacgccggcttcatcatcggcatcaaggcgttcaccgcggcggtgctcggcggcatcggctcgctgcccggggcgatgctcggcggcctggtgctgggagtggccgaggcgcagttctcggggatggtcaacaccgactacaaggacgtgttcgccttctcgttgctggtactgatcctgatcttccgtccccagggcctgctcggccgcccgcagatcgccaaggtgtaa

SEQ ID NO: 318178 - DNA, 1278 bp, Pseudomonas aeruginosa
atgagcaacgagacttccatcgatctcaagcagtgcgtcctcgatgccgtgctctccgggttgatcgccctggtggtgttcggccccatcgtcggcgtggtcctcgacggctacggcttcaacctgcattacgagcgggtcggctggatcatcgcgatcgtgatggccgggcgcttcctgctcagcctctacctgcagacccgcggcgggcgcgccgtgctggagcgcttcgagggggctggcagcggcgtccacgtcctgccgccgggctacaagacccgcttgcgctggatcgtgccgctgatcctggtggccgcggtgatcttcccgttcttcgccagcaagtacctgctggcggtggtcatcctcggcctgatctacgtgctgctgggcctgggcctgaacatcgtggtcggcctcgccgggctgctcgacctcggctacgtggccttctacgccattggcgcctatggcctggcgctgggctaccagtacctcggcctgggcttctggaccgtcctgccgctggccgcgctgaccgccgcggtggccggggcgatcctcggcttcccggtgttgcgcatgcatggcgactacctggcgatcgtcaccctgggcttcggcgagatcatccgcctggtactgaacaactggctgtccttcaccggcgggccgaacggcatgccggcgccggcgccgaccttcctcggcctggagttcggccgccgggccaaggatggcggggtgccgatccacgagttcctcggcatcgcctacaaccccaacatgaagttcctgttcatctacgtggtgctgttcctggtcgtgctgctggtgctctacatcaagcaccggctgacccggatgccggtcgggcgcgcctgggaggcgctgcgcgaggacgagatcgcctgtcgcgcgatgggcctcaaccatgtgctggtgaaactctcggcgttcatgctcggcgcctccaccgcgggactggccggggtgttcttcgccagctaccagggcttcgtcaacccgtcctcgttcaacttcttcgagtcggcgctgatcctcgccatcgtcgtgctcggcggcatgggctcgacggtcggggtggtgatcgccgccttcgtcctcaccgtggcgccggagctgctgcgcagcttcgccgacatccgcgtgctgctgctcgggatactcatggtggtgatgatgatctggcggccgcgcgggctgatccgcatcagccgggtgggcttcgccccgcgcaagggggtggcgccatga

SEQ ID NO: 318179 - DNA, 873 bp, Pseudomonas aeruginosa
atgagcgacaagatcctcagcgtcgagcacctgatgatgcacttcggcggcatcaaggcgctcaacgacgtcaacctcgacgtcgagcgcggttcgatcaccgcgctgatcggccccaacggcgccggcaagaccaccgtgttcaactgtctcaccggcttctacaaggccaccggcggcaacatcctgctcaacacccaggggcgcaccacggacgtcatccaggtgctcggcgagccgttccagctggacgacttcgtcaagccgccgcaactgggcagtcgcctctactacaagatgttcggcggcacccacctggtgaaccgcgccgggctggcgcggaccttccagaacatccgcctgttcaaggacatgtcggtggtggagaacctgctggtggcgcagcacatgttcgtcaaccgcaacctgctcgccggcatcctcaacactcccggctatcgccgcgccgagagcgaggcgctggaccacgcgttctactggctggaggtggtcgacctggtggactgcgccaaccgcctggccggcgagatgtcctacggccagcagcggcgcctggagatcgcccgggccatgtgcacgcggccggaactcatctgcctggacgaaccggccgccggcctcaatccggccgagacccacgccctgagcaacatcgtccgctacctgcgcgaccaccacgggatcaccgtactgctgatcgagcatgacatgggcatggtgatgaacatctccgaccacatcatcgtgctcgaccacggcgacgtgatcgcccgtggcaaccccgaacagatccgccatgacgagaaggtgatcgccgcctatctcggtgccgacgaagaggagctgtcatga

SEQ ID NO: 318180 - DNA, 717 bp, Pseudomonas aeruginosa
atgagcgcggcgttgctggaattccgtgaggtggacgtgttctacgggccgatccaggcgctgaagaaggtctcgctgcaggtcaacgagggcgagacggtgagcctgatcggcgccaacggcgcgggcaagtcgacgctgttgatgtcgatcttcggccagccgcgtgcggcggccgggcagatcctctatcgcggccaggacatccgccagaagtcggcgcactacgtggcgtccaacggcatcgcgcagtcgccggaaggacgccgggtgttccccgacatgagcgtcgaggaaaacctgctgatgggtaccattcccatcggcatggaccacgccgaggaggacatgcagcgcatgttcgagctgttcccgcgcctgaaggagcggcgcaaccagcgcgccatgaccatgtccggcggcgagcagcagatgctcgccatcgcccgcgcgctgatgagccggccgaagttgctgttgctcgacgagccctccctgggcctggcgccgatcgtggtcaagcagatcttccagaccctgcgcgagctggccaggagcggcatgaccatcttcctcgtcgagcagaacgccaaccatgcgctgaagctctccgaccgcgcctacgtgatggtcaccggggaaatccgcatgagcggcagcggcgaagaactgctcggcaaccaggaggtgcgcaacgcctatctcggcggacattga

SEQ ID NO: 318181 - DNA, 933 bp, Pseudomonas aeruginosa
atgcacagcctgcgctttttcagcaacgccgaggtcgccgagcgcctggcttatccacaactgatcgaggcgttgcgcatcggcctggccaagccttgcagcgcgccgctgcgcaactgccatgccttgccggcgcaggcctcgctgctacagatgccggtgtggcaagccggcgcggggatcggcgtgaaactggtgacggtgttccctggcaatggggcgcgtggcctgccggcggtggccgcggtgttcgctctgttcgacggcgaagacggtcgcccactggcgttgctggaggcttcggagctgaccgcccggcgtaccgcctgcagctcggcgctggccgccgactacctggcacgggacgatgcgcggcgcctgctggtggttggctgcggaaccctggctgcgcacatggtgcgggcccacgcctgcgtgcgcgactatcgccacatcgacatctggggccgcgatccggccaaggccgccgcgctggccgcccggctgcgcgaggagggctacccggcgcgagcggccgacgggttgcgcgcggcggtggaggcggccgactgcgtcagttgcgttaccacctcccgcgaagcgctggtgcgcggcgcatggctgaagccgggcgtccatctcgacctggtcggcgccttcctgccgtccatgcgcgagaccgacgccctggcggtggcgcgcgcgcgggtcgtggtggatacccgcgcaggcgcgctggaagaggccggcgacctgttgcaggcgatcgccgaaggcgccatcgggcgcgaggcgatatccaccgaactgcgcgacttgctgggcggggcagggcggcgcggcgatcccggggaaatcaccctgttcaagtcggtgggttatgcgctggaggacctggtcgccgcgcgccgggttgtggataacgccgcctga

SEQ ID NO: 318182 - DNA, 762 bp, Pseudomonas aeruginosa
atgtcgtccaccctgttcatcaccggcgccacctcaggcttcggcgaagcctgcgcccgtcgtttcgccgaggccggctggtcgctggtgctcaccggccgtcgcgaggagcgtctgcaagccctggccggtgagctttcggcgaagacccgggtgttgccgctgaccctggacgtgcgcgaccgcgcggcgatgagcgcggccgtggacaacctgccggaagagttcgccaccctgcgcggcctgatcaacaacgccggcctggcgctgggcaccgacccggcgcagtcctgcgacctggacgactgggacaccatggtcgacaccaacatcaagggcctgctctacagcacgcgcctgctgctgccgcggctgatcgcccacggcgccggggcgagcatcgtcaacctgggttcggtggccggcaagtggccctatccgggtagccatgtctacggcggcaccaaggctttcgtcgagcaattctccctgaacctgcgttgcgacctgcagggcaccggggtgcgcgtgaccaacctcgagccggggttgtgcgagagcgagttctccctggtccgcttcggcggcgaccaggcgcgctacgacaagacctacgccggagcccatccgatccagccggaagacatcgccgagaccatcttctggatcatgaaccagcccgcccacctgaacatcaacagcctcgagatcatgccggtgagccagtcctgggccggcttcgccatccaccgcgaaagctga

SEQ ID NO: 318183 - DNA, 714 bp, Pseudomonas aeruginosa
atgagcaaaccgggccaacgcgtgctggccgagctacgcaagctgatcgcttccggcgaactcgccgccggcgagcgcatcgtcgagattcccaccgccgaacgcctgcaggtctcgcgcatgccggtgcgcatcgccctgcgtaccctcgagcaggaaggcctgctgtgcaagaccgggcgcggctacagggtgcgcgcggtgacccgcgaggatatcgccggcgcggtcgaggtgcgcggcgttctggaaggcctggcggcacgccaggcggccgagcgcgggctgtccgccgaggcacgggcgaccctggaggaatgcctggccgagggcgaccgattgttcgccaacggccaggtcctgctggaggagctggagcgctaccagcgcatgaacatgcgtttccaccgcaccatcatcgaggccagcggcaacccggcgatcgccgtggcgctggcgcgcaacgaccacctgccgttcgcctcggtgagcgccctggcggtggatcgcgacaatctcgagcaggaattccgccgtttcaacttcgcccacatgcagcaccacgcggtggtcgacgcgctggtcaacggccagggggcgcgcgccgaggcgatcatgcgcgagcacgccaacgcgaccctgcgctacgccgactacttcgatccggcgcggcagggtgtcaccgtgcttcacggcgacgtcgccgccgactag

SEQ ID NO: 318184 - DNA, 954 bp, Pseudomonas aeruginosa
atgatcgaggtcatcgtcggcgccatccgcctggaggcgcaggatatccacagcttcgaactgttccgggccgacggggcggccctgccgtccttcgagccgggcgcacacatcgacctgcacctgcccaacggcctggtccgccagtactccctctgcggccccgccgaacggccgcgccactaccgtatcgccgtactccgctgccgcgactcgcgcggcggctcggccacgctgcacgccgaactgcgggtcggccagcggctgcgcatcggcgagccgcgcaatctcttcccgctgtcgccggagcccggtccgcgtctgctgttcgccggcggcatcggcatcacgccgctgctggcgatggccgaacgcctggcccgcgatggcgccgacttccagttgcactactgcgcgcattccgccgagcgcgcggccttcgtcgactaccttggccggtgcgccttcgccgaccgcgtgcactgccacttcgaccacggcgaaagcagccggcgcgcggaccttcgcgccctgctggcgaccagtccgcgcgacgcccagctatacctttgcgggccggcgggcttcatgcagtggatcgaagaaagcgcccgcgaactgggctgggaagcaagccgcttgcatcgcgagcacttcgccgccgcgccacgagacgccagtgcggacggcaccttcgaagtgcagttggcgagcaacggagcgctgatccgggtcgccgccgggcagaccgtgctggcggccctgcgcgaagccggggtggacctgccggcctcctgcgagcagggcatctgcggcacctgcctgacccgcgtgctggacggcgagccggagcatcgcgacctctacctcagcgaagaggagcaggccgccaacgattgcttcacgccctgctgttcgcgttcgcgcagcccacggctggtgctggatctctag

SEQ ID NO: 318185 - DNA, 1056 bp, Pseudomonas aeruginosa
atgtttccgaagaacgcctggtacgtggcctgcacccccgacgaactggccggcaagccgctcggccgacgcatctgcgacgagccgatggttttctaccgaggcgaggacggccgcgtggcggccctcgaggatttctgcccgcaccgtggcgcgccgctgtcgctgggcttcgtcgaggacggcgtgctggtctgcggctaccacggcctggcaatgggcgaggacggtcgcacccgcgcgatgcccggccagcgggtccgcggcttcccctgcatccgtcgcttcccggtgcaggaacggcacggcttcgtctgggtctggccgggcgcggaagaacaggccgacgccgcgctgataccccgcctggaatgggcggaaagccccgattgggcctatggcggcgggctgtaccacatccactgcgactatcgcctgatgatcgataacctgatggacctgacccacgagacctatgtccatgcgtccagcatcggccagaaggaaatcgacgaggccgcgccgaccacgcgggtggaaggcgacgaggtgatcaccagccgccacatgcagaatgtcatggccccgccgttctggcgcatggctctgcgcggcaacggcctggccgacgacgtggcggtggaccgctggcagatctgccgcttcacgccgcccagccacgtgctgatcgaggtcggcgtggcccacgccggccacggcggctaccaggcgccggcggagcgcaaggcggcgagcatcgtggtcgacttcatcaccccggagagcgccacttccatctggtacttctggggcatggcgcgcaacttccaggcccacgaccaggcgctcaccgagagcattcgcgaaggccagggaaagatcttcggcgaagacctggaaatgctcgaaagccagcagcgcaacctgctgcgccatccacggcgcgacctgctgaaactgaacatcgacgccggcggcgtgcaggcccggcgcatcatcgagcgcctgctggcggacgagcgccaggccgccgcccccaaccgcgcccaggcctga

SEQ ID NO: 318186 - DNA, 1335 bp, Pseudomonas aeruginosa
atgaaccgggacttgcgccgcgctctcgacgacgaaccgatgcggccgttccagtggctggcggtggctgtgtgcatcgtgctcaacctgatcgatggcttcgacgtgctggtgatggccttcaccgcatcctcggtggccgccgaatggaaccttggcggcgccgagatcggcctgctgctcagcgccggcctctttggcatggccgccggctcgctgttcatcgcgccctgggccgaccgctgggggcgccgcccgctgatcctcgcctgcctggcgctgtcgggcctgggcatgctcgcctcggcgctgagccaggcggcctggcaactggcgttgctgcgcgggctgaccggactgggtatcggcggcatcctcgccagcagcaacgtgatcgccagcgagtacgcctcgcgccgctggcgcggcctggcggtaagcctgcagtccaccggctacgcgctcggcgcgacccttggcggactgctcgcggtatggctgatcggcgcctggggctggcgctcggtgttcgtcttcggcgctggcctgaccctggcggtgatcccgctggtctgcctgtgcctgccggagtcgctggacttcctcctggcgcgccggccgccgcgggcgttgcaacgggtcaacgcgctggcccggcgcctgggccgcgcggcgctcgcggaactgccgagcccgcccggtggcggagcggagcacggtagccgcctcgcccggttgctttgcgttgcccagcgacgtaccacgctgctgctctgggcgctgtttttcctggtgatgttcggcttctacttcatcatgagctggacgccgaagctgctggtcgccgccggcctgtccaccgcccagggcatcaccggcggcaccctgctgagcatcggcgggatcttcggtgccgccttgctcggcgggcttgccgcgcgctttcgcctggaacgggtgctggcgctgttcatgctgcttaccgccgctctgctcgcgctgttctcgctgagcgccgggctgcccggcgcggccttgccgctgggactgctgatcgggctttgcgccaacgcctgcgtggccggcctgtatgccctggcgccgagcctctacgacgcttcggtgcgcgccaccggggtcggctgggggatcggcgtcggtcgcggcggggcgatcctctcgccgctggtggccgggctcctgctcgacgacggctggcagccgctgtccctctatggggcgttcgcggcggtgttcgtcgtcgcggccgccgtgttgccgctgctcggtgcgcggcgtcgcgagcgctcgccgacgctgggagacgctgcgtga

SEQ ID NO: 318187 - DNA, 897 bp, Pseudomonas aeruginosa
atgagtccgatcgatctcaacctgatccgcaccttcgtcaccctctacgaagccggcagcgtgaccctcgccgcggagcgcctgttcgtcacccagccatcggtgagctacgccctggcgcgcctgcgcgaactgttcgacgacgcgttgttcacccgcacccgcgacggcatccagccgaccttcgtcgccgagcagctctacggcaccttccgcgagtcgctgacgcgcatcgagggcgcggtacagagcgttcgccacttcgatccggcgaccaccgagcgacgtttccgcatcgccctcaccgatctcggcgaagtgggtttcctctcgctgatcctcgaacgcctgacccgcgacgcgccgttcgccgaagtggaagtgctgccgctgcaggtggacgaggtcggcgcctggctgagcagcgccaaggtcgacgcggcgatttgccgccagccggtgcccggcgcgcgcagccagcgggtcctgcacgagcgctacgtgtgcctgctcagcgaccgccacccgcggatcggcgacagcctgagcctggagcagtacctggccgagcggcacatcgtggtgacccgtacctccggccacggcatcgccgaggacgtgctcgaggccatgcaggtgcagcgccgcatcagcctgcgggtgccgcacttctcggtgctgccgaagatcattcccggtaccgagctgctgaccatcctgccggcgcagatcgcctatcgcttcgtcgccgaaggcggcatgcgcatgctcgaactgcccttcaccctgccgccgttcgacgtctccctgcactggcacgagagcagcgaacgctcggcggcgctgaactggttccgcaccaccatcgccgaggcgatcatcgccgcccaacgctga

SEQ ID NO: 318188 - DNA, 1587 bp, Pseudomonas aeruginosa
atgaaaaccgtccattccgcgtcttacgagatcctccgtcgccacggcctgaccaccgtcttcggcaaccccggctccaacgagctgccgttcctcaaggacttccccgaggatttccgctacatcctcggcctgcacgagggcgcggtggtcggcatggccgatggcttcgccctggccagcggccgcccggccttcgtcaacctgcatgcggcggctggcaccggcaacggtatgggtgccctgaccaacgcctggtactcccatagccccctggtcatcaccgccgggcagcaggtgcgctcgatgatcggggtcgaggcgatgctcgccaacgtcgatgccggacaactgcccaagccgctggtgaaatggagccacgagccggcctgcgcccaggatgtaccgcgcgcgctgagccaggcgatccagaccgccagcctgccgccgcgggcgccggtgtacctgtcgattccctacgacgactgggcgcaaccggcgccggccggcgtcgaacacctggctgcgcgccaggtcagcggcgccgcgctgcccgcgccggcattgctggccgaactcggcgagcgcctgtcgcgctcgcgcaacccggtgctggtgctcggtccggacgtcgacggggcgaatgccaacggcctggccgtggaactggcggagaagctgcggatgccggcctgggtcgcgccgtcggcctcgcgttgtccgttccccacccgccatgcctgcttccgcggcgttctgccggcggccatcgccgggatcagccggctgctggacggccacgacctgatcctggtggtcggcgcgccggtgttccgctatcaccagttcgcccccggcgattacctgccggccggcgccgagctggtgcaggtcacctgcgatcccggcgaagcggcacgggcgccgatgggcgacgcgttggtcggcgacatcgcgctgaccctcgaggcactgctcgaacaggtccgccccagtgcgcggccgttgcccgaggcgctgccgcgaccgccggcgctggccgaggagggcggaccgctgcgtccggaaaccgtgttcgacgtgatcgatgcgctggcgccgcgcgacgccatcttcgtcaaggagtcgacttccaccgtgaccgccttctggcagcgcgtggagatgcgcgagccgggcagctacttcttcccggccgccggcggcctcggcttcggcctgccggcggcggttggcgcgcaactggcgcagccgcggcggcaggtgatcgggatcatcggcgacggctcggccaactacggcatcaccgcgctctggagtgccgcgcaataccgcgtgccggcggtgttcatcatcctcaagaacggtacctacggcgccctgcgctggttcgccggggtgctcgaggtgcccgatgcgccggggctcgacgtgcccggcctggacttctgcgcgatcgcccgcggctatggcgtcgaggcgctccacgcagccacccgcgaagagctggaaggtgccttgaagcatgccctggccgctgatcgcccggttttgatcgaggtgccgacgcaaaccatcgaaccctga

SEQ ID NO: 318189 - DNA, 1341 bp, Pseudomonas aeruginosa
atgaacaggcaatccgctgcggcggtgatcgacgctgcccgctttaaccgtactcactggctgatcctcggctgggggtgtttcatcatgctgttcgacggctacgacatggtcatctacggctcggtggtgccacgcctgatgcaggagtggcagctgagcccggtgcaggccggcaccctcggcagttgcgcgctgttcggcatgctcttcggcggcaccctgctggcgccgctggcggaccgtttcggccggcgccgcctggtgatcgccaccaccctgctggcgagcctcgccgccttcctcaccgggcacgcccgcgacccgctggaactgggcgccggacgcttcttcaccggcctggcactgggcgcgctggtgcccagcgcgatcaacctgatcagcgaattcgccccggccgggcggcgcagcaccctggtcacggtgatgtcggccttctactcggtgggcgcggtgctctcggcgctactggcgatcgccatgatccccgcctggggctggcaatcggtgttctacgtggcggtgctgccggtgctggcggtgccgctgatgttgcgctggttgccggagtcggcggcgttcctcgaactcaagggccgccgcgccgaactggacgcgctgctgcgcaaggtcgatcccgactaccggcccggcgccgagcgggcgaacgctgtcgcggccgaagcgccgagcggacgggtcgcccagttgtttgaggggcgccaggcagtgggcaccctgctgctgtgggtggccttcgccatgtgcatgctgatgagctacgggctcaacacctggttgccgaaactgatggccggcggcggctacgccctcggttcgagcctggcgttcctcgtcaccctgaatgtcggggcgaccctcggtgcgttgttcggcggctggctggccgaccgcctcggcgccggccgcaccctggtgctgttcttcgccctggccgcggcctccctggcggccctcggcctggggccaggcccctggctgctcaacggcctgctggtggtggccggcgccaccaccatcggcaccctggcggtgatccatgcctacgccgcgcagttctatccggcctgggtgcgctccaccggggtcggctgggccgccggcgtcggccgcctcggcgccatcgccgggccgatgctcggcggcagcctgctggccctggagctgccgttccagcagaacttcctggccttcgccgcgcccggcgtgatcggcgcgctggcgatcgcctgcatccacctgcggccgcgcgtgccggcggaagcgtccgtcgacgcgacggcgaagaaacccctgtga

SEQ ID NO: 318190 - DNA, 1470 bp, Pseudomonas aeruginosa
atgagcgattcccgttataccgacctcggtctccagcccctggccggcgagtggcgccacggccgggccggccgccggctgaaggtgagcaacccgttcgacggcagcctgctgctggagatcgagcaggccgaccgcgacgacctcgatgccgcctacgccaaggccgccgaggtccagccggcatgggccgcgctcgggccctcggcacgcgcggcggtactgtacaaggcggtggaggtgttcgaccgccgccacgaggagatcgtcgactggatcatccgcgagtccggcagcacccgcctgaaggccgagatcgaatggggcgcggcgcgcgcgatcaccctggagtcggcgtcgttcccggcacgggtgcacgggcgcatcgtcgagtccgacgtgccgggcaaggaaagccgggtctaccgcagcgccatcggcgtggtcggggtgatcagcccgtggaacttcccgctgcacctgacccagcgttccatcgccccggccctggcgctgggcaacgcggtggtggtcaagccggccagcgacacgccggtctgcggcggactgctgctggcgcggatcttcgaagaggccgggctgccggccgggctgttcagcgtggtggtcggccccggcagcgagatcggcgacgccttcgtcgagcacccggtgccgggcctggtgaccttcaccggatcgaccccggtgggccgcaacatcggccgcatcgccagcggcggcgcgcacctcaagcacgtggcgctggagctgggcggcaacagtccgttcgtggtgctcggcgacgccgatctggagcaggcggtgaatgccgcggtgttcggcaagttcctccaccaggggcagatctgcatggcgatcaaccgcatcatcgtcgaggacagcctctacgacgctttcgccgcgcgcttcgtcgagcgggtcaagggcctccgggtcggcgatccgcagcgcgccgataccgcggtcgggccgatcgtcaacgcgcgccagctcgaaggcctgctggaaaagatccgcctggcccgccaggaaggcgccaagccgttgtacgagggcggcgtcgatgggcagttgctggctccgcacgtattcggcgaggtcaccgcgacgatggagatcgcccgcgatgaaatcttcggcccgctggtcggcctgctccgcgcgcgcgacgaggcgcatgcgctggagttggccaacgccagcgaatacgggctgtccagcgcggtgttcagccgcgatctggaacgcgcggtgcgctttgcccgccagcttcgcgcggggatgacccacgtcaacgacattccggtgaacgacgaggccaacgcgcccttcggcggcgagaagaactccggacttggccgcttcaacggcgactgggccatcgaggaattcaccaccgaccactggatcagcgtgcagcacgcgccgcgccagtacccgttctga

SEQ ID NO: 318191 - DNA, 1254 bp, Pseudomonas aeruginosa
atgaaaatccgtcgtaaaaccgcagtcccgcgcaatgcaggggcggtcctgccgatgctcgcctgtcttgccgcgcaagctgccgagggcggcttcctggaggatgcgaagaccgacctggtcttgcgcaactattacttcaaccgcgatttccgcgaccacgatgccggcaagagcctggtggacgagtgggcgcagggcttcatcctcaagttcagttccggctataccccgggcacggtcggcgtcggcctcgacgccatcggcctgttcggcgtgaagctgaacagcggacgtggcaccagcaattccgagcttcttccgttgcacgatgacggtcgcgcggcggacaactatgggcgcgtcggcgtggccgccaagctgcgcgtttcggccagcgaactgaagatcggcgagatgctcccggacattccgctgttgcgctacgacgacggacgcctgctgccgcagacgttccgcggtttcgccgtggtttcccgcgagctgccgggcctggctctgcaggccggacgcttcgacgcggtgagcctgcgcaattcggcggacatgcaggacctgtcggcctggagcgcgccgacgcagaaatcggacggtttcaactacgccggcgccgagtaccgcttcaaccgcgagcgcacccaactgggcctgtggcacgggcaactggaggacgtctaccggcagagctacgccaacctgctgcacaagcagcgtgtcggcgactggaccctgggcgccaacctcggcctgttcgtcgaccgcgacgacggcgccgcgcgcgccggagagatcgacagccataccgtctacggcctgttttccgccggcatcggcctgcacaccttctaccttggcctgcagaaggtcggcggcgacagcggctggcaatcggtctacggcagcagtgggcggagcatgggcaacgacatgttcaacggcaacttcaccaacgccgacgaacgctcctggcaggtgcgctacgactacgatttcgtcggcctcggctggcccggcctgatcggcatggtccgctacggccatggctcgaacgccaccaccaaggccggtagcggcggcaaggaatgggagcgcgatgtcgagctcggctacaccgtgcagagcggtccgctggcgcggctcaacgtgcgcctcaaccacgccagcaaccgacgcagcttcaacagcgacttcgaccagacgcggctggtggtgagttatccgttgtcgtggtga

SEQ ID NO: 318192 - DNA, 2970 bp, Pseudomonas aeruginosa
atgccgggcgccaaccctgcgagcgaagaagtcatgtccctacaacgccctatccccagcctggcgcgccccttgtcgcgcctctccccgctcacccttgccctgcgctgggccctgctcggcctgtcggcggccggcgccggcctgctcggcggcgacctggcccacgcgcagagcgtcggccagcacagcgcggctacccgcctggacgacgccacgccgcgcagctacgacatcccggcgggttcgctgggcgcctccctgggcgccttcgccagccagtcgggcctgctgctgtccttcgaccccgagctgacccgcggccgcacggcgccggcgctcaagggtcgctacagcgtactggaaggcttgcagcgagtcctgtcgaacaccggcctgcaggtcgcggcgggaacctccggcgcctacctgctggtcgagccgcgcatgtccggagaagccccggccgacctgtcgccggtggtggtctcggccgccgagctggccgatccgcagaaggaaacctataccgcgccgcgctcgtcggtgtacctctccagcgaagacatcgaccgcttcggccgggtttccgtgggtgacctgctccagggcatcccgggcgtacaggtcggcgacagccgcaacggtggcgcgctggacgtcaacatccgcggcatccaggggcagagccgggtggcggtgcgggtcgacggcgcggagcaggcgctggacgtctaccgcggctacgccggcacccagcagcgcagctacatcgatcccgacctggtcagcagcgtgaccgtcgacaagggtccctcgacccgctcgggcgcgatcggcggcagcgtggaaatgcgcaccatcggcgtcaaggacatcctggtcgacggcaaggacctcggcgtgcgcttcaccggcgacgtctggaacaacggcgtcgccccgcagcaccgcagcgccagttcgaagaccgagaatctcagcagcgtgccgcacgatgaccgcggcagcctgttcggctcccaggccaagtccggcagcgccgccttcgcctaccgcaacgagcatctggacctggtcgccgcctatgcgcagcgcaaccagggcaactacttttccggcaagaaaggccaggaccgctatcgcgtctacaaccgctacggtcgcgaggaaagcagcgtagccaaggtctacaacgcgggagaggaagtgctcaactcgtcgtcggagaccgagtcctacctgctcaaggcgacctggcgcatcgccgacgagcacaccctggacctcggctatcgtcgctacgacgggcgcaccggggagatcatgccgtcggacatcttccgtttcggcaccgccggcatctaccagtacccattgagcgaagtgaagatcgacacctacaccgcacgctaccgttacctgcccgagaacaatccgctggtggacctcagcaccggactgtggatgaccgacgcgaagagcgacatgctgacctcggtgctggcgccgcgctcccaggcctatcgctccgaccgcaactggacgcgccaggacaaccggcgcatcggcggcgacctgaacaacgtggcgcgcttcgaaaccgacttcggcgatttcaagctcgacctcggcggctcgttccaggtcgaagacatccagccgcagaaaagcgtggtcaccaccctccacgacatcaacgccaaccgcaccctgagggacgccacccgccaggaatacggcctcaacggcaagctcgagttcaagccggtcgagcgcctgacgctatggggcggcggccgctacagccacttcaacagcaaggacaacggcatctccgcctcgccgcggcgcgaggatcgcgacatgcgcttcatcacggtgagcaggcccggctactacggctcgatgatgtggttccccgaccagaacggccagtacaccgacgccaccgatccccgcctcaacaacggcatcgtcaccaacaacaccaacaatccgttcgaaggcattcccttcgacgagttcggcccggccaacgtgacggtccatccctcgcgggtcaccaacgtggtcaccggctacaactacagcaagaagggcagcagccgcggcggcggtttctcgccggcattcgggatcaatttcgagctggccccggataccttcgtctacgcctcctataccgaaggcctgcgtctgccgtcgctgttcgagaccagccagggcaccctccaggtcgagccgggcaaggacctcaagcccgagcgttcgcgcagctgggagatcggtgccagcgcgctgcgcgacagcctgttggccgacggcgactcggcggcgatcaagctggcctacttcaacaacaccatcaagaactacatcacccgctattacgatccgggccagatgggcctgatgaccttcagcaacaccgacagctaccgcaccagcggtctcgaactgcaatcgcactacgacgcagggcgggtgttcgccgacctgtcggcgacctactacctgaagaccgagacctgcgacgccgccttcgccgccaggctgcgcgccggcgccaaccgctaccagcgcaccgagaacacgccgaactgcacgccgggcagcttcatgggctcctataccaacacgcagaacccgccgcggctggcgaccaacctgaccgccggcctgcgcttcttcgaccaggccctgaccctgggcggacgcatgacctatacctccggccccaccgccacggcggacaagccctggcaggtcggcgccaccacaccgcagatcgagtaccgctcggtgcagctgttcgacctgttcctcaagtacaagctgttcgagcacaccgaactgaatgcctcgctgcagaacctcaccgaccgctattacctggacccgctggcacagagtttcatgcccgcgcccgggcgtaccctgcgggtggggatgcaggcgaagttctga

SEQ ID NO: 318193 - DNA, 537 bp, Pseudomonas aeruginosa
atgaatgcgccgagttcctgcctgtccgcggaccgcgacggcgtcgccacgctctaccgtgaaaaccatgcctggctgcgcaactggctggcctaccgactccgctcctggggacgcggcgtggccgacgacctggcccatgacaccttcctgcgcattctcgccagccgcgacggcggccagcgtgaagcgatccgtcagccgcgcgcctatctcacccgtatcgccaactgcgtgctggtcagttggcgccgtcgccaatcgctggaacttgcctggctggaggccctggccacgctgcccgagccgttgcagccgtcgccggaacaacagagcgtgatcgtcgagaccctgcacgagatcgacgcgctgctcgacaccctgcgcccgcgggtgaaacaggcattcctgatggcgacgctggacggcatgaagcagaaggacatcgcccaggcgctgggcgtcgcgctgccgacggtgaagaagttcatccaccaggcctacgtgacctgcctgagcctgatgcccgatgaatga

SEQ ID NO: 318194 - DNA, 1023 bp, Pseudomonas aeruginosa
atgaatgaccgcgcttcccgccgggcgccgcaggcgggcgatacggagctttccgggccgccggccgccgaggcgatcgccccgcaggtgctcagggagaccgcctcctggctgctgctgatgcaggaggggccgctggctccggcgcagcaggccgagctggagtcctggcgctcgcgcagccccgagcaccagcgcgcctggcggcgcgccgagcgtctgctggcgaatatcggttcgctgccgccggcgctggcccggcgtgcgctcgagcgtccgtccggcagcggccggcgcgcggtcctgcgcggcctcgccctgctgctcggcggcgcaccgctggtctggtggggatggcgcgcgcaggtctggcgcgacggcttcggcgccgactacctcactgccgtcggcgagcggcgcgacctggtgctggaggacggcagccaggtcgagatgaacaccgacagcgcgctggacgtgcgctacgacgccggccagcgcctgctgcgcctgtatcgcggagagatctacctccgcaccgcggcggatcggcgcgagccgccgcggccgttcctggtgcgcaccgaacagggcctgatgcgcgcgctgggtaccgccttcagcgtccgacgcgagggcgcagagacagtgctggcggtgtacgaaggcgcggtccaggtgcgtccggagggcgccgcgagcgcggcggatggccgggtgatcgaggctggccagcgggtgcgcttcgatcgccagcggatcggccccgtcgagtccgccagcgaggccgcgctggcctggcgccagggcctgctggtggccgacgacatgccgctgcggcagtgggcgggagaactgatgcgctacggcggcgagagcatcgagtgcgagccgtcgctggacccgcttcgtgtctccggcacctttcccgtcgacgacctgccgctggccctggcgatgctggcacagacccatggcctgcgcctcgtgcaccaaggccgacgggtgctgatcaggcgctga

SEQ ID NO: 318195 - DNA, 573 bp, Pseudomonas aeruginosa
atgaaactgcccaagctgctcgccgccctcgccctgctcgccgctccggcgctggccttcgcccaccccggccacggcgaacacggcctggtcgccggcctcgcccatccgctcaccggcctcgaccacctgctggcgatgttcgccgtcggcctctgggccgcccagcaacagggagccgcgcgcctcgccctgccctgcaccttcgtcggcaccatgctggtcggcgggctgctcggcttcgagggcctgcaactgccattcatggaaaccggcatcgccgcctcggtactcgccctcggcctctgcgtggccctcgccgtgcgcccgccgctgccgctggcgatggccgccaccgcgctgttcgccctggcccacggggtcgcccacggcctggagctgccggccctctccagcccctggctgtacgcgctcggtttcgtcgccgccaccgccgcgctgcacgccgccggctacgcgctggtgcgcttcctgccgcaggcggccgcgcccctggtacgtctcgccgggctggcctcggcgggcgccggggtctggttgctggccggctga

SEQ ID NO: 318196 - DNA, 615 bp, Pseudomonas aeruginosa
atgacatcccaacccctgcgtgtcggcatcggcggtccggtgggctccggcaagaccgccctgaccctggccctgtgtcgcgaactgcgcgagcgctacaacctcgcggtggtcaccaacgacatctatacccaggaagacgcggagttcctggtgcgcaacgaggccctcgcccccgagcggatcatcggcgtggaaaccggcggctgcccgcacacggcgatccgcgaggacgcctcgatcaacctggaggcggtggaccagctcaaccggcgcttccccggcctcgaactgatcctggtggaatccggcggcgacaacctgtcggccaccttcagccccgagctgtccgacctgaccctctacgtgatcgacgtttccgccggcgacaagatcccgcgcaagggcggccccggcatctgcaagtcggacctgctggtgatcaacaagatcgacctggcgccgctggtcggcgcctccctcgatgtgatggaccgggacgcccggcgcatgcgcggcgacaagccgttcgtgttcagcaaccagaagaccggccaggggctggacgaaatcatcgccttcatcgagcgccagggcctgctgaccgccgcctga

SEQ ID NO: 318197 - DNA, 672 bp, Pseudomonas aeruginosa
gtgaacagcatctgggcgcgcctgcgcctggccagctcgcagttgccgatcggcggatacagctattcccagggcctggaggcggccctcgacaatggctgggtgcgcgacgccgagagcgcgcggacctggctggtcgaccagctgcaactgaacctggcgcgcttcgaggcgccgctgctggctgacctgctgcgcgccgcgctgatcggcgactgggccgcctgcgatgcggccagcgaacgccatagggccagccgcgagacccgcgagctggcccaggagagccggcagatgggcttttccctgcaccaattgctggaagccctgcccgagctcgacgctcccggccgcgcctggctggcgcgccaggacccgcccaatctcgccgccgcctgggcgatggccgcgcgcgcctggcgcctggacgccgaggaggcgctgagtgcctggttctggagctggctggaaaaccagttggcggtgctgatgaaaaccctgccgctcggccaactggccgcgcagaaacttgcttccagcctactgccggaactcgaccgcgcctgcgccgaggcgctgcggcggcccgccgtcgagggcagcgccgcgttcggcctggcgctggccagcatgacccacgaaacccagtacagccgtctgttccgttcctag

SEQ ID NO: 318198 - DNA, 504 bp, Pseudomonas aeruginosa
atgctggtcatccaccaacgcctgcccgcccgctcgccccgctgggacgaagaactccacctgacctacgaggcgcgcagcaagagccgcctgcgctgcttcgcggcgagcggcgaggaggtcggcctgttcctcgagcgcggccagccgccgctggccgacggcgactgcctggaggcccgcgacggtcgcctggtgcgggtcgtcgcccgctccgaacgtctgctccacgtcacctgcgccagcccgctggaactgacccgagccgcctaccacctgggcaaccgtcacgtcgccctgcaggtcggcgacggctggctgcgcctgctcgacgactacgtgctgaaagccatgctcgaacagctcggcgccacggtggaggccatcgaggcgccgttccagccggagcacggtgcctacggcggaggccaccaccactcgcaccatggcgaggcggagttcaactacgcgccgcgcctgcaccagttcggcgtgcgccggtga

SEQ ID NO: 318199 - DNA, 630 bp, Pseudomonas aeruginosa
atgtcctcaccccgcgccgaacagaaacagcagacccgccacgcgctgatgagcgccgcgcgccacctgatggaaagcgggcgcggcttcggcagcctcagcctgcgcgaagtgacgcgcgccgccggcatcgtcccggccggcttctaccggcacttcagcgacatggaccagctcggcctggcgctggtcgccgaagtcgacgagaccttccgcgccaccctgcgcgcggtgcgccgcaacgagttcgaactgggcgggctgatcgacgcctcggtgcgcatcttcctcgacgcggtcggcgccaaccgctcgcagttcctcttcctcgcccgcgagcaatacggcggctcgttgccgatccgccaggccatcgccagcctgcgccagcgcatcaccgacgatctggccgccgacctggcgctgctgaacaagatgccgcacctcgacggcgcggccctcgacgtgttcgccgacctggtggtgaagaccgtcttcgccacccttccggagctgatcgacccacccgccgccgatctgccgccgcacctgatgccggccgcgaagatcacccaccagctgcgtttcatcatgatcggcggcaagcactggcacggcctgcccggctga

SEQ ID NO: 318200 - DNA, 1101 bp, Pseudomonas aeruginosa
atggccttgcttcccctcgcgctcctgacccctttgctcgcacccctgcgccgtctcgccgcccgtggctggctgcgtgaggccgatgtcgacggcctgctgcgccacgcccatccgctggcgtcgttgaaccgccactatgcgcgggtcgaggcacgctactgggtggccgacgatatgctcgccctggccctgcgtaccgcccccggctggccgccggcgcggccgggccagcacatccagctgctggcggagcgcgacggggtgcgggtcgggcgcagctacagcctgacccgggtggtcggcgagcgcctggaaatcgccgtcaagcgtcacccggacgggctgctctcgccctggttgtgcgaacacctggcggtcggccagcgtgtcgagttgcaacccgcgcaaggcgatctgcgctggccgatgcaggccgaggcggtctgcctgctggccgccggcagcggcctgacgcccttgctcggcctgctccgcgaggcgctggagaacggctatcgcggtcccgtgctgtggctgcactacgcccgtcatcccggccagcgcgcctggctcggcgagctggaggcgctggcggcgcgccacccgaacctggagttgcgctggagcctgacccgcggggcgcgggccgatggctgcctggaggggcatttccagccgcgccacctggacggctgggcagccgacctggcgcgcagccaggccctggcctgcgggccggcggctttcgtcgaggcggtgggcgagcaactgggggcacgcttcgccggcttgcagacggaatccttcagcgtcccgcgctggcgcagcggggaggcgccgcgcgaagtgcgcctgcgcttcgcccggtcgcagcgggaagtctccggcgacagcaccgccagcctgctggaacaggccgaggcccacggcctgcgcccggcccacggttgccgccagggcatctgtgccagttgcacctgcgtcctgctcagcggctgcgtgcgcgacctgcgcagcggcgcgctgtgcagcgagcccggccagcctatccgcctctgcgtcagcgccgcccacggcgacctggcgctggacctgtaa

SEQ ID NO: 318201 - DNA, 1089 bp, Pseudomonas aeruginosa
atgcgcgacgaccgcgaactgaccccggaacaactggcggccttcggagccgaactcgacgccctgcgccagcgtaccctggccgatctcggcgcggacgacgcgcgctacatccgccgggtccgcgcggcggtgcgcgtctgctgctggagcggcagggcgctgctgatgttcggctggctgccgccgacctggctgctcggcagcctgcttctcggcctgggcaagatcctcgagaacatggaactgggccacaacgtcatgcacggccagtacgactggatgaacgatccggaattcgccggccgcgcctacgagtgggacatcgccgggccgtccgacttctggcggcacacccacaaccatgtccaccacacctacaccaacgtgctgggcaaggacgacgacgtcggctacggggtcgtgcgcctgttcccggagcagcgctggaagccgttctaccgctggcaaccgctgtgggtgacgctgcaggcgctgctgttccagtacgcggtggcgatccagcatctgcgcctggacaagtacgccaaggggcgcctggacaaggccgaactcatgccgctgctacgccgcctgcgtgccaagctgggtcgccagtggaccaaggactacctgctgttcccgcttctcggcctgttcgccggcggcttcggcgcggtgttcgtcggcaacctgctggccaacgtgctgcgcaacctgtggaccttcacggtgatcttctgcggccacttcaccgagaaggcggtggtcttcccgccctcggtgctggagggggagacccgtggccactggtacctgcgccagttgcgcggctccagcaacctggagggcgggccgctgttccacatcctgaccggcaacctcagccaccagatcgagcatcatctctacccggacctgccggcgcgtcgctacgccgcgctgtcccgcgaggtccgcgaaatcgcccggcgctacgggcagacctacaacagcggacgcctgggacggcaattcctcactgtcttgcggcgcatctgggtatatcggctgccgccgcgcgagccgctcccggcggggcgcagctga

SEQ ID NO: 318202 - DNA, 1317 bp, Pseudomonas aeruginosa
atgttcagcccgctcgtcacctttcccgcgctctacaccgccaccctgctcatgctggccggctccggcctgttcaccacctacatcggcctgcgcctgacccaggaaggcgcaggcgacctgtgggtcggcgggctgatggcgtcctactatttcggcctggtctgcggtggaaaattcggacacaagctgatcgccagcttcggccatatccgctcctacgtggcttgcgccgggattgccaccgtgaccgtgctgctgcatgccctggtcgatcagctggaagtctggctgctgctgcgcttcatcaccggcgcggtgatgatgaaccagtacatggtgatcgagagctggctcaacgagcaggccgagagccaccagcgcggcaaggtgttcgccggctacatggtcgccgtcgatcttggcctggtgctcggccagggcctgctggcgctgagcccgaccctcgactacaagccgctgctgctggtcgccatctgcttcgcctcgtgcctgatcccgctggccatgacccggcgcgtgcacccggccaagctggtcgccgcgccgctggaagtgcgtttcttctggcagcgcgtgccgcaggcgctgggcaccatcttcatcgccggcctgatggtcggcgccttctacggcctggcgccggtctacgccaaccgcaacggcctggatgcctcgcaatcgagtttcttcgtcggcatgtgcatcgtcgccggcttctgtgcgcagtggccgctgggttggctgtccgaccgcctcgaccgcagttggctgatccgcggcaatgcggtgctgctgtgcctggcctcgatcccgatgtgggggctggtgacgctgccgtactggttgctgctggccaacgggttcgttaccggcatgctgctgttcaccctctatccgctggcggtggcgctggccaacgaccacgtcgagcagccgcgccgggtcgcgttgtcggcgatgctcctgaccacctacggggtcggcgcctgtatcggtccgctggtggccggcgcgctgatgcgccacttcggtccgggactgttctacatgctggtgtccggctacgcggtgctgctggtgttctgggtgcagcccaagcgcgtcaccggcgaacaccgggtcgacgaggcgccgctgcaacacgtggcgatgccggacacggtcagcccgatggccgccaccctcgacccgcgcgtcgaggaagtgccggaggagctggtggtggaggcgccggcgaatatcggccgctccgacggcgagccggacgccggcgagaaacccgctcagtcctga

SEQ ID NO: 318203 - DNA, 1392 bp, Pseudomonas aeruginosa
gtgcccgcccgccgctccctgaccctctacgcggcgctgctgttcgccgcggtggcggcgctggtggtcagcgcggtcggcttctacctgtaccgctcggtggaagaggcgatgctgcggcgcagcgacgtgatggtcgccggccgggtcgagcacttccgcaacctgctgcgcgacaacctcaccctggccgagctgaaggcgcgcccgcgtctgttcgagaacatgctcggcaacgagcaggacatcctgctcctcggtcagcccggcgaggcgccgatcgtcgcggtcaacccgcgccacgaacgcctgccgtcgctacgggtggtcgccgccggccaggcgttgaatccgtccgtcgtgcacgccgcgctgacccacgacggcatcccgatgcgcgtgctcgccgccgaggtcctggtcggcggccgcgagccgttgcagatcaccgccgcacacctgctgctgggcgagacgcggatgctcgcccagtaccgcgaccgggtcatcgccgccgtgctgctggcgttccttggcaccgccctgctcggctggctggtcctgcgccacggcctgcgcccgctgcgcacgctggcggcgaaggcggcggagatccatccgaccagcctggatacccgcctcgacgtcgccgccgcgcctgccgagttgcagcaggtggcacagtcgttcaacgccatgctcgaacgcctagacgacggctaccagcgtctgcagcagttctccgccgacctcgcccatgagatccgcacgcccatcggttcgctgatgggccacggccaggtggccctgcgccagccgcgcagcaacgaggagtaccaggcgctgatcgcctccaaccaggaagagctggagcgcatcgcgcggatggtcgagagcatcctgttcctcgctcgcgccgacgacgtacgggcagcggtggagcgcagccgcctggacctgggcgaagaactgcggcgccaggcggagtatttcgaagggctggccgaggaacgtgggctgagcctcgacgtccaggtcagcggccagctacgcgccgatccgcaactgttccgccgggcgctgagcaacctgctggccaacgccatccgctacgccagcgccgacagcctgatcgaagtgcgcggcctgcgccgatcgggggaattcctgctgagcgtggagaacgcctgcgacaggctgccggccgaaccgctgtcgcgcctgttcgaccgtttctaccgtggcgacgccgcgcgcagcgacgcccagtccagcggtctcggcctggccatcgtccaggcgatcatgcgcctgcacggcggccgcgccgaagcgagtgcaccggctccgggacgcatccgcttcgacctggcgttcccggctcaggactga

SEQ ID NO: 318204 - DNA, 798 bp, Pseudomonas aeruginosa
atggtcgccccgccggcggtacccggagatgactttcgcatgacaaaaatgtcaccgaatccgcgccgcgcgctggctagaatggcggcgaacgagggggaacgagacatgcgcatcctggtgatcgaagacgatacgaagaccggcgagtacctgaagaagggcctcggcgagtcgggctatgcggtcgactggtcgcagcacggcgccgacggtctctacctggcgctggagaaccgctacgacctggtggtcctcgacgtgatgctgcccggcctggacggttggcagatcatggaagtgctgcgcaagaagcacgatgtgccggtgctcttcctcaccgcccgcgaccagctgcaagaccgtatacgcggcctcgaactgggtgctgacgactacctggtgaaacccttctccttcaccgagttgctgctgcgtatccgtaccctgctgcgccgcggcgtggtccgcgaggcagagcaggtgcaactggccgatctgcatctggacgtgctgcggcgcaaggtcagccgccaggggcaggtgatcgccctgaccaacaaggagttcgccctcctgcacctgctgatgcgccgcgagggcgaggtgctgtcgcgcaccctgatcgcctcggaggtctgggacatgaacttcgacagcgacaccaacgtcgtcgacgtggcgatcaagcgcctgcgcgccaaggtcgacaatcccttcccgaacaagctgatccataccgtgcgcggcatcggttacgtctgcgaggagcgcccgtgcccgcccgccgctccctga

SEQ ID NO: 318205 - DNA, 624 bp, Pseudomonas aeruginosa
atgcttcgactcaaggcttcccccgcgctgttcttcggcctgctcctggccagtgccgccagcttcgccgcgcaaccgcctgcgggcatgctgcagccgctgcgcggcaccatccagcaggccgccgacgaccacctgcaactgaaggcccgcaacggccagcaactgacggtcaggctcaccgacaagaccgcgatccgcgccgtgtcgctggcgaagccggaggacatccagcccgacagcttcatcggcaccgccgccgtgccgcagcccgacggcaccctgaaggccctcgaggtgcatgtcttcgcccccagcctgcgcggcagcggcgaaggccaccggccctgggagaacgccgatggcagcgcctcgaccatgaccaacggtacggtcggcaacctggtggtcagccagggccggcgcatgaccgtgaaatacggcgatggcgagaagaccgtggtggtgccggacgacgtgcccatcgtcagcctggagccgggcgagcgcagcctgctcaagcctggcgccaaggtcgtgctgttcccgcagaagggcgccgacggcagcctcaccgccctggccatctcggtcggcaaggacggcgtgaccccgccgatgtga

SEQ ID NO: 318206 - DNA, 615 bp, Pseudomonas aeruginosa
atgaaccgtgcgttgcacgcctggccggtgagactctgccactggctcaatgcctatgccatggcctgcctgatcggcagcggctggggcatctacaacgcttcgccgctgctggatttccgttttcccgcctgggcgaccctcggcggctggctcggcggttccatcgcctggcatctcgccgccatgtggctgctgctcggcaacggcctgtgctacctcgcctacggactgtccagcgggcattttcgtcgcgacttcctgcctttgagcgcggccggcgtctggcgcgacctgcgcctcgccctcggcctgcgcctggtccatgagccgggccgctacaacgcggtgcagcgcctgttgtactggctggtcctggcgctcggtgcgctgctggtgctgtccgggctggcgatctggaaaccggtgcaactgcacgggctgaccgcgctgttcggtggcttccagggtgcgcgctgggtgcatttcctggccatggccggggtcgtcgggttcgtcgtcgtgcacctgctgctggtgctgttggtgccgcgcaccctgctgccgatgatcatcggacgcgagtggcggcgcggacggaggagcgaaggatga

SEQ ID NO: 318207 - DNA, 768 bp, Pseudomonas aeruginosa
atgaaggggccggagaagaaacgcgcgaagatcgcggtcgacccgtccagcgagcggcagatggtcgatttgcaacgccgcctgctgttgcgcggcggcctgtccctgggcgccctggcgatgctctcggggtgccggctacaggatggcgattcggtcgacaaggtactctgggccatgtcgcgctggaacgaccgggtccaggcctggctgttcagccgtatgcggctggcgccgaccttcgatccgtcgcaggtggcctcgccgttccccttcaacgcgttctacccggcctacaacgtgccggagatcgacctgccggaataccgcctgcaggtttccgggcgggtccgcgacaagcgcccctggagcctggagcaactgcgccggctgccgcaggccagccaggtcacgcaactgatctgcatcgagggctggagcgcgatcggccagtggagcggagtgccgctgcgcaccttcctggagctggtcggcgccgacacctcggcgaagtacgttggcttcaagtgcgccgaccgctactactccagcctcgacatgcccagcgcgctgcatccgcagaccctgctggcgctggagatgtccgggcaggcgctgccggaggagaacggctatccgctgcgcctgcggattcccaccaagctcggcttcaagaacgccaagcacgtggtggagatcttcgtcagcaacagcaatcccggaggttactgggaggaccagggctacaactggttcagcggagtctga

SEQ ID NO: 318208 - DNA, 273 bp, Pseudomonas aeruginosa
atgaaagcttccctgatcctcggcctcgccctcgccaccctgaccgccaacgccgccttcgccgccgatggctccagccgcaccatcgaccggctgcaccaggacatgtccagcgtcgaactgcgcatcgccgacaacggcagcgagcagaccgtcgaccgcctgcacaaggacatgaccaaggccgaagcccgcctggccgacaacggcagcgaacagaccgtggaccgcctgcatcgcagcatgagccgtttcgacctgcgcaccgcctga

SEQ ID NO: 318209 - DNA, 534 bp, Pseudomonas aeruginosa
atgaccaccgttcaactgacggacgtccagacccttcgcgaccgtgcccgcaagaacatccaggaaggcgcggtcaccgaaggctattcggccgatcgccagaccgtcctgcgcctgctcaacgaagcgctcgccaccgagttggtctgcttcctgcgctacaagcgccactacttcatggccaccggccttaaggcgagcatcgccgccgccgagttcctcgagcacgccaaccaggaaatgcagcatgccgaccagttggccgagcgcatcatgcaactgggcggggagccggacttcaatccgcgcggcctggaggagcgctcccatgccgaatacgtcgaaggcaagaccctgaaggacatggtcaccgagaacctgatcgccgagcgcatcgccatcgacagctatcgcgagatcatcacctacctcggtaacgacgaccccaccacccgacgcattttcgaggaaatcctggcccaggaagaagaacacgcggacgacatggccgacatcctcgacgacctcgcctga

SEQ ID NO: 318210 - DNA, 2070 bp, Pseudomonas aeruginosa
atgacgcgcggccgaaagatcctgacctggagcctcgccagcctggtcctgctgctggcggcgttggtggtgttcatcgccaccttcgactggaacctgatcaagcccaccctcaacgaaaaggtctcggcggcgctgaaccgcccgttcgccatcaacggcaacctcgccgtggcctggcgccgcgaggagggcgaggaaggctggcgcgcctggatcccctggccgcgcttcagcgccgaggacatcaccctcggcaacccggagtggacggcgggcaagaccaaggcgagcgagttcgccagcctggaacgcatcgaattccgcctcgcgccgttgccgttgctctggcagaccatccgcattccacagatcaagctgacccagccgcgcgccgagctcctgcgcctggccgacggccgcgccaactgggatttcgacctgcctgccagcgacagcgacgagccgtccgcctggcaactggacatccgcgagatcggtttcgacaagggtagcgtcagcctcgacgaccagcgtttgaagacccgcctggaagtgctggtcgacccgctcggcaagccggtgccgttcggccagttggccggcaaggcgctggccacgggcgatgcggcgaacgcccaggactatgtgttcggctggaaggtcaagggcacctacaagggccaggctctggccggctcgggcaaggtcggcgggatgctggcgttgcaggatgggagcaagcccttcccgctacaggccgaggtcagtgccggcagcacccgtgccgcggtggtcggcaccctgaccgacccgctcaacctcggcgccctcgacctgcgcctgaagctgtccgggaccagcatggccaatctctatccgctgaccggcatcaccctgccggacactccggcctactccaccgacggacacctgctggcgcggctcaaggaggagggcggcgcactgttccgctacgagaacttcaacggcaaggtcggcgccagcgacctgcacggcagcctgaccttcgtcgctcgccagcctaggccgaagctgtccggcaagctgacctccgagcaactgcgcttcgccgacctcggcccgctgatcggcgccgacagcaatgccgaaaaacagaagcgcgggcagaccagccgccagccgggcgacaaggtgctgccggtggaggaattccgcaccgagcgctggcgcgacatggacgccgacgtggaattcaccggcaagcgtatcgtccacagcgaccagttgccgatcagcgacctctatacccatctggtgctcaacgatggcctgctgcgcctggagcccctgcgcttcggcgtggccggcggcaagctggagtcggacattcgcctcgacggcggcaagcagccgatgcagagccgagtgaagatgagcgcgcggggcttcaagctgaagcagttgttccccggcttcgcgccgatgcagaccagcttcggcgagctgaacggcgacgccagtctcagcggcagcggcaattcggtggcgaagatcctcggtggcgccgatggcgaactgaagatgctgatcaacgacggtgcgatcagcaaaggcctgaccgaaatcgccggcctcaatgtcggaaactacctggtgaccaagctgttcggcgacgacgaggtgaagatcaactgcgcggccgccgacttcggcctgcagaagggcctgatgaccagccggctgttcgtcttcgacaccgagaacgcgctggtcaacgtcgacggcacggtgaacttcgccaacgagaagctcgacctcgatgtcaccccgcacagcaagggcctgcggatcttctcgctgcgctcgccgctgtacgtgcgcggcaccttcgccaagcccgacgccggggtccacgccgggccgctggtggcgcgcggcgcgggaatgatagccctcggcgtgacggtgggcccggcggccagcctgctggcgctggtggcgccgagcaaaagcgacgacaaccagtgcaccgcgctgctgcagcgcatgcgcttgccagccaaggtgccggccggcaagcgctga

SEQ ID NO: 318211 - DNA, 813 bp, Pseudomonas aeruginosa
atgctcaccatcggccaactggcgcgaatcttcgagatctccaccaagacgcttcgccactacgatgccatcggcctgttcgtccccgcgcgcaccggtagcgacaacggctaccgctactaccagccggaacagatcgagcagctctcgcgcatactcgcgctgcgccggctggacgttccgctggaagccatcgaccgcctgaaacgcgatggcgcgctggacgacccgcaacgcctgcggcatttcctgcaacgacaccagcacaccctgcgcgaagagatcagcgcccgccagcgcctgctggcggaactcgaccgaaccctggcgaagctcgcccactggaggatccgcaacatgcatgcacgaatcgtcgaacgtcccgccttcagcgtggtgggcatggaatacttcggcagcgcccccggcgacaccatcggccagctctgggaacgcttcatcccgcgcgagcacgagatcgccggcaagcacgatcccgaggtctcctatggcatctgcgcgcagcagcccaacggcgaattccactacgtcgccggcttcgaggtgcaggagggctggccggtgccggagggcatggtgcgcttccaggtgccggcgcagaagtacgcggtgttcacccacaagggcacggcgccgcagatcgccgagagcttccaggcgatctacagccacctgctcgccgaacgcggcctggagcccaaggcgggggtcgacttcgaatactacgaccagcgtttccgcggaccgctggatccgaactcgcaagtcgacctgtatatccccatctactga

SEQ ID NO: 318212 - DNA, 408 bp, Pseudomonas aeruginosa
atgccccgtggcgacaagagcaagtacagcgacaagcagcagcgcaaggccgagcacatcgaggagagctacaaggccaagggtgtgagcgaatcggaagccgaggcgcgcgcctgggcgacggtgaacaagcagtccggcggcggcgagcgcaagggcggttccggccgcgccaagagcgagacggccaagcgcgccgaccgcaaggactcggcccatcgcgccgcccaggcccgctcagggagaccggccaaccgcggctcggcgagccgtggcaaacgtcaaggcagcacctcggtgagcgagatgacccgcgaggaattgatgcagctggcgcgcaagcgcgacatccgcggtcgttcgacgatgcgcaaggccgaactgatcgaggccctgtcccgggcctga

SEQ ID NO: 318213 - DNA, 345 bp, Pseudomonas aeruginosa
atgtacaagcagtcactggcggcactgttcgtgatggcaaccctggccggctgcgcgtcgaccaaggtgcagaacccggtcaactacatcaccttccgcaacgaaccgctggtcaaggatgtcgagaaaggcatgagccagcaggaagtcctgcgcatcggcggcacgccttccgacacccagaagcgcctgatgaaaccggggagctgcaacagctacatcctcaacaaggacggccagcagcagccgttctacgtcagtttcgacggcagcggcaaggtcgacggctcgggcttcctgagctgctccgagctggaccgccacgagcgcgacgcccgcccctga

SEQ ID NO: 318214 - DNA, 540 bp, Pseudomonas aeruginosa
atgcaacaggtcatcgcggtgagcctctgcgccacccacgcgttcagcaagcaggtgcgtcccgccatccgcctcctgaaaggcctcggcatcgagggcgacgcccaccacggcgtcaccgtgaagcaccgctcgcgggtgcggcaggacccgacccagccgaacctgcgccaggtccacctgatccacgaggaactgcacgacgagctacgcgccagcggcttcgccatcggcccggggaccatgggcgagaacatcaccacccgtggcgtcgacctgctcggcctgcccaccggcacccgcctgcgcctgggggaaagcgccctggtcgagctgaccggcctgcgcaatccctgctcgcagctggacaactaccagcccggactgaccgccgccgtgctcggccgcgacgaacagggcaacctgattcgcaaggccggggtgatggcgatcgtcctggaagacggcgaggttcgccccggcgacgccatcgatatccagttgccccccttgccgcaccgggccctggagaaggtctga

SEQ ID NO: 318215 - DNA, 417 bp, Pseudomonas aeruginosa
atgaatatcctgcgtatcccgatgttcgtattggccatggccgtctcggcccatggtttcgctgccaccgcgcagcaggagaagatgaccgcctgcaacgccgaggccaccaccaaggcgctcaagggcgacgaacgcaaggcgttcatgagcggctgcctgaaggccggcgcgcctgccggcggcaaggccaccgcccagcaggagaagatgaagagctgcaacgccgacgccagtgccaagtcgctcaagggcgacgaacgcaaggcgttcatgagcagttgcctgaaggccggcggcagcgccaaggcggcgacccagcaggagaagatgaagacctgcaacgccgacgccaccgccaaggcgctcaagggcgacgaacgcaaggcgttcatgagcacctgcctgaagaagtga

SEQ ID NO: 318216 - DNA, 1266 bp, Pseudomonas aeruginosa
atgaacccgagcaccgccgcccgcgccctgggcatcgattttggcacctccaactccaccgtcggctggtggcggccggaggtcgaaccgctgatcgagctggaggacggcaagatcaccctgccctcggtggtgttcttcaacgtcgaggagcgccgcccggtctacggccgccaggcgctcggcgagtacctggagggctacgagggccggctgatgcgctcgctgaagagcctgctgggctccaagctgctgaagagcgagaccaccgtgctcggcagcgccctgccgttcaaggacctgctcggcctgttcatcggccagctcaaggcgcgcggcgaggccgccgccgggcaagccttcgacgcggtggtgctgggtcgcccggtgttcttcgtcgacgacgacccggaggccgaccgcgaggcccaggacaccctggtgcaggtggccaacaagctcggcttcaaggaggtttccttccagtacgaaccgatcgccgcggccttcgactacgagcgctgcatccagcgcgaggaactggtcctgatcgtcgacatcggcggcggcacctcggacttctccctggtgcgcctggcgccggagcggcgcaacctggccgagcgccaggacgacatcctggccaccggcggcgtgcacatcggcggtaccgacttcgacaagcagctcagcctggaaggcgtgatgccactgttcggctacggcagccggatgaagagcgatgccttcatgcccaccagctaccacctgaacctggccacctggcacaccatcaacgcggtgtacgcgcagaagtcgcaattggcgctgaagaacatgcgctacgacatcgtcgacagcaccggcatcgaccgcctcttcaggctcatcgaggaacgcgccgggcactggctggcgatgcaggtggaagacagcaagatccgcctgaccgaaaccgagcgcctgcacctctcgctggagcgcatcgaggccgggctcggcgtggagctgacccgtgggctgttcgagaacgccgtcgacggactgctggagcgcgtgcgcaacagcgtcgcgcaactgctggcctcggccggggtcgacccggaccgggtcgacacggtgttcttcaccggcggttcgagcggcattccggcgctgcgccggagcgtctcggcgatgctgcccaacgcccgtcatgtcgagggcaacctgttcggcagcatcggcagcggcctggccatcgaggcgaagaagcgctacggctga

SEQ ID NO: 318217 - DNA, 831 bp, Pseudomonas aeruginosa
atgtttcgcgcgctgttggactcctcccgttgctaccacaccgcttccgtgttcgatcccatgtcggcgcgtatcgccgccgacctcggcttcgagtgcggcatcctcggcggttcggtggcttccctgcaggtcctggcggcgccggacttcgccctgatcaccctcagcgaattcgtcgagcaggccacccgcatcggccgggtggcgcgcctgccggtgatcgccgacgccgaccacggctacggcaacgcgctgaacgtgatgcgtacggtggtcgaactggagcgcgccggaatcgccgcgctgaccatcgaggacaccctgctgccggcgcagttcgggcgcaagtccaccgacctgatctgcgtcgaggaaggcgtcggcaagatccgcgcggccctggaggcgagggtcgacccggcgttgaccatcattgcccggaccaacgccgaactgatcgacgtcgatgcggtgatccagcgcaccctggcctaccaggaagccggcgccgatggtatctgcctggtcggcgtgcgcgacttcgcccacctcgaggcgatcgccgagcacctgcacatcccgctgatgctggtcacctacggtaatccgcaactgcgcgacgacgcccgcctggcgcggctcggcgtgcgtgtcgtggtcaacggccacgccgcctatttcgccgcgatcaaggcgacctacgactgcctgcgcgaggagcgcggtgcggtggcctcggacctgaccgcctcggagctgtcgaagaagtacaccttccccgaggaataccaggcctgggcccgcgactacatggaagtcaaagagtag

SEQ ID NO: 318218 - DNA, 702 bp, Pseudomonas aeruginosa
atgggcgttcgcccgcggctttgcaagggcggcgcgaccatcggcctggcgtggcacaatcgccagccaagcctggaggtacaccgcatgatgggaccgttccgccgcctcgcccacctgatcgaccagggccgccagctcgacgccgcgctcgccggcgatccgttcgccctgccggcgccggaggaccgctatagcgtccggcaactgcacggcctgtatccgcgccgtcatcccggtctctacgcaccgctgctcggcagcctggcgctgctgctcggtgccgcgccgctgggtcttgccgcgctgcgcctggcattgccggaggctcctttgcggccgctgggctggctctccgccctgccgctgctggcggcctggctgtggctgatcgccctgctctcccgtggcgccagcctcggcccgcgcctggcccgcgacgccagcctgctgctggtcgccaccgggctcctgctgcgcctggccagcggcgagacgtcgggcctggtggcgctcggcggcggcgcctgtgcctggctgctgttcaacagccgggcgatgcaacgctacatggaactggtctacgcccagcgcctgtaccgcgcccagtcggccaaccgccccggttcggcgcagcggcgcctggccaaccaggccgcctaccgcgaacgcaagcgacgcgagcgctccgagcgatcctga

SEQ ID NO: 318219 - DNA, 267 bp, Pseudomonas aeruginosa
atggccagcgggtgggcgaacgacggtgcggtgcaggaacagatcgacagcacgatcgaggatgccatcgctcgtgcgcgcagccagttgcctcgtggcgagagcctgacccattgcgaagagtgcgacgcgactatccccgaagcgcggcgccgagcgattcccggcgtgcgcctgtgcgtcaactgccaggccgagcacgacagggaacaggcgaagttcagcggctacaaccgccgcggcagcaaggacagccagttgcgctga

SEQ ID NO: 318220 - DNA, 1368 bp, Pseudomonas aeruginosa
atgtcctcccgccaatcgtcccgcaacgcttccaccccgtatctggccaaggccttccaggcaacggccatcgtcgtggtgagctacttcctctactggacctaccagctctaccagtacggcgagattcccatcagcaagaaggacgtgatgctgcgccaagccatcctcgcgcgctttccggcggactacgaggtggagatcaagggcgccgacctgctcggcttcggcgagaaattcctggtcgcctacggcaatcggcgcttcgtcggcaaggccttcgccatggacgaccaggtcatcgagcgcctggagcggaaccagggacggaccaacctgccgctggtgaaggtgttctacatcgccgaacccggcctcctctcctcgctgctcaacctctccccgttcctggatatccagaagaacatggtcgagctgagcctccgggaataccggaagatccagttggtccccttcgatccggacgcgaagcggaaaccgcgcgagcagttcgaaaccgattatgccttcccccagctgttcagcctcagccaactggaagtcgccgactacgacggcgacggccgcgacgaactgcgcctgggctacctgtcctacgccggcggttcgggagggacgcgctggtcggtgatctacgacctgaaggacggcgcgctgaccgcccattccggctatccggaaatgctcgacatcgacgtcgcccggttcatccaggcggtcaacctgtacgccggcctcgacggcaccctgccgcgcgaccagcgtcagctggaagacgtggtcggccgaggcagcgagcgcttcgcgctgaccgccgcggagcgccaggcactggtcgccgacccgcagcagcgggacgactacgccagggtcctgatgagcctttcgccgcgctcgccctacgcccccgatcgcttcatcgacctcggcgacggcagccgactgagcctggccccgcgccataccgacgattactcgaccttcctcgacatcggcgggaagaaaatcttcgtcgaagccttctacgtcgacgacgacgcctgccactggtgcgagcatcgctggcgagtgatggctttccattacgacgacggtcgctggatctcggaccgcaccatcaacggcgacagcttcaacgggcaatggctgcgcaacgcggagccgctgggcctcaacgacgttttcggtacctaccgcgaccagggcccggcgggcctggcctggtccttcatcgacccgcgctggaccgcctccagccagcatgacatggacgatccgctgggcgtgggaatgcgcaccctgtcgccggtggagcaatgggtgaaggaacgctatcgggaaaactga

SEQ ID NO: 318221 - DNA, 1701 bp, Pseudomonas aeruginosa
atgaaaatcagcagacaagcctacgccgacatgttcggccccaccgtcggcgaccgcgtgcgcctggccgacaccgacctgtggatcgaggtggaacgggacttcaccgtctatggcgaggaagtgaagttcggcggcggcaaggtcatccgcgacggcatgggccagagccagctgggcgcggcgcaggtggtcgacacggtgatcaccaatgcgctgatcctcgaccactggggcgtggtcaaggccgacgtcggtctcaaggacgggcgcatccaggccatcggcaaggccggcaacccggacatccagcccggggtgaacatcgccatcggcgccggcaccgaggtgatcgccggcgagggcatgatcctcaccgccggcggcatcgacacgcacatccacttcatctgcccgcagcagatcgaagaggcgctgatgagcggggtcaccaccatgatcggcggcggcaccggccccgccgccgggaccaacgccaccacctgcacctccggtccctggcacatggcgcggatgctccaggccgccgacgccttcccgatgaacatcggcttcaccggcaagggcaacgccagcctgccgctgccgctggaggagcaggtgctcgccggcgccatcggcctgaagctgcacgaggactggggcagcaccccggcggcgatcgacaactgcctggaggtcgccgagcgccacgacatccaggtggcgatccacaccgacaccctcaacgaatccggcttcgtcgagaccaccctcggcgccttcaagggccgcaccatccacacctaccacaccgagggcgccggcggcggccacgcaccggacatcatcaaggcctgcggcttcgccaacgtgctgcccagctcgaccaacccgacacggccgttcacccgcaataccatcgacgagcacctggacatgctgatggtctgccaccacctcgacccggccatcgccgaggacgtggccttcgccgagtcgcgcatccgccgcgagaccatcgccgccgaggacatcctccacgacctcggcgcgttcagcatgatcagctccgacagccaggccatgggccgggtcggcgaagtgatcacgcgcacctggcagaccgccgacaagatgaagcgccagcgcggccgcctcgacggcgacggtgcgcgcaacgacaacttccgcgccaggcgctacatcgccaagtacaccatcaacccggcgatcacccacggcatcagccatgaagtgggctccgtcgaagccggcaagtgggccgacctggtgctctggcgcccggccttcttcggcgtcaagccgagcctgatcctcaagggcggggccatcgccgccagcctgatgggcgacatcaacggctcgatccccacgccgcagccggtgcactaccgaccgatgttcgccagctacgccggcagccgtcacgcgaccagcctgaccttcgtcagccaggccgccttcgccgccggcgtaccgcagcagctcggcctgcgcaaggccatcggcgtggtcagcggctgtcgcggtgtgcagaagaccgacctgatccacaacggctacctgccgaccatcgaggtcgacgcacagaactaccaggtacgcgccgacggccagttgctctggtgcgaaccggcggacgtgctgccgatggcgcagcgctatttcctgttctga

SEQ ID NO: 318222 - DNA, 306 bp, Pseudomonas aeruginosa
atgatccccggtgaatacgacatccagcccggcgatatcgaactcaacgccggccgccgcaccctcgccctgagcgtggcgaacaccggtgaccggccgatccaggtcggctcgcactaccacttcttcgaggtcaacgacgccctcgccttcgaccgtccggccacccgtggcatgcgcctgaacatcgccgccggcaccgcggtgcgcttcgaaccggggcagagccgcgaggtggagctggtggaaatcggcggcggacggcgggtatacggctttgccgggcgggtgatgggggacctctag

SEQ ID NO: 318223 - DNA, 519 bp, Pseudomonas aeruginosa
atgagcgcttcgatccgcgacgccggcgtcgccgacctgcccggcatcctcgccatctacaacgacgccgtgggcaataccacggcgatctggaacgaaaccccggtggacctggccaaccgccaggcctggttcgacacccgcgcccgccagggctacccgatcctggtggcaagcgacgccgccggcgaagtgctcggctacgcctcctacggcgactggcgacccttcgagggcttccgcggcaccgtcgagcactccgtctacgtgcgcgacgaccagcgcggcaaaggcctcggcgtgcaactgctgcaggcgctgatcgaacgtgcgcgggcccagggcctgcacgtcatggtggccgccatcgaaagcggcaatgccgcctcgatcggcctgcaccggcgcctcggcttcgagatcagcgggcagatgccgcaggtgggccagaagttcggccgctggctcgacctgaccttcatgcaactgaacctcgacccgacgcgcagcgcgccctga

SEQ ID NO: 318224 - DNA, 303 bp, Pseudomonas aeruginosa
atggacttgtccccccgcgagaaagacaagctgctgatcttcaccgccggcctgctcgccgagcgccggctggcacgcggtctcaagctgaactacccggaggcggtggcgctgatctccgccgccctgctggagggcgcgcgcgacggccgcagcgtcgccgagctgatgcactacggcaccaccctgctgaaccgcgagcaggtgatggagggcgtgccggagatgatcccggacatccaggtggaggccaccttccccgacggcaccaagctggtgaccgtccaccagcccatcgcctga

SEQ ID NO: 318225 - DNA, 843 bp, Pseudomonas aeruginosa
atgaccgccgccctccccgacctgagcttccaccccgcctggcacgcccaactggagctggcctacgcccgcgccggcgacgccacccgcccggtgacgcggcgccactccggaccgctgcgggtgcagaagcacctctacgccgaaggcccggaagtctgccagcacatcctcgtgcatccgcccggcggcatcgccggcggcgacagcctggccttcgacgtgcgcctcggcgaacgcgcctgggcccagctcaccagccccggcgcggccaagtggtaccgcgccgcctgcccgtcgcggcagaccctggagatccacctggagcccggcgccaccctggaatggctgccgcaggaaagcatcgtcttcgccggcgcccaggccgaactggaaacccgtatccagctgcgcggcgacgcccgcctgttctactgggacatggtcgcgctcggccgcccggccagcggcgagcgcttcgccagcggccacttcgtcgcggccctggacatccgtcgcgacgaccgcctgctctggcacgagcgccagcgcatcgacggcggcgaccgcctgctcgactcgccgatcggcctcgccgggcatccggtgctggcgaccctggtcgccagcggcgagatcgacaccgacctgctgcaacgctgccgcgcgctcccctgcgccggccgcggcaacctcagccagttgcccggcggcctgctggtggcgcgctgcctggccgacgaggcgctgcacgcgcgagcctggctgatcgaactctggcgcctgctgcggccggcgctgctcggccgcgaggccgttcccccacgcatctggagtacctga

SEQ ID NO: 318226 - DNA, 453 bp, Pseudomonas aeruginosa
atgaccgtcactctgcgcccggccgtccaggccgacgcgggcttcgccgcgctctgcgtcgccgccgcctatgccccgtggatcgcggtgatcggccgcaagccctggccgatgacccaggactaccacgaggtgatcgccagcgaccgggtcctcatcgccgagcacgacggccagccggtcggcctgctggtgacgcgggaaaccgccgacggcttcctcgtcgacaacctcgccgtgcttcccgaatgcaagggccagggcatcggccgacaactgctggagcgtgccgagcgcgacgcaacgagcctcggctaccgctcgctgtacctctacaccaatgagcggatgacggaaaacatcgagctctacgccagggtcggctacctcgaatacgaacgccgccaggaagagggattccgccgcgtgttcatgcgcaaggccctggcctga

SEQ ID NO: 318227 - DNA, 699 bp, Pseudomonas aeruginosa
atgctgcaagtcgacaagctccaccagtactacggcggtagccatatcctccgtggcctgagcttcgaggcgaaggtgggcgaggtgacctgcctgctcggtcgcaacggggtgggcaagaccaccctgctgcgctgcctgatgggcctggtcccggcccgcgagggccaggtcgcctggcaaggccgttcgctcaccggactcaggccgcaccagcgggtccgcgccgggatcgcctacgtgccgcagggacgggaaatcttcccccggctgacggtggaagagaacctgctgatgggactgtcccgtttcagcgccagggacgcccgggcggtgccggacttcatctacgagctgttcccggtcctgcgcgaaatgaaacagcgccgcggcggcgacctctccggcggccagcagcagcaactggcgatcggccgcgccctggccagccagccgcgactgctgatcctcgacgaacccacggaaggcatccagccttcggtgatcaaggagatcggcacggtcgtccgcagcctggcggcgcgcggcgacatggcgatcctgctggtcgagcagttctacgacttcgccgccgaactggccgaccaatacctggtgatggcgcgcggcgagatcgtccagcagggccgcggccgcgacatggagagcgagggcgtgcgcgggctggtggcgatttga

SEQ ID NO: 318228 - DNA, 858 bp, Pseudomonas aeruginosa
atgaggaccaccccgcacctgatgctcgaaccggccttccaccccggcctcgataccgccggcagcggccgcgacgccatcggcctgggcgccgccaccagcggccggctggacgcgcgccacggcaccatcctcagcctggaagacatcaacgtcagcttcgacggcttcaaggccctgcgcgacctgaccctgtacatcggcgtcggcgaattgcgctgcatcatcggccccaacggcgccggcaagaccaccctgatggacgtgatcaccggcaagacccgcccgcagagcggtaccgcgtatttcggcgacaccctcgacctgacccgcatgagcgaggtgcagatcgcccaggccgggatcggccgcaagttccagaagcccacggtgttcgaggccctgagcgtgttcgagaacctcgaactggcgcagagggccgacaagtcggtgtgggccagcctgcgcgcgcggctcgacggcacgcagagggaacgcatcgaggaggtgctcgccaccatccgcctgctggagtcgcggcagcgtccggcgggtttgctgtcccacggccagaagcagttcctcgagatcggcatgctgctggtgcaggaaccgcagttgctgctgctcgacgagccggtggcgggcatgaccgatgccgagaccgaattcaccgccgagctgttcaagtccctggcgcgcaagcactcgctgatggtggtggagcacgacatgggtttcgtcggcagcatcgccgaccatgtcaccgtgctgcaccagggccacgtgctggccgaaggctcgctggcggaggtacaggccgacgaacaggtgatcgaggtctacctcggtcgctga

SEQ ID NO: 318229 - DNA, 1080 bp, Pseudomonas aeruginosa
ttgaaccagccactcaccgtcaccctcgcccgccgggccggcggccgcgtcaccgctatcgcgctcggcgcagccttcgccacgctgctggccatgccgctgctgcacctgctgccggcggacagcgcgctgcacctctcggcctacagcctgaccctgaccggcaagatcctctgctacgccatcgtcgccctcgccctcgacctggtctggggctacgccggcctgctgtccctcggccacgggctgttcttcgccctcggcggctacgccatgggcatgtacctgatgcgccaggcctccggcgacagcctgccggcgttcatgaccttcctttcctggaacgaactgccctggtactgggccggcacccagcacttcctctgggcgctgtgcctggtggtgctggtgcccggcgcgctggccttcgccttcggctacttcgccttccgctcgcggatccgcggcgtgtacttctcgatcatgacccaggccctgaccttcgccggcatgctgctgttcttccgcaacgagaccggtttcggaggcaacaacggcttcaccgacttccgcagcatcctcggcttcccgatcaccgcgccgggcacccgcgccgccctgttcctcgccaccgtcgcgctgctcgcggccagcctgctgctcggctggcgcctggcgcgaagcaagttcggccgggtcctcaccgcgctgcgcgacgccgagaaccgcctgatgttctgcggctacgacccgcgcggctacaagctcttcgtctggaccctgagcgcggtgctctgcggcctcgccggcgcgctgttcgtgccgcaggtggggatcatcaaccccagcgagatgtcgccgaccaactccatcgaggccgccgtctgggtcgccctcggcggacgcggcaccctgctcggcccgctgctcggcgccggcgtggtgaacggcgcgaagagctggttcaccgtggccttcccggaatactggctgttcttcctcggcgcgctgttcatcgtcgtcaccctgtacctgccgcgcggcctgctcggcctgctgcgcaaggagaaggagcaatga

SEQ ID NO: 318230 - DNA, 1266 bp, Pseudomonas aeruginosa
atgaaacgtcgcagtctgctcaaggccttcacgctgtccgcgtccatcgcttccatgggcctgtcctggtccatccaggccgccgaaaccatcaaggtcggcatcctccactcgctgtccgggaccatggcgatctccgagacctcgctgaaggacatggccctgatgaccatcgacgagattaacgccaagggcggggtcaacggcaggaagctggaggcggtggtggtcgatcccgcgtcgaactggccgctgttcgcggaaaaggcccgccagttgctgacccaggacaaggtcgcggtggtcttcggttgctggacctcggtgtcgcgcaaatcggtgttgccggtgttcgaggaactcaacggattgctgttctacccggtccagtacgagggcgaggaactctcgccgaacgtcttctataccggcgcggcgccgaaccagcaggcgatcccggcggtggagtacctgatgagcgaggacggcggcggcgccaggcgcttcttcctgctcggcaccgactatgtctacccgcgcaccaccaacaagatcctgcgcgccttcctgcacagcaagggcgtggacgacaaggacatccaggaggtctacacgccgttcggccacagcgactaccagaccatcgtcgccgacatcaagaagttcgccgcaggcggcaagaccgcggtggtctccaccgtcaatggcgactccaacgtgcccttctacaaggaactggccaaccagggcctggaagccaccgaggtaccggtggtggccttctccgtaggcgaggaagaactgcgcggcatcgacaccaagccgctggtcggcaacctcgcggcatggaactacttcgagtcggtgagcaatccggtcaacgagaagttcgtcgccgactggaaagcctacgccaaggcgaagaacctgccgaactacggcaccgcggtgaccaacgaccccatggaagccacctacgtcggcatccacatgtgggcgcaggccgtggaaaaggccggcagcaccgaggtcgacaaggttcgcgaggcgatggccgggcaaagcttcaaggcgccatccggctacacgctggtcatggacaagagcaaccaccacctgcacaagccggtgatgatcggcgagatccaggacgacggccagttcgaagtggtctggaagacccccgagccgcttcgcgcgcaaccctggagcccgttcatcccgggcaacgagaagaagccggagcatgcgctgaagagcaactga

SEQ ID NO: 318231 - DNA, 594 bp, Pseudomonas aeruginosa
atgcatttgctgttcagcgtctacctgaagatgctggtgctctatagccccttcttcgtgctgtcctgcttcatcagcctcagccgcggcttcggcccgcgcgaccgcaagcgcatggcctggcgggtggccctggcggcgctgatcgccagcgtcgcgctgtacctgttcggccgctacatcttcatcctcttcggtatcaccgccgacgccttccgcatcggcgccggcagcgtgctgttcatctccgcgctgggcatggcccagggtcgcgcggcggtgcagagcgacaacgtgcagcaggacgtgaccatcgtcccgctgaccattcctctcaccgtcggccccggcaccatcggcgcgctgctggtgatgggcgtcggccagggctgggaggccaagctgatctccctggtggcgatcttcctcgcctgcctgaccctcggcaccacgctctatctttccgaccgcatcgaacgcctgcttggcgaccaggggctacagatcgtcagtcgcctgatgggcctgttcgtctgcgcactggcggcgcagatcatcgtcaccggcctgaagggttcgctgttcccaggctga

SEQ ID NO: 318232 - DNA, 2829 bp, Pseudomonas aeruginosa
gtggtacggcttcggatcgccataggactactcgtcagcttcctgctgcttctgctcggtccgatgtcgccggcggtcgcggacgacgccggcgtttccagcgttcccctgcaaaccaccgccaccacccccagcgtcaaccagaactggcgcctgctgcgcgacgagagcgcgcaactgcggatcgccgacgtcctccagcgcaaggagcagttccgcccgctggccaagcgctccttcatcttccccgccagcccccaggcggtctggctgcaggtccagcttcccgcgcagaaggtgccgagctggctatggatcttcgccccgcgggtgcagtacctggactactacctggtgcaggacggccaactggtgcgggaccagcacaccggcgagtcgcgaccgttccaggagcgcccgctgccctcgcgctcctacctgttctcgctgccggtcgacggcaagccgatgaccctgtacgtgcggatgacctccaaccatccgctgatggcctggttcgaccagatcgacgaagccggcctggtcggcctggagaagcccgcctacgccttcggcatgctgctcggcggcatgctcctgctgctgatgtacaacctgatccgcttcgcctactcgcgcagcgccagcagcctgtggctggcggcggtgcacgcggcgctggcggtctgcgccgcggcgaacctggggctggtggcgttctggctgccgggactcaagttcaaccagtcgctgaccgccgacctcggcgccctcggcgccgcggtgagcctgctgtggttcgcctgcagcttcttccgcggcactgcggaaagccgcctgaaccgcctcctgcaaggcgaggcgctgttgatcctggcggtcggcgcgatcatcgccttcacccagcaactctggttcagctggctgatctacctgctggtgatcctcagttcgctcagcgtcccgctgatcgcggcctggcactggtatcgcggctaccagccggcgcgcctgatcgttgccgggatgatcgtgttcaacgccggcttcatggtgttcctgccggtactgttcggcaccaagcaactcgatccgggctggctggtgctcggcgtgttcagcttcgccaccctcgccgggctggtcctgagcgtctcgctcaccgaacgccagcggctgatccagcagctcaacctgcaacagcgcaccagcgaggcggcgcacaccgcggaattgcagaccaaggccgagttcctggccaagatcagccacgagatccgcacgcccatgaacggcgtgctggggatgaccgaactgctcctcggcaccccgttgtcggcgaagcagcgcgactacgtgcagaccatccacagcgccggcaacgagctgctcacgctgatcaacgagatcctcgacatctccaagctggagtccgggcagatcgagctggacgaagtgcagttcgacctcaacgcgctgatcgaggactgcctggatatcttccgggtcaaggccgagcagcagcgcatcgagctgatcagcttcacccagccgcaggtgccacgggtcatcggcggcgatccgacgcgcctgcgccaggtggtcctgagcctgctggacaacgcgttcaagcagaccgaggaaggcgagatcctgctggtggtggccctcgacgaccagggcgagacgccacgcctgcgcatcgccgtgcaggacagcggccacccgttcgacgccaaggagcgcgaggcgctgctcaccgccgagctgcacagcggcgacttcctttccgccagcaagctcggcagccacctcggcctgatcatcgcccgccaactggtgcggctgatgggcggggagttcggcatccagtccggcagcagccagggcaccaccctgtcgctgaccctgccgctcgacccgcagcagttggagaaccccaccgccgacctcgacggcccgctgcagggcgcgcggctgctggtggtggacgacaacgaaacctgccgcaaggtgctggtgcagcagtgcagcggctggggcctgaacgtcagcgcggtgtcgtccggcaaggaggcgctggcccagttgcgcaccaaggcgcacctgcgcgagtacttcgacgtggtcctgctcgaccaggacatgcccggcatgaccggcatgcaactggcggcgaagatcaaggaagaccccaacctcaaccacgacatcctgctgatcatgctcaccgggatcagcaacgcgccgagcaagatcatcgcccgcaacgccgggatcaagcgcatcctggccaagccggtggccggctacacgctgaaggcgaccctcgccgacgaactcgcccagcgcggcgtcagcggcgtcaccaactacctgcaaccggccaaggaagcgcaggcgccgagcctgccgagcgatttccggatcctcgtcgccgaggacaacagcatctccaccaaggtcatccgcggcatgttgaacaagctcaacctccagccggacaccgccagcaacggccaggaggcgctcagcgcgatgaaggcgacccagtacgacctggtgctgatggactgcgagatgccggttctggacggcttctccgccaccgaacagctacgcgcctgggaagcccacgaacagcgcccgcataccccggtggtggcgctcaccgcgcacatcctcagcgagcacaaggaacgcgcgcggctggtcggcatggacgggcacatggccaagccggtggagctgtcgcaattgcgcgagctgatcgcctactgggtcggcgaacgcgatcgccgccgccagggcgacgccctgccctcctga

SEQ ID NO: 318233 - DNA, 1290 bp, Pseudomonas aeruginosa
atgaacgtactcatcatcggcagcggcggtcgtgaacatgccctggcctggaaagtcgcccaggacccgcgcgtggcgaaggtcttcgtcgccccgggcaacgccggcaccgccaccgaagccaagtgcgagaacgtcgccatcgacgtgctggccctggagcaactggccgacttcgccgcgaagaacgtccagttgaccatcgtcggtcccgaggcgccgctggtggcaggcgtggtcgacctgttccgcgagcgcggcctggatatcttcggcccgaccgccggcgccgcccagctggaaggctcgaaggccttcaccaaggacttcctcgcccgccaccggatccccaccgccgcctatcgcaacttcaccgaggtcgagccggccctggcctacctgcacgagcagggcgcgcccatcgtcatcaaggccgatggcctggccgcgggcaagggcgtgatcgtcgccatgaacctggacgaagccgaagccgccgtgcgcgacatgctcgccggcaatgccttcggcgacgccggctcgcgcgtggtgatcgaggagttcctcgatggcgaggaggccagcttcatcgtcatggtcgacggccagaacgtgctgccgatggccaccagccaggaccacaagcgcgtcggcgatggcgacagcgggccgaacaccggcggcatgggcgcctactcgccggccccggtggtcaccgccgaggtccaccagcgggtgctggacgaagtgatctacccgaccgtgcgcggcatggccgaggaaggcaacgtctataccggcttcctctatgccggcctgatgatcgacaagagcggcgcgcccaaggtcatcgaattcaactgccgcttcggcgatccggaaacccagccgatcatggtccgcctggagtcctccctggtcctgctggtcgaggccgccctggccaaggcgctggacaaggtcgaggcgacctgggacccgcgtccgaccgtgggcgtggtactggccgccggcggctatccgggcgactacgccaagggcgaggtcatcgaaggcctggccgaggccgccgcgctggacggcaaggtgttccacgccggcaccgcgctgaaggatggccaggtggtcacctccggcggccgcgtgctctgtgccaccgccatcggcgagagcgtgtccgccgcccagcaacaggcctatcgcctggccgagaagatccgctggaacggctgcttctaccgcaaggacatcggctaccgtgccatcgcccgcgagcgcggcgagtcctga

SEQ ID NO: 318234 - DNA, 1608 bp, Pseudomonas aeruginosa
atgaccgaccaaaccacccgcctgcccatccgccgcgcgctgatcagcgtttccgacaagaccggcgtcgtcgacttcgcccgtgagctggtcgccctcggcgtggaaatcctttccaccggcggcacctacaagctgctccgggacaacggcatctctgccgtggaagtggccgactacaccggcttcccggaaatgatggacggtcgggtgaagaccctgcacccgaaggtgcatggcggtatcctcggtcgccgcgacctggacggcgcggtcatggagcagcacggcatcaagccgatcgacctggtggcggtcaacctgtatcccttcgaggccacggtggccaggcccgactgcgacctgcctaccgccatcgagaacatcgatatcggcgggccgaccatggtccgttcggcggcgaagaaccacaaggatgtcgccatcgtggtcaatgccggcgactacgccgccgtgatcgaatccctcaaggccggcggcctgacctacgcccagcgtttcgacctggccctcaaggcgttcgagcacacctccgcctacgacggcatgatcgccaactacctgggtaccatcgaccagacccgcgataccctaggcaccgccgaccgcggcgccttcccgcgcaccttcaacagtcagttcgtcaaggcccaggaaatgcgctacggcgagaacccgcaccagagcgcggcgttctacgtcgaggcgaagaagggcgaggccagcgtctccaccgccatccagttgcagggcaaggaactgtcgttcaacaacgtcgccgacaccgacgccgccctggaatgcgtgaagagcttcctcaagccggcctgcgtgatcgtcaagcatgccaacccctgcggcgtcgccgtggtgccggaagacgaaggcggcatccgcaaggcctacgacctggcctacgccaccgatagcgaatcggcgttcggcggcatcatcgccttcaaccgcgagctggacggcgaaaccgccaaggccatcgtcgagcgccagttcgtcgaggtgatcatcgcgccgaagatttccgccgccgcccgcgaggtggtcgccgccaaggccaacgtacgcctgctcgaatgcggcgaatggccagccgagcgcgccccgggctgggacttcaagcgggtcaacggcggcctgctggtacagagccgcgacatcggcatgatcaaggccgaggacctgaagatcgtcactcgccgcgcgcccaccgagcaggagatccacgacctgatcttcgcctggaaggtggccaagttcgtcaagtccaacgccatcgtctacgccaggaaccgccagaccgtcggcgtcggcgccggccagatgagccgggtcaactccgcacggatcgccgcgatcaaggccgagcacgccggcctggaagtgaaaggcgcggtgatggcttccgacgccttcttcccgttccgcgacggcatcgacaacgcggccaaggccggcatcaccgcggtgatccagccgggcggctcgatgcgcgacaacgaagtgatcgcggcggccgacgaggcggatatcgcgatggtgttcactggcatgcgccatttccgccattga

SEQ ID NO: 318235 - DNA, 324 bp, Pseudomonas aeruginosa
atgacaacgatgacgaccgagactttagtgagtggaacaacgcccgtgagcgacaacgccaacctgaaacagcacctcaccacgccgacgcaagaagggcagaccctgcgcgacagcgtggagaaggcattgcacaactacttcgcccacctcgaagggcagccggtcacggacgtttacaacatggtgctctgcgaagtcgaagcgccgctgctggaaaccgtcatgaaccacgtcaaggggaaccagaccaaggcctccgagctactcggcctgaaccgcgggaccctgcgcaagaaactcaagcaatacgatcttctttaa

SEQ ID NO: 318236 - DNA, 999 bp, Pseudomonas aeruginosa
atgtcggtggtacgcatcggcccatatacactgcccaacagactgatcctcgcgccgatggccggggtgaccgatcgtccgttccgtcagctttgccgtcgccttggcgccgggatggtggtatcggagatggtgaccagcgacgtccgcctgtggaacagccgcaagtcgcgcctgcgcctgatccacgatggcgaggacgagccgcgctcggtgcagatcgccggtggcgatccggccatgctggccgaggccgcgcagcgcaatgtggaactcggtgcgcagatcatcgacatcaacatgggctgcccggcgaagaaggtatgcaacaaggcagcggggtccgccctgctgcgggacgaggcgctggtcgccgagatcctcgatgccgtggtcagggcggtcgacgtaccggtcaccctgaagatccggaccggctgggaccgggacaaccgtaacggcgtcaccgtcgcgaagctcgccgaacaggcggggatccaggctcttgcggtgcatggccggacccgcgccgacctgtacaccggggaggcggagtacgagaccatcgcggcgatcaagcaggccgtgtcgataccggtgttcgccaatggcgacatcgattcgccggaaaaggccaggaaagtcatcgagcagaccggggtggatgccctgctgatcggtcgggccgcccagggaagaccgtggattttccgcgagatcgaccattacctgcggaccggcgagcacctgccggcggcgccgcttcccgaagtgcagagcatcctgctcgaacacctcgcggagctgcaccttttttatggggaagaaatgggtgtgcggatcgcccgcaagcatgtggggtggtatctcgcgactctgccgggcgcaagggaattccgcgcccagttcaatcgtttgcaggacacggatgcgcagtgcgccagcgtcaggcagttcttcgccgagcgccagaacaacggaacaggggtggccgcatga

SEQ ID NO: 318237 - DNA, 1278 bp, Pseudomonas aeruginosa
atgagcgaaagcgtcatcacccaatgtccccattgcagcaccagtttccgcgtcaacgacgcgcaactgggcgccgccaatggcgcggtccgctgcggcacctgcctgaaagtcttcaacgccctgcaacaccaggtcggtggcgcgccgcgcgcgaacgctccttcggcagccgaagcgaagccggccgccgctccgccacccgcgcccagcgtcgcggccgccacctcggccgcgcccccggcagcgcgcccgcgcgacgaaaccctgtggatccatgacgacctcgacctggacagcctcaacctcgacgaggaactggccaagctcgacgaattcgagctgaaccaggaattctccagcatcgagaaggccccgcgaccggcggaaagcctgctggcgcgccgcgacgacgaacgcgatccacatgacgaacgctgggccgaggcgctgatcgccgatgccgaaccggcccagccggcgcgcggcaatccgcgccaggaaccgagcctcggcgaaccgctggcggaagagcgggtatccttcgtgccgctgcgccgcgccgaggatccgccggaacttcgcctcagcctcgatgacgacgatgacgacgagcccagcctcggcaagcgccgccacggcctgagcgccctggatgaagacgacgaggaaagcgccgaggaacagtccgtcgcgcccctgggcagcgcccgcaaaccggacgaggcgccggtcgagagtctcgaccagttgcgcgacgagccgctgcaactggcctgggagaagccccggcgccaatggccgcggcgtctcggctggctgctgctgatcctgctggcgctgggcggtctcgccgctcagtacatcgcctaccatttcgacgaactggcgcgccaggacgcctatcgcccctggttcgcccagctctgcccggaaatcggctgcacccttccctccaaggtcgacgtggagcagatcaggagcagcaacctggtggtccgcagccatcccgaattcagcggcgcgctggtggtcgacgcgatcatctacaaccgcgccagcttctcgcagccgttcccgctgctggaactgcgcttcgccgacctcaacggccacctcatcgccaatcgccgcttcaagcccggcgagtacctcggcggcgagctggccggacgaacggaaatgccaccgcaggtaccgatccacgtgtcgctggacatcctcgacccgggtccgaaggcggtgaactacagcctgagcttccattccccggagtga

SEQ ID NO: 318238 - DNA, 885 bp, Pseudomonas aeruginosa
atgccctggttacaagttcgcctggccatcaccccggaacaggccgaaacctacgaagacgccctgctcgaagtcggcgccgtctccgtgaccttcatggacgccgaagaccagccgatcttcgagccggacctcggcaccaccccgctgtggtcgcgcacccacctgctggcgctgttcgaagcggacaccgacgagaccgccctgctcgcccacctcgccttgcttaccggcggcgacctgcccgagcaccatgtcgaggaaatcgccgaccaggattgggaacgcagctggatggacaacttccagccgatgcgtttcggccgccgcctgtggatcgtgccgagctggcacgccgcccccgagccggacgcggtcaacctgctgctcgatccgggcctggccttcggcaccggcacccacccgaccaccgcgctgtgcctggaatggctcgacggccaggaactggccggccggcaggtgctcgacttcggttgcggctcgggaatcctcgccatcgccgcgctgctgctcggcgccgaacgggcggtcggcaccgacatcgatccacaggccctggaagcctcgcgcgacaatgcctcgcgcaacggtatcgagcccgcgcggttccctgtctacctgccggcggacctgccgcagcgacaggccgacgtgctggtcgccaatatcctcgccggcccgctggtttccctcgccccgcaactgaccggcctggtacgtcccggcggcctgctggcgctgtccggcatcctcgccgagcaggccgcggaggtccgcgcggcctactccgcacacttcgatctcgacccgaccgccgagcgcgaaggctggatccgcatcagcggccgccgccgcgccgattga

SEQ ID NO: 318239 - DNA, 867 bp, Pseudomonas aeruginosa
atggaacgcatccgccgctggtaccgccaatcgctggccgccgcgaccgaggccgcgacctgcttcgccctgggtttcagggaaagcctgcaacccgccgcactcttccgctccgcgagcctgtgcattctcgtcagcgtgctgtgcacctggctgttcgtgcatttcttcgaaccgatcatccgcctctgcggctgggccgcgctgtacacggcattcagcgtggccaacttcgccctgatccccagcggctcgctgatcgaggccggcagcggtggcccgtacttcgatccgctggcggccttcaacggcctggcgggactggcgcaactggcgttctatttcgtcggctatgccgcgctgttcttcgtcgtcctgtacgccgccagcatcgtcttcggcatccgcctgggcctgcgcatcggcctgctcggacaactgaaggaacaggtccgccaacgctacccgcgactggcacctgcctccggcgaaaggatctcgctgtggcgtgccgccggcttccgcctggcaccctggctgggcgtttccggatcgatcctggtcggcctgctggttccgctctacaacggtgtactcctgctgctggcgctggcctacctgaacatccgcttcctgctgcccgccacgctggccgggctggccgatgccggcgagcagctcgccgtacttcgtgctcgccgcggcagcctgttgctgttcggcctgctgatactgctcctggcgctggtgccgctgctcaacctgctgctgccggcggtgctcggcggcggtacctgccacctggccaatcgcggcctggcgcaactgcgcggcgaggccacggcagagagtggcagcgccggctag

SEQ ID NO: 318240 - DNA, 1350 bp, Pseudomonas aeruginosa
atgttggaaaaagtgctgatcgccaaccgcggcgaaatcgccttgcgcatccttcgcgcatgcaaggagctggggatcaagacggtggcggtacactccaccgccgaccgcgagttgatgcacctgtcgctcgccgacgaatcggtgtgcatcggtccggccccggccacccagtcgtacctgcagatcccggcgatcatcgccgcggccgaggtcaccggcgccaccgcgatccaccccggctacggcttcctcgccgagaacgccgacttcgccgagcagatcgaacgctccggcttcaccttcgtcggcccgaccgccgaggtgatccgcctgatgggcgacaaggtctcggccaaggacgccatgaagcgcgccggcgtccccaccgtgccgggctccgacggcccgctgccggaagatgaagaaaccgccctggcgatcgcccgcgaggtcggctacccggtgatcatcaaggccgccggcggcggcggtggtcgcggcatgcgcgtggtctacgacgaatccgagctgatcaagtcggccaagctgacccgcaccgaggccggcgcggcgttcggcaacccgatggtctacctggagaagttcctgaccaacccgcgccacgtggaagtccaggtgctttccgacggccagggcaacgccatccacctcggcgaccgcgactgctccctgcagcgccgccaccagaaggtgatcgaagaggcgccggcccccggcatcgacgagaaggctcgccaggaagtcttcgcccgctgcgtccaggcctgcatcgagatcggctaccgcggcgccggcaccttcgagttcctctacgagaacggccgcttctacttcatcgagatgaacactcgcgtgcaggtggagcacccggtatctgagatggtcaccggtgtcgacatcgtcaaggagatgctgcgcatcgcctccggcgagaagctctcgatccgccaggaggacgtggtcatccgcggccatgcgctggaatgccggatcaacgccgaagacccgaagaccttcatgcccagcccgggcaaggtcaagcacttccacgcccccggcggcaacggcgtgcgcgtcgactcgcacctctacagcggctacagcgtgccgccgaactacgactcgctggtcggcaaggtcatcacctacggtgccgaccgcgacgaggcgctggcgcggatgcgcaatgccctggacgagttgatcgtcgacggtatcaagaccaataccgaactgcacaaggacctggtgcgcgacgccgccttctgcaagggcggggtgaacatccattacctggagaagaaactgggtatggacaagcactga

SEQ ID NO: 318241 - DNA, 471 bp, Pseudomonas aeruginosa
atggacattcgtaaagtcaagaaactgatcgagctgctggaagagtccggtatcgacgaactggaaatccgcgaaggcgaagagtcggtacgcatcagccgccacagcaagaccgccgcccagccggtgtacgcacaggctccggccttcgccgctccggtcgccgcgccggcgccggcagccgccgctccggccgccgctgccgcggaaagcgccccggccgcgccgaagctgaacggcaacgtggttcgctcgccgatggtcggcaccttctaccgcgccgcctcgccgacctcggccaacttcgtcgaagtcggccagagcgtgaagaaaggcgacatcctgtgcatcgtcgaagccatgaagatgatgaaccacatcgaagccgaagttagcggcaccatcgagtcgatcctggtggagaacggccagccggttgagttcgaccagccgctgttcaccatcgtctaa

SEQ ID NO: 318242 - DNA, 444 bp, Pseudomonas aeruginosa
atggcgaccctcctcgtattgcacgggccgaatctgaacctgctgggcacccgcgagcccggcacctacggttcgaccaccctcgggcagatcaaccaggacctcgagcgccgcgcccgcgaagccggccaccacctgctgcatctgcaaagcaacgccgaatacgaactgatcgaccggatccatgccgcgcgcgacgaaggcgtggacttcatcatcatcaatccggcggcattcacccataccagcgtcgcgttacgtgacgcgctgcttgcggtgagcatcccattcatcgaagtgcacctgtcgaacgtgcacaaacgtgaacctttccggcatcactcctacttctccgacgtggcggtaggggtgatctgcggtctcggcgccacaggctaccgcctggccctggaatccgcccttgaacaacttcaacgcccctga

SEQ ID NO: 318243 - DNA, 1776 bp, Pseudomonas aeruginosa
atgcgccgcctgctgaccctgatcctcctgctggtcgccctgcccgccggcgcgggcctgttcgacagccgtcccggcgcctccctcggcggcggcctcgatggcggcggcttcctcaaggtcgaccaggcgttcaagcccagcgtcgagcgcagcgacgcgcagcacgtgctgctgcgcttcgtcaacgccgagggctactacctctaccgccaccgcttccagttcaaggtcgagccagcccaggtcagcctcggccaggtgcagctgccggcgggcaagcagcaccacgacgagtacttcggcgataccgaggtctactacaacatcgtcgacctgaagattcccctgaacaacccggtccggcagccctataccctcgtggtgacgtaccagggctgcgccgacaagggcctctgctaccccccggaaaccaggcgcttcgacatcgacggcggtgccgcgacgccagccgcgagcgacgcggccggcaagggcccgctcgagcacaagggcaagcgcagcctgctgttcttcttcctcgccggcctgaccctgaccttcaccccctgcgtgctgccgatgctgccgatcctctccggagtggtcctgcgcggccggccgggcggtggtcgcggcttcgtcctgtcgctcgcctacgtgctgccgatggcgctctgcttcgccctgctcggcgcgctgatgggcatgttcggcgccagcctcaatctccaggcgcaattgcagtcgccctgggtactggtgccattcgcggcgttcttcgcgctgttcgccgtggccatgttcggcttcttcgagctgcgcctgcccggcttcatccgcgaaccgctcgaccgcctggccggcgatgcgcgcggcggctcgatcctcggcgcggccaccctcggcgtgctttccagcctgctggtctcgccctgcgtctccgccccgctggccgcctcgctgctctatatcagcgccagcggcgatgcctgggggggcggcctgcaactgttcgccctcggcctgggcatgggtacgccgctggtggtgttcggcgccggcggcggcgccctgctgcccaagagcggagcctggatgaacggcgtgcgcaacgccttcggcgtgctgttgctggcggtcgccgtgtggctgctggagcgggtggtgtccggcccggtggcgctgatgctctggggcatgctcgccggcggcgccggcctggccctgggcgccctcgaattcaccccgaagagcgccgcacgccgcctgctgcaactgcttggcctgatgttcctgacctacgcggtggccgcctggatcggcgccctgcagggcgagtcggacccgatccatccgctgggccgctcggtgccgtcgatccatgccgggccgccgagcacgcccggcgaatggcagaacctgaccaccccggcgcagttggacgccgccctggccgaggcacgtcaggccggcaagccggtgctgctggactggtatgcggactggtgcatcagttgcaaggtcatcgagcgccaggttctcaccgatcccacggtgcaggcacgactgccggcctaccgcctgctgcgcttcgacatcaccgaaagcaacccggcccagcgcggcctgctggaccgctacaacctgttcggtccgccggcaatcctgttcttcgccccgggcggtgacgaatggagcgacttgcgcgtcatcggagagatcgacgccgccgggctcgccgaacgactgcgccgggccgctacccggcagtga

SEQ ID NO: 318244 - DNA, 1974 bp, Pseudomonas aeruginosa
atgcgcctcaagcaactcaccaacctcaacaccctgctcctgctcaccgtctgcctcgccctgggaatcaccctgtggtggtcgcaacgcgccatggagcggcccttccagttgctcgaccagtacctggagctgtcgcagcgcttcgacgaacaggtcgcgcgcaacatccgccagtacctcggcagcggcgacgccgtgcgccagcaggccgcgctgcaagccctggaaagcctcgccgaggccttgccggagctaccgccggacctcgcccggaccctcgcgccaagcctcgcggagttgcgcgaattcagcgccggcgacctgctcgccgccggcaagctcgccggcgacccgcagggcctgctgctacaggccgagcgcgacctcaccggcaacctggaacaatggtccgcctacctggacgccgcggcggggcagccccaggccggcgcctaccgcaccccgctgctgctcgccagcctgcacctgacccgcctcagcctggcccgcgccaagctggtggaaagcgccaacccggccctggccggcgacgtcgagcgcgaattggccaacctgcgcgagcaggccgggcggatcgaggccttgccgctgctcggcgtgctcgacgagcaacgctcggccagcgacgacttcgccgccatgatggggctggccggcgacgccgaggctggcgccggcaatgccgaagaccgcggcgtggcgctgcggcgcgaactcgccagcctgctgcaacgctatccggacgagttgcgccgcacccgcgacctgatcgagcgtcgccagcaactgtccgccgacaccggcaccagactggacgcggtgcgccaggccctggccaccctggaaccgcaggtgcgcggcgaacgccagcgcctgcaaggccaggtacgcctgatccagggtgggatgatcgccctgatcctgctcatcgccctcgccatcgacagcctgcaaagacgcctggcgcgggtcctcgggcaactggtgccggcgctctcggcctgggccgacggcgacttctcgcgccccatatccctgcgcacccgcaccgaggacctgcgcaacctggaagattcgctgaaccgcctgcgcagcttcctcgccgagctggtcggcgcgatccaccgccgcgccgaacaggtcgccggcagcagccagaccctggccgaggtcagcagcggcctgcacgccggggtcgagcgccaggccggcgataccgggcagatccgcgacgccctcggcgacatggaagcggcgatccagcaggtcgccggagacgccagccagaccgccgacgccagtcgcagcgcaggccaggcagtggagcatggccagcgggtgatcggcgagagcctgggcggcctgcgcgagctggtcgacgaggtgcaaggcaacgcccagtcgatcgagcgcctggccgaggagtcggcgaccatcggcagcgtgctgacggtgatccgctcgatcgccgaacagaccaacctgctcgccctcaatgccgccatcgaggccgcccgcgccggcgaccagggccgcggcttcgccgtggtcgccgaggaagtccgctcgctggcccagcgcaccgccggcgccaccgaggagatccagcagctcatcggccgcctgcaacaggctgcgcggcaatcggtggaggccatgcgcagccaggtcgagcatgccgaacgcaccgccgaacaggccggcgcggcggaaggcgcgctggacgaagtggtcgccgcgatccataccatcggcgtgatggccgaacgcatcgccgaaggctcgacccagcaaagccaggcggtcggcgagattcgctcgcacagcgaacgcatccacgccctgggcggggaaaacctgcggctgatcggccatagccgcgaacagggcgagcaactgcggcaactgggcggcgacctgcgcaccacggtgcaggccttccgcctgtga

SEQ ID NO: 318245 - DNA, 1629 bp, Pseudomonas aeruginosa
atgatgaccgagcacgatgacccgaccctggaccgcctgaagcaccacttcgcccagcgagtgatcaaccaggcgcgccaggttctggaggtctggcaacgcctgacccgcgcggagtggaacagcgacggcatggaagaactggccgacgccaccctgcgcctgcagcgctacgccgaacgcttcgagcaagccgagcatgcccagctggccggtgccatcgaccgtaccctggacgtcgtcgaggccaaccgcggccggctttccagcgagtcgatcagcgaactcaaccagttgatgcagcgcctgtcgcgcaccggcctgcggcatggcgaccagctcgagcacaccgtcctgccgccgttgcgcaaaccggtctacctggcactgaaggaccgcgaacgcgccgagcgcctggcccagcaactggagttcttcggtctgcaggcgctgagctgcgagaccgccgacgccttccgcgccagcatgcgcgaacgctacccggcggcgatcgtcatggaagtcgacttcgccggccccgacatgggcctgcgactggccagcgaggcccaggccggcctcgaacacaagctgccggtgctgttcttcagcgacagcgagaccgacacaccgacccgcctggccgcggcccgtgccggcggccaggaattcttcaccggcaccctggacgcctccagcgtgctggaaaagatcgagaccctcagccgcctgagcttctacgagccctaccgggtactgatcgtcgacgactcccgggcccaggcgctgcacaccgagatggtcctcaacagcgccgggatcatcacccgcgcactcaccgagccactgtcggtgatggccgagctgagcgacttccagcccgacctgatcatcctcgacatgtacatgcccgagtgcctgggcaccgaattggccaaggtgatccgccagcacgagcgccacgtcagcgtgccgatcatctacctgtccgccgaggacgacctggacaagcagctggacgccatgagcgaaggcggcgacgacttcctcaccaagccgatccgcccgcgccacctgatcgccaccgtgcgcacccgcgccagccgcgcgcgcagcctgaaggcgcggatggtgcgcgacagcctgaccggcctgtacaaccacacccataccctgcaactgctcgaggacgcccgtctgcgcgcacgtcgcgatggccgtccgctgagcttcgcgatgctcgacatcgaccacttcaagcaggtcaacgaccgtttcggccaccccatgggcgaccgggtgatcaagggcctggcgctgttcctcaagcaacgcctgcgcaagaccgaccacatcggccgctatggcggcgaagagttcgccgtggtccttccggacaccgacctggacgccgcgcgcctggtgctcgacgagattcgccagcgcttcgccgagatccactacccggcgcaaccgaccgacctgcgctgcaccttcagttgcggcatcgccgagctgaccccggacctcgatatcaagagcatggccaagcaggccgacgaagcgctgtaccgggccaagcacggcgggcgcaaccggatcgaggtatatcgtcccaacgctcgataa

SEQ ID NO: 318246 - DNA, 132 bp, Pseudomonas aeruginosa
atggcgaacgcgttccgtgccaagcgccaacccttccaggacgccgaaaacctcggcatcgtcggctttcagcgtagtggaagccggttttgtgccggaatgctcagtgagaattttccgaaacaggcataa

SEQ ID NO: 318247 - DNA, 1071 bp, Pseudomonas aeruginosa
atgctggactggaagaagcgtcgtgggaccatgcgcgatcgcgtggacaattccgtggatgatgtgcgtacctacttcggcggcccctggctggtgcgcgtggtgggaggcctgctgggcatctacctgctggtggcgatgctggttggctggtactggagccaggaacccgacctgttccccgtgcagcaggacgcccaggccgccgccgagcgcgccgggcggcagatggtcaccggctacaccacggtggagaccctcaaggaagtagtcgacaccctgctgaccaagccgggcggctacatctccaacgacatcttcccgccgggcatctggatggacaacatgcccagctgggagtatggcgtgctggtccaggtgcgcgacatcagccgggcgctgcgcaaggatttcgcccgttcgcagtcgcagtccaccgaggacgccgacctggctcgcgccgagccgcgtttcaacttcgacaacaagagctgggcgctgccggcgtccgagtcggagtaccaggaaggcatcaagtcgctggaccgctacctggctcgcctgtccgacccgaaccagcccaacgcgcagttctatgcccgtgccgacaacctgaacaactggctgggcgacgtcgccacccgcctgggctcgctgtcccagcgcctgtcggcgagcgtcggccgggtcaagctgaacaccaacatcaagaaccccgaagaggtacagccgggcgaggcgcccaaggtcgaggaagtggtccaggaaaccccctggctgcagatcgacaacgtcttctacgaggcccggggccaggcctgggcgctgtcgcacctgctgcgcgccatcgaggtcgacttcgccgacgtgctggcgaagaagaacgccacggtcagcgtgcggcagatcatccgcgaactggaggccgcgcaggagccgttgtggagcccgatggtgctgaacggcagcggctacggcatcctggccaaccactcgctggtgatggccaactacatttcccgcgccaacgccgcggtgatcgacctgcgccagctgctttcccagggctga

SEQ ID NO: 318248 - DNA, 537 bp, Pseudomonas aeruginosa
atggccgcgccgatcagcgccgaagaggtggcccaccgggccgcctccgacgccgaactcatcgcctgggtcgacgagcaggaccgcccgctcggtagcctgccgcgcgcggagctgcgcgagcgcgggctgatcggtcgcggcaccttcatcctgctgttcaactccgccggcgagctgtgcgtgcagcgccggaccctgagcaaggcggtctatcccgggtactgggacctcgccgccggcggcatggtccaggccggcgagccctacgccgactccgccgcccgcgaactggaggaagagctgggaatccgcgacgcggtcctgcgcgaacatggtcgcttcttcttcgacgaaccgggcaaccggctctggtgcgcggtgttttccgccgtctccgatgcgcccttgcgcctgcaggcggaggaaatctccgaggcccgcttcatccgtcccgaactggcgctggaggaggctcgcagcttgccgtactgccccgattccctgcaggcgttgcgcctgtacctggacgcctga

SEQ ID NO: 318249 - DNA, 372 bp, Pseudomonas aeruginosa
gtggtcaaaaaagcttcgtccctgtccgccctcggcgggctggtgtattccacggatggcggccggcattgcccggactgccagcaacccaaagacgcctgcatctgcgggcaggccgtagcgcctgtcggcgacgggatcgcgcgcgtgcgccgcgagaccaagggccgcggcggcaagacggtgaccaccatcagtggcctgccgctcgccggcgatgcgctcaaggagctggccagcgcgctgaagcggcgctgcggcaccggcggcagtctcaaggacggcgtggtggagatccagggcgagcatgtcgaactgctgatcgacgaactcctcaagcgcggtttcaaggcgaagaagtccggcggctga

SEQ ID NO: 318250 - DNA, 1911 bp, Pseudomonas aeruginosa
atggccgctcgacggactcgcaaagacgatggcagcaactggaccgtggccgacagccgcggcgtatacggcatccgccactggggtgcgggttatttcgccatcaacgatggcggcaatgtcgaagtgcgtccgcagggtgccgactcgacgcccatcgatctctacgagctggtcggccagctgcgcgaggcgggcctgagcctgccgctgctggtgcgcttcccggatattttgcaggaccgcgtgcgcaagctcaccggcgccttcgacgcgaacatcgagcgcctcgaataccagagccgctataccgcgctgtatccgatcaaggtcaaccagcaggaagcggtggtggagaacatcatcgccaccgagaacgtctccatcggcctggaggcaggctccaagccggaactcatggcggtgctggcgctggccccgaagggcggcaccatcgtctgcaacggctacaaggaccgcgagttcatcaagctggcgctgatggggcagaagctcgggcacaacgtgttcatcgtgatcgagaaggaatccgaggtgcagctggtgatcgaggaggccgccaacgtcggcgtgcagccccaggtcggcctgcgcgtgcggctgtcctcgctggcttcgtcgaagtgggcagacaccggtggcgagaaggccaagttcggcctttccgccgcccagctgctgtcggtggtcgagcgcttccgccaggccggtctcgaccagggcgtgcgcctgctgcatttccacatgggctcgcagatcgccaacctggccgactaccagcacggcttcaaggaagccatccgctactacggcgagctgcgcgcgctcggcctgccggtggatcacatcgacgttggcggcggcctcggcgtcgactacgacggcacccattcgcgcaacgccagctcgatcaactacgacatcgatgactatgccggcgtggtggtcggcatgctcaaggagttctgcgacgcccagggcctgccgcatccgcacatcttctcggagagcggccgggcgctgaccgcgcaccatgcggtgctgatcacccaggtcaccgacgtcgagcggcacaacgacgacgtgccgaagatcgtcgatctcgacgagcagccggagatcgtccgctggctggccgaactgctcggcccgaccgatgccgagatggtcaccgagacctactggcgcgccacccactacatcggcgacgccgccgcgcagtatgccgacggcaagatcagcctggcgcagaaagccctcgccgagcagtgctacttcgctatctgccggcgcctgcacaaccagctcaaggcccgccagcgctcccaccggcaggtcctcgacgaactcaacgacaagctcgccgacaagtacatctgcaacttctcggtgttccagagcctgccggatacctgggccatcggccaggtgctgccgatcctgccgctgcaccgcctgggcgaggagccggatcggcgcgcggtactgcaggacctgacctgcgactccgacggcaagatcacccagtacgtcgacgagcagagcatcgagaccagcctgccggtgcacgaggtgaaggagggcgaggactacctgatcggggtattcctggtcggcgcctaccaggagatcctcggcgacatgcacaacctgttcggcgacaccgactcggtgaacgtctaccagcgcgcagacggctgcatctatcacgccggcatcgagacccacgacaccatcgaggacatgctgcgctacgtgcacctgtcgccggaggaactgatgaccctctaccgcgacaaggtcgccggggccaagctcaccgcccgcgagcgcaaccagtacctggatgcgctgcgcctggggctgacccgctcggcgtacctgtcctga

SEQ ID NO: 318251 - DNA, 1155 bp, Pseudomonas aeruginosa
atgcccaactccatctccaattcctcccgcctgcacagcatcgacgccctgcgcggcctggtgatgctgttcatgctgctcgaccatgtccgcgagacctttttcctgcaccgtcaggtcggcgacccgatggacgtcgccagcaccgagccggcgctgttcctcagccgtaccctggcgcacctgtgcgcgccggtgttcgtcttcctcaccggcctgtcggcattcctctacggcgagaagcaccagggacgccgggcggtctcggcgttcctgttcaagcgcgggttgttcctggtggcgctggaactgaccctggtgaacttcgcctggaccttccagttgccgccgacggtgatctacctccaggtgatctgggcgatcggcctgagcatgctcgccctggccgccctgctctggttgccgcgccctctgctcgcggcgctcggcgtgctgctggtggccggccacaacctgctcgatccgctgcatttcgctcccggctcggcctggcacctgccgtgggcggtgctccacgaccgcggctggatcgaagcgggcgacgccctgcgcctgcgcacctcctaccccctgctgccgtggatcggtgtgatcgccctgggctatgccgcaggcaactggttcagcggcgccacgccggcaaccacgcgccgacgctacctcctggcgggcggtggcgggctgctgctcggcttcatcctgctgcgcctgctcaacggctatggcgagaaaccctgggccttcggcgagacgccggcgatcaccctgatgggcttcttcaacgtcaccaagtatccgccgtcgctgctgttcctcgccctcaccctgggaatcggcctgctgctcctggcctggttcgaacgcctggactggagcggtcgcggcaaggccctggtggcgttcggcggagcgccgatgttcttctacctgctgcatctctacctactgaagctgctgtacctgctggcgctggcgatctggggcgccaaccggggcgactacttcggtttctcctcggtgccggcgctatggctgtgcagcatcctgctggccgtgacgctgtacccggcggtgcactggttcgccggtttcaaggcgcggcggcgggatatcgcctggttgaaatacttctga

SEQ ID NO: 318252 - DNA, 2127 bp, Pseudomonas aeruginosa
atgagagtcagtgtgtcgcttgtcctcggtgtcggcctcggttgcagcagtccggcgctctgggcggaaacggaaagtcccgcagagcttgaggtcctcactgtcaccgccgaagcggagcgcgcggagggcccggtgcagggctaccgggccaatcggacggccagcgcgacgcgcaccgacacccgtatcgaggacatcccgcaagccatcagcgtggtgccgcgccaggtgctcgacgaccttgacagcgctcgtatcgaacgggcgctggacttcgccggcggggtctcgcggcagaacaacttcggcggcctgacgatgttcgagtacaacgtccgtggcttcaccacttcggagttctaccgcgacggcttcagcgccaaccgcggctatatgaacgccccggacagcgccaccatcgagcgcgtggaaatcctcaagggaccggcctccagcctttacgggcgcggcgatcccggcggcacggtgaacctggtgaccaagaagccccaggccgagcgcttcgcccgcctgcatgccagcgccggcagttgggaccgctaccgctcgaccctggacctgaacacgccgctggacgaagagggcgacctgctctaccggatgaacctggcggtggaggacagcaagggcttccgcgactacgccgacggccagcgcctgctggtggcgccatcgttcagctggcaactggacccggacacctcgttgctggtggaagccgaggtggtgcgcaaccgccaggtcttcgaccgcggcaccgtggcgccgcacaaccacctgggcagcctgccgcgctcgcggttcttcggcgaaccggacgacggcaagatcgacaacaacaacgaaaccctccaggccaccctgcgccatcacttcaacgagcagtggagcctgcgcctggccagccactacaagcatggccacctggacggctacgcctcggagaactccagcctcgccgccgacggctacagcctgcgccgggagtaccgctaccgcgacttcgagtggcacgacagtatcacccagctcgacctgctcggcgatctccataccggctcgatccgccaccagttgctgatgggcctggagtacgagcgctaccacaacgacgaactgatcctgcgtagcatcccgtcgcgcaacccctatgccatcgacatccgccggccggtctacggccagccgaaaccacccttcggacgcgacgaccgcaaccacgaggaagtcgacgcgatggccctcaacctgcaggaccagatcgagttcaacgagaaatggcgcggcctgctcggcgtgcgcttcgaccgctaccgccaggacatgaacgccacgcgcctgaacaatggccgcttccgcgacaccagctcgcagcagacccagcgtgccgccaccccgcgcatcggcgtgctgtaccaggcgaccccggaggtcggcctgttcgccaacgcctcgaaatccttcaagcccaatggcggtaccgacatggccggcaaggccttcgacccggaggaggggcgcggctacgaggcgggggtgaagctcgacctgctcgatggccggctgggcttgaccctcgccgcgttccacctgaaaaagaagaacgtgctcaccgccgacccgagcaatcccggttaccagcagaccgccggcgaggcgcgcagccagggcttcgacctgcagttcagcggccagctcaccgagcagttgcggctgatcggcgcctacgcctatatcgacgccgaagtgaccaaggacgagaacatcgcccgtggcagccgcctgctcaacgtgccgaagcacagcggcagcctgatgggcgtctacgagtttcgcgaaggctggctgcacggcgccgacgccggcgcggcgctcaactatgtcggcgagcgcgccggcgacagcagcgacagcggcttcgaactgccggcctacaccaccgtcgacctgctcgcgcactatccgctggcgagcaatgcgaccctcggggtgaacgtcaacaacctcttcgatcgtcgctactacgagcgttcctataacaacgtctgggtcgcccccggcgagccgcgcaacctgaccatgagcctgaccctgaactactga

SEQ ID NO: 318253 - DNA, 792 bp, Pseudomonas aeruginosa
atgcaaggacgcacaccgctgctggaaaccctccgcgaactggaatgcgagattcgactgctcaccgtctatgcccgcgagtgttgcggctgctacgagatcctcaggcgcaagctcgaccgtctgagcggactgatcggggaggattgcagccgggcgcagtggcaggccgattcggacgaccctgcgttgcaggcgctcggcctgcgcctgcgcgacgcggcggtgcaggccctctgcgaactggagaagcacctttgccagggcgtgctgcatgaacccggcgagatgggccgctacctgggtagcctgctggaatccatccgcggcgaactcgacagcgccgggatagatgccgatgcacgggtcctgttcgtcggctccggtgccctgccgacctcggccctggtgctggcgcgggaggtcggcgcacatttgtgctgcctggacatcgacgaggaggccctgggctgtgcccgcgagatcgcccgctgccaggggctggaggcgcgcatgcagttttcctcgctgccgccggcggaactggcgttttcccgcgatgccacgcatttcctgatcgcttcgctggtgcagcagaaaagcgcggtgctggcgcagatccgccaggtcatgcgcgccgacgccaaggtcctgctgcgtcacggcagcggcatcaagggactgttcaactacccggtggaaccggccgaactggagggctggcgggtttgcgcggagcgggtcagccagccgctgtacgacaccctgatcctggagaaggccggtcgatga

SEQ ID NO: 318254 - DNA, 1302 bp, Pseudomonas aeruginosa
atgaatgccgctgatgagagcctgggcaacgtcctgctggtcggtctgggcgcggtggcgatccaggtcgcgctggacctgcgccgccacggtgccggtcgcctcggcgcgctgaaccatcccggccggcgcagccagcggatcgccgaggccctggcgcgcggcgcctgcctgcagctggaagggcaggggcagcatcgctggctgtccggcaacgccgcgctggacgtcttccaccaggaccccgctgagcttcgcgacgattggcagaccctggtgctctgcgtgccgggcgacagttacctggacgtggtccgcgggttgccctgggagcgactcggcggggtgcgcacgctgctgctggtgtccgccttcatcggcgccaacctgctggtgcgcagcgccctgccggcggggtgccaggcgaccgtgctgagcctgtccagctactacgcggcgaccaaggtgatcgacgagacacaaccgctgcgggccctgaccaaggcggtcaagcgcagggtctacctgggttccagccggccggactgcccggcgcgggagacctggcggcgagtcctggccggcagcggggtggaggtggtacccctggcgacgccggaagcggcggagggccgcaacgtcaccacctacgtgcacagtccgttctttctcggcgagttcgccctcgcccggatactttccgagcaggggccacccggtttcatgtacaagctctacccggagggacctatcacccccggggccatcggcgccatgcggcggctgtggtgcgagctgagcgaactgttgcggcggatgggcgccgagccgttgaacctgctgcggttcctcaacgacgacaactacccggtgcacgagacgatgctgccgcgcgcggccatcgacggcttcgccgaggccggcgccgagcgccaggaatacctgctgttcgtgcgctacgcggcgttgctggtcgatccgttctctccggccgacgagcagggtcgccacttcgacttttccgccgtgccgttccgccgcgtcagtcgcgacgaagacggactctggcggctcccgcgggtgccgctggaggactatcgcaagctggcgctgatcgtcgcgctggccgcccacttcgacctggccatgccgcaggcgcgcagcctgttggcgagctacgagaacgccgtgtcccgattcatcgattgccaaggagcgagccagtgccatccaagcctgtatccgatcgacagccgtccggcggcggacgccatctatcgccaatggtgctcgacctgctga

SEQ ID NO: 318255 - DNA, 855 bp, Pseudomonas aeruginosa
atggtgctcgacctgctgaagagcggggtgctgctggcggtgctggcgtccttcaccttcagcgtgatgaacgccctggtcaaggaagccagcgccaccctgccggctgccgagatcgtgttcttccgcagcgccatcggtaccctgctgatctatctgctgatgcgccaggccggtgtcgccctgtcgcgccagggcgtgccgatgctgctggtgcgcggggtgatgggggcgctgtacctggtctgctatttctacgccatcgcccatatcccgctggcggacgcgagcatcctggcgcacatgtcgccgttcttcgtcatcctcttctccgcgctgttcctcggcgagcggattccccgggcggtctattggctgttgctggtggtggtgctcggcgcgctgatgatcgtcaagccgttcagctattccagctactcggtatacgccgtggtcggcttgctcagtgcggtgttcgccgccggtgcctcggtggcgatccgccaactgagcgcgcggcaccatacctacgagatcgtcttctacttcctggcggtggccaccctggtggccatcccgctgatgtggaacgacttcgtggtgccggcgacgctgcgcgagtgggggctgctgctggccatcggggtcgtatcgctactcggccaggtgttcctaacccgcgccttcagtcacgagagcgcgaccatcgttgcggtgacccgctatatcggcatcgtcttcaacgccggctggggctggctgttctggagcgaggtgccggacgcactgaccatcgccggcggcgtgctgatcgtggtggcgtgcatcgcgctgtcgcggacgaagaagggctga

SEQ ID NO: 318256 - DNA, 618 bp, Pseudomonas aeruginosa
atgtatcacggtgaaagactcaatgcctggacccacctgatcggtgcggtcgccgcctgtaccggcgccgtctggctgacggtccaggcgagcctcaacggcagtccgtggaagatcgtcggggtcggcgtctacggcgtcaccctgacgctgctctacagcatctcgaccgcctaccacagcgtgcgcgggcgagcgaaggtggtgatgcgcaagctcgaccacctgtccatctacctgctgatcgccggcagctacacgcctttctgcctggtcacgctgcgcggtccctggggctggacgctgttcggcatcgtctggggcctggcggtactcggcatgctccaggagatcaagccacgctccgaggcgcgagtgctgtcggtggtgatctacgcggtgatgggctggatcgtgctgatcgcggtgaaaccgctgctcgccgccctcggcagcgccggcttcacctggctggcggccggcggcgtgctctataccgtagggatcgtcttctatgcctatgaccaccgcttccgccactggcatggcatctggcacctgttcgtgatcgccggcagcctcctccacttcgtggcgatctggcgctacgtactctag

SEQ ID NO: 318257 - DNA, 798 bp, Pseudomonas aeruginosa
atgaacgaacagattggcaatggcgtcgccctggtcaccggcgcctcttccggaatcggcgcgacctacgccgagcacttggcccgccgtggccacgacctgttgctggtggcgcgcgaccggcaacgcctggaagccctggcggatcgacttcgccaagcccacggggtcagggtggagatcctgcgcgccgacctgtccgagcgcgacgataggttgcgggtcgagcgacggttgcgcgacgacgcctcgatcgcgttgctggtgaacaacgccggcgtggcgatgaacggtccgctggccgatgccgacatggaccgggcggagcggatgatcgccctcaacgtagtggccctgacccgcctggctgccggcgcggcggaggggttccgccggcgtggcggcggcgccatcgtcaaccttggttcggtggtggcgctggcgccggagttgttcaatgccgtctatagcgcgaccaaggcctacgtgctgagcctgagccagtcgctgcagcacgagctggccggcagcggcgtttacgtccaggcggtgctgcccggcgtcacccgtaccgagatctgggagcgcagcggcgccggaatcgccgggattcccgcggagatggtgatggaggtcgaggatctggtggaggcagcgctggtcggtttcgatcggcgtgaagcggtgaccatcccgtcgttgccggatgcggccgattggcaggcgctgatgacggcgcgggccaggctcgcgcccaatctgtcgcggcagcggccggccgagcgctacctcggctga

SEQ ID NO: 318258 - DNA, 561 bp, Pseudomonas aeruginosa
atgcgttatcccgaagaccacaagcagaagacccgccggcgtatcgtcgaggaggctgcccggctgttccgccaggacggcgtcggcgccaccgggctgcaaccgctgatgaaggccctgggcctgacccatggaggcttctacgcgcacttcaagtccaaggacgacctggtggaaaccgcgttgcggcatgccgcggcgcaactcgacgaaatcaccgcgcccctggcggaggcggaacgaccgctggcgctgctgatagagcagtacctgtcgccgcgtcaccgcgataaccccggcgccggctgcccgttgccgaccctgtcggcggaactcggccagcgcggcacgccgagcccgaccaccgacagcatcgtgcgcaagcgcctggcgatgatcgaagcggccctggagggcgaggacgcaggcgagcgcgccgtgctgctgctcgcttcgctggtcggcgcgctgcaactgtcgcgcagcgtgcaggatgaggcgctgtcgcaacggatactggaagcgacgcgcaagaagctgctggagcagatggagcgctag

SEQ ID NO: 318259 - DNA, 540 bp, Pseudomonas aeruginosa
atggaacagcccggccgcgaagatcgcctgaacgcctggatcgccaccgagcgggccgcccgcgcccgcctcggcgccagcggaaccctggagctggcgcaagtcgccgcgctctccccgcaggagttcttcgaccgcatcggcagcggccaactgccctgtccgccctacggcgaactggtcgacttcgttcccatcgagtggtccgaagggcgcttcctgttccagggcaccccggaccgccgccactacaatccgctgggtagcgtgcacggcggctacgccgcgtcgctgctggactcctgcatgggctgcgcgatccatacccggctccaggccggccagggctataccaccaccgacctgcggatcagctacctgcgcgcgctgaccgacaaggtcggcccggtgcgcgccgaaggccgggtggtgcacctcggccgctcgacggcggtcgccgagggccggttgtacgatgtcgacgaccgtctctacgccgtcggctcgaccacctgcctggtcctgcacatggccggatga

SEQ ID NO: 318260 - DNA, 1401 bp, Pseudomonas aeruginosa
atggaaagctatgacgtgatcgtgatcggcgccggtccggggggctacaacgctgccattcgcgccggccagctgggcctgaaggtggcctgcgtggagggtcgcgaaaccctcggcgggacttgcctgaacgtcggctgcatgccgtccaaggccctgttgcacgcctcggagctatacgccgcggcgagcggcggcgagttcgcccggctcggcatccgggtcagcccggaactggacctggcgcagatgatgaagcagaaggacgagagcgtcgccgccctgacccgtggcgtcgaattcctcttccgcaagcacaaggtgcagtggatcaagggctgggcgcgcttgcaaggcgagggccgggtcggcgtggcccttgccgacggcggccacgcgcaactggaggcgcgcgacatcgttatcgccaccggttcggaaccggcgccgctgcccggcgtgcctgtggacaaccagcgcatcctcgactccaccggcgccctggagttggtcgaagtgcctcgccacctggtggtgatcggcgccggcgtgatcggcctggagcttggttcggtctggcgccggctgggcgcacaggtcacggtgctggagtacctcgagcggatctgcccggggctggatggggaaaccgcaaggaccctgcagcgcgccctgacccgccagggcatgcggtttcgcctcggcacccgcgtggtcgccgcgcgcagtggcgagcagggcgtcgaactcgacctgcaaccggccgccggcggcgctacggaatcgctgcaggcggactacgtgctggtggccatcggccggcgcccctataccgaaggactggggctggagacggtcggcctggccagcgatcgtcgcggcatgctggagaatcagggacagcgcagcgcggcgccgggcgtctgggtgatcggcgacgtgacctcgggaccgatgctggcgcacaaggccgaggaagaggcgatcgtctgcatcgagcggatcgccgggcatgcggcggagatgaacgccgaggtgattccgtcggtcatctacacccagccggaagtggccagcgtcggcctcggcgaggagcagctgcaggcggcgaggcgcgagtacaaggtcggacgcttcccgttcagcgccaacagccgggcgaagatcaaccacgagagcgaaggcttcatcaagatcctctccgatgcccgcagcgaccaggtgctcggcgtgcacatgatcgggccgggcgtcagcgagatgatcggcgaagcctgcgtggccatggagttcagcgcctcggcggaggacctcgcgctgacctgccatccgcatccgacccgctccgaggcgctgcgccaggcggcgatggacgtgcatggccgggccatgcagaactga

SEQ ID NO: 318261 - DNA, 456 bp, Pseudomonas aeruginosa
atggcccaggcaatcgtcgcctacctgcactacctgtcgatcttcctgctgttcgccctgctggtgttgcagcaccgcctgctgcgcctgccgctggacctggagcgcgcccgcagcctggcggtgatcgaccgcggctacggcctctgcgccctggcggtactggccagcgggttggcgcgggtgctgtggtacggcaagggcgtcgactattaccggcacaatggtctgttccacgccaaggtcgggctattcgtcctcgctgccctggtctcgctgttgccgaccgttaccttccttggctggcgcggcgccctcaaggccggcgaagtgccggcggtgacgccggcccggggccggcgggtggtcatggcggtgcgcctgcaactgctcctgctgctggtcattccgttgctggctacgctgatggcgcgcggcttcggcatgcgcggctga

SEQ ID NO: 318262 - DNA, 840 bp, Pseudomonas aeruginosa
atgaccccgctgacgcccgagcagacccatgcctacctgcaccatatcggcatcgacgatcccggtccgccgagtctggcgagtctcgaccgactgatcgacgcgcatctgcgccgggtcgccttcgagaacctcgacgtgctgctcgaccgtcccatcgagatcgacgccgacaaggttttcgccaaggtcgtcgagggcagccgcggtggttattgcttcgaactcaactcgctgttcgcccgcctgctgctggccctcggctacgagctggaactgctggtggcacgggtacgctgggggctcccggaggacgcgccgctgacccagcaatcgcatctgatgctgcgtctgtacctggcggagggcgagttcctggtggatgtcggcttcggctcggccaatccgccgcgagcactgcctttgccgggcgacgaggcggacgccggacaggtgcattgcgtgcgcctggtcgacccgcacgccggtctctacgaaagcgccgtgcgcggtcgcagcggctggctgccgctgtaccgcttcgacctgcgcccgcagttgtggatcgattacatcccgcgcaactggtacacctcgacccacccgcacagcgtgttccgccagggcctgaaggccgccataaccgagggcgacctgcgcctgaccctggccgacgggctgttcggccagcgcgccggcaacggcgagacgctgcagcgccaactgtgcgacgtcgaggaactgctggacatcctgcagacccgttttcgcctgcgcctcgacccggcctccgaagtgccggcgctggcgcgacggctggcgggactgatctccgcctga

SEQ ID NO: 318263 - DNA, 135 bp, Pseudomonas aeruginosa
atgttccatagaagcctgaacgaaacggctttttcggttgacctcgtctggcaagaggtctataaaacccccgcccgcagagccgggcactttctttccccctacgaagagagccatggacagtattcccagtag

SEQ ID NO: 318264 - DNA, 219 bp, Pseudomonas aeruginosa
atgaacttcgagaattcggtatcccccggcgtatccgccttcgtggcgaagatgcgcgtgcgcgccgcgcagtcccccggcgcgatccttcccggccacggctatcctgcgagcctcgcctggcgtgtcgacccggccggcggtcgcctggagtatcgccgcctggagacgcaggtcgaagagaaccctgagagcggtcgccgcccgatgcgcggctga

SEQ ID NO: 318265 - DNA, 2712 bp, Pseudomonas aeruginosa
atgagcgtagcgacccaacgcaatacccagctcgataccgagcgccgcaacgaccgactgtccatgcgcgccgcccgcgaagcgcagaacagcctggaaaccaccctcaccaatgtccgcggtcgccaggacggcctcgaccaggccgaggccgccgcccggctgcacgccgacggccccaacgaagtggcccacgaccgtccgccacacgtcctggtgcaactgctgcaggcgttcaacaaccccttcatctacgtgctgatgacgctctctgcgatcagcttcttcaccgacttctggctgcccctgcaggacggtgaggaaaccgatctcaccggcgtcatcatcgtcctctgcatggtcctggtcagcggcctgatgcgcttctggcaggaataccgttcgggcaaggccgccgaggcgctcaaggccatggtgcggaacaccgccaccgtgctgcgccgcgacgagcgcgggatgcgcggcgagctgcgggaaatccccatgggcgaactggtggtcggcgacatcgtgcgcctgtccgccggcgacatgatccccgccgacatccgcctgatcgaatcgcgcgacctgttcatcagccaggccgtactcaccggcgaggcgctgccggtggagaaatacgacaccctcggcgcggtccgcgagaagtccgccaagcggatcgccgccgaccagcaggacctgctcgaactgccgaacatctgcttcatgggcaccaacgtggtcagcggcacggccaccgcggtggtggttgccaccggtgcgcgcacctatttcggttcgctggcccgttccatcgtcggttcgcgggcgcagaccgccttcgaccgtggggtgaacagcgtcagttggctgctgatccgcttcatgctggtgatggtgccgatcgtgctgctgatcaacggtttcaccaagggcgactggaccgaggcgttcatgttcgctctcgccgtggcggtcggcctgaccccggaaatgctgccgatgatcgtcagcgccaacctggccaagggcgcggtggcgatgtcgcggcgcaaggtggtggtcaagcgcctcaacgcgatccagaacttcggcgccatggacgtgctctgcaccgacaagaccggcaccctgacccaggaccggatcatcctcgagcatcacgtcgacgttgccggccggcgctgcgaccgggtcctgcaaatggcctggctgaacagcttccaccagtccgggatgaagaacctgatggaccgcgcggtggtcgccttcgtcgaacagaacccgcgcatcacgccgtcggatgcctggcgcaaggtcgacgaactgcccttcgatttcgtccgtcggcgtctctcggtgatcctcgagggcaaggacggcgaacagctgctggtgtgcaagggcgcggtcgaggaaatgctcgagatcgccacccgcgtgcaccaggacggtgtcgacctgccgctcgacgaggaacgccgccgggccctgctggcgctggccgagcaatacaaccgcgacggcttccgcgtgctcctgctcggcacccgcagcctctcgcgcacggagtcccaggcccagtacggcgccagcgacgagcgcgacctggtgatcgccggcctgctgaccttcctcgatccaccgaaggaaaccgccggcccggccatcgccgcgttgcgcgagaacggcgtggcagtgaaggtgctcaccggcgacaacccggtggtcagcgcgaagatctgccgcgaggtcggcctggacgtcggcgagccgctgctcggtcgcgacatcgacctgatggacgatgccaccctgcaacgcctggccgaggagcgcacggtgttcgccaagctgacgccgctgcagaagtcgcgggtgctcaaggccctgcagggcaacggacacaccgttggcttcctcggcgacggcatcaacgacgcccccgcgctgcgagatgccgatgtcggcatctcggtggacagcggcaccgacatcgccaaggaatcggccgacatcatcctcctggaaaaaagcctgatggtcctggaggagggcgttatcaagggccgcgagaccttcggcaacatcatgaagtacctgaacatgactgccagctccaacttcggcaacgtgttctcggtactggtggccagcgccttcatccccttcctgccgatgctggcgatccacctgctgctgcagaacctgatgtacgacatctcccagctgtcgctgccgtgggacaagatggacaaggaattcctcgccaagccgcgcaagtgggactcgaagaacatcggccgcttcatggtctggatcggcccgacctcgtcgatcttcgacatcaccacctacgcgctgatgtggttcgtgttcgccgccaacagcccggaaatgcagtcgctgttccagtccggctggttcatcgagggcctgctctcgcagaccctggtggtgcacatgctgcgtacccagaagattcccttcatccagagcaccgcggcgctgccggtgatgctgatgaccgggctggtgatggcgctgggcatctacgtgccgttctcgccgctgggagcggtggtcggcctgcagccgctgccgtgggagtacttcccctggctggtgggcacgctgctctgctactgcgtcaccgcgcagaccatgaagaccctctacatccgccgcttcggccagtggttctga

SEQ ID NO: 318266 - DNA, 777 bp, Pseudomonas aeruginosa
atgaccctgcacgaccggcgcccgcgggcgccccttttccaaccgctgccggccgcgctgcgacgcgccctgtcctggcgcctgggcttcgtcgccgccgcgctcgcctgcgtcctgctgctggcgctgctgtccgaggctcgcgccgcgggcggcgcctaccgggtcgacgacggcgagatcgaccccgtcggcgaatgcaacctggacgcctggcaccagcgcgaacgccaccacggcaaccgctaccagtcggtgctgtcgccagcctgcaccttctccgccctaccatcggtgcagctcggcgcggcgctggtgcgcgagggcgacgcaggcgatcggcacagccgcctcagccccgagctgaagacaccgctgctggcccgcgacgacctcggcctggcgttggccttcgcgctctcggcggatctctacctggaccgccggcacgccttcgaaggcgccggcttcaacctgccgctgagctaccagccgttcgaggccctgcgcctgaacgccggggtcggcctggggcatgcctacgccgagggcgagcgccggcatcgctggaactggggcatgggcatggaataccgcgttggccagccgttgaccctggtcgccgaacgcttcggcgagtcggccggcgacagcggctggcaggccggaccgcggctgcacctgggcgaacggctggacctcgatctgctggtcggcggccacctgcgcggcgagcgcgagcgatggctggtctcgggagcgaccttgcgtttctga

SEQ ID NO: 318267 - DNA, 210 bp, Pseudomonas aeruginosa
atgaacgtcgtacgcaaatgcctgggcgcgtctcgccgcgcgctctgtggcctggcagcacggctgctggcgaaggccgcgcacctgctgatggtgatcagcgtgcgcgcatacgccagcggccgcctgagccaggtcgaagtgaaatacctgctggactgctcgagcgcgctcaaccgtgcctcgctcaggctggccatgggtcaatga

SEQ ID NO: 318268 - DNA, 1668 bp, Pseudomonas aeruginosa
atgctgggaaccatcctccttatcaacctggccggtgccgtggccctcctgttgtggggcacgcacatggtctccaacggcgtgctgcgcggtttcggcactgcgctgcgcaactggctcggccgccacctgggcaaccgctggctggccctgctcgccgggctcggcatcaccggcctgctgcagagcagcaccgccaccagtctgatggcagcgtccttcaccgccagtggcaccctgggcctggcgccggcgctggcagtgatgctcggcgccaacgtcggcaccactctggtggtgcaactgctcagcttcgacacctcgttgctggcgccgctggccctgctgtccggcctgctgctgttccgcctgggcgacggtccgcgcctggagagccttggccagtgcctgatcggactcggtctgatgcttctggcgctggcgttgctcggccattccctgcagcagatcgaggcctcgccagcctttgtcgcggtgatccacggcctcgaaggcgatccgctgatcgccctgctgctcgccgcgctgctgacctgggcctgccattccagtgtcgcggtggtactgctggtggcgtccctggcccaggccggactggtctcgctgcccatcgccctggccctggtgctcggtgccaacctcggcggcgccttgccggcgctgggggtggccggtagccgggtggcgcggcgcctgccgttgggcaacctgctggtgcgcctgctcggttgcctgctggtgctgccctggctgacggcgctggcgcagccggccaacgcactcggtggtgcggcggcggtctggttccacagtgctttcaacctggccctggcactgctggcgatcggcttcaccggaccccttgcggcgctgctcgcgcgcctgttgccggaagaggcacagtccgacgagccgggcatgccgcgctacctcgacgaagccgggctggaggtggccaacatcggcctggccaacgctactcgcgaagtcctgcggctggccgacatggccagtctgatgctgcgcgccaccagcggcctgttgcagcgaccggaggcgaaggtggcggcggaaatccgtcgccaggaccaggccctcgaccagttgagtgcggcgatccgcgcctacctggcagacctcggccaggacggcctcggcgacagcgacgccgatcgtgcccaggaaattctcctgttcgccatcaacatcgagcacatcggcgatctcgtcgccaacagcctgctgcccctggcgatgcgctgggccgggcgcagtcgcgccggcagcgagttcgagctgggccgcatgctgccgttgcaggcggcgatcgaggagagcctgcacctggcgatcagcgcgttccttctcgaagacctggacgccgcgctgcgcctggtggcgcgcaagaagttgctgcagcgactggaggccgatgccagtcgcgagcgcttccgtcgcctgcgcgacgatcgtggtgcctgggtggagtccggtgacgtgttccagcgcattctccgcgactaccgacgcatccaccatcatgtcaccgccctggcctatccgctgctcgaacgcagcggcatcgatccgatggcgaagcggccggacgagccagggcaaggggagggatcggcatgcgcctcctga

SEQ ID NO: 318269 - DNA, 369 bp, Pseudomonas aeruginosa
atgcgcctcctgatctgcgccggacgccatttcaaggacgccgaacgcctgcgcctggcgctcgaccagtgccacggcctgcaaccggtggcgctgctcggccacctgctgcatgccggcagtggcctgccggacgaggccgagcgctggtgccgcgagcgtggcgcggattcgcgcgcctacgattatccggagcgcagtggcagcgacaacgccctgcgcgagtatggcgaggccgtcttcggcgatgccgcgccggacctggtgctggtgtttcccggtgggcgcctggccagcgaactgatacaggtcgcgcacgccgccgacgtcccgctgatgctcgcctatcgtccgctgtcggcgccctga

SEQ ID NO: 318270 - DNA, 1362 bp, Pseudomonas aeruginosa
atgagcctgttgcgcgatgcctggcgccacgccccgacccaccacagggtctgggcgctggccgggccgatgattctgtcgaacgtttccgttcccctggtgcacctggtggacagcacggtggtcggccacctgccgcacgcctaccagctcggcgcggtagccgtgggcggcagcctgtacaccctgatggtcggcgtgctcggcttcctgcgcatgggcaccaccggcttcgccgcccaggccgccggccgcgacgatggcggcgcgctgcgcctgatcctcgcccagggcctgggcatggcgctgctcctggccctgctgctcggcgcgctggccctgcccctgagcggctgggccctgcaactgatgcaaccgtcggcggaactgaccggcgaggcccgcgccttcttccatacccgcctgctcggcctgccggcggccctggccagctacgcactggtcggctggttcctcggcacgcagaacgcacgggcgccattggcgatcctgttgaccaccaacctgagcaacatcgccctggtgctctggttcgtccacggcctcgactggggcgtgcaaggcgcggcccgcgcctcggtgctggcggaatggagcggcgccctgctcggcctggccctgacccgccgcgacctggcccggcgccccgggcgggcgcagtggcaacgcctgcgccactggctgtcctggctgccgctgctgatggtcaaccgggatatattcatccgcagcctggccctgcaactggtgtttttcctgctcaccgtacagggcacccgcctcggtgacgccacggtagccgccaacgccctgctgctcaacggcctgctcctgacgtcctacgccctcgacggtctcgcccacgcggtggaggcgctctgcggccacgccatcggcgcccgcgaccgagccgccctgcgccgcgcgctggtggtagccggtggttggtcgctgctggcaagcctggcgttcgccgcgctgttcgccttgttcggccacctgttcatcgacctgcagagcgacatcgccggcgtccgcgaagtcgcctacgcctatctgccgtacctggcctgcctgccgctgctggggatgtggagctatctgctcgacggcctgttcatcggcgccacccgcgcccgcgagatgcgtaacgcgatgctcgtcgcggtggccgccagcctgcccctcggctggctgttgcaggggctgggcaaccacgggctatggctggcgttcctcgccttcatgctgctgcgcgggctggtcctggccgcctacggctggcgcctgacccgccgcgatggctggttcgccgctcagggcgccgacagcggacgatag

SEQ ID NO: 318271 - DNA, 363 bp, Pseudomonas aeruginosa
atgctcctggggcgtttcgtctcggtcggcgccggtgccaccgccgttcattacctggtgctgaccctcctggtcgagggcttcgccgtcggcgccgccgtggccgccgcgacgggagcaggctgcggggctctggctgcctacctggggcatcgccggaagactttccgccaccgtggcccggtgttccgttcgctgccgcgcttcttcgccgtcagcctgctttgcgtactcggcaacgccgtcctggtgttgctgctcggcgacctcgccggactcgactaccgcctggcccagctcgccgcgaccggcgcactgctgttggcgacctatcaccttcatcgactctggaccttctcatga

SEQ ID NO: 318272 - DNA, 975 bp, Pseudomonas aeruginosa
atgatgatcgaaccttccctggcgtcgaagctcgaggccccctgcctgctcagcgtggtagtgccggtgttcaacgaggaggcggtgctgccggccttccaccagcgcctgggcgccgtgctcggcgaccttggcgacgattgcgaggtgctctatgtcgacgacggcagcaccgaccgcagcgcggcgatcctcgcccagctacaggccgccgaccgccgggtgggcgtggcccgcttcacccgcaacttcggcaaggaacaggcgatgagcgccgggctcaagctgtcgcgcggcgccgcggtgatcgtcatcgatgccgacctgcaggatcccccggaactgatcccgcagatgctcgacgcctggatcggcggcgccgaaatggtcaacatgcgccgccgcagccgggccggcgaaagctggctgaagcgcgcctcggcgagcgccttctaccggctgatcaaccgcctcagcgaggtgccgatcccgcgcgacgtcggcgacttccgcctgctcgaccggcgggtggtcgatgccctttgcgagctgccggaaggcaatcgcttcatgaagggactgttcgcctgggtcggtttccgccaggtcgatatcgcctatagccgcgccgcccgcgtcgctggccacagcaagtggcgctactggcggctgtggaacttcgccctggaaggcatcaccgggttttccaccgcgccgctgaaggtcgccggctacctcggcctgctcagcctgttggcggccctggcgaccctgctcgccgggatcttcggccagcaggagatccacgaacactggccggtgatcgccgcgctgttcctgatcggcggcctgcaactgctggccatcggcgtgtgcagcgaatacctcgggcggatgaccatggaagcgcggcgccgcccgctctacctgatcgaccgctacctgccggcgcaggtcggcggggccaatccgtga

SEQ ID NO: 318273 - DNA, 1437 bp, Pseudomonas aeruginosa
gtgagggcgctgcgcggctggccgctggcctggttcctgctcgccctggccttcgccatccgcctgctgagcctgggcagctatccgctgatggacaccaccgaggcccgctatggcgaggtggcgcggaagatggccgaactgggcgactggatcacgccctggtacgacgtcggcgtgccgttctggggcaagccgccgctggccttctggctcagcgccggcggccagcttctgctcggcgccaacgagttcgccagccgcctgccgcactggttgctgggcgtgctggtgctgtggctggtatgggactggcaggctcgcgaagatcgtcggcaggcgcggatcgcctgcgtcctgctgggcagttcggcgctgttcttcgtcgcctccggggcggtaatgaccgacatggccctggccctggcgctggtcctggccatgcgcggcttctggctgggcctgcatggcgcggagggaatccggcgccgcgagggctggctgatgttcctcggcctcggcctcgggctgctggcgaaggggccgctgacgctgatcctcgccggactgccgatcggcctgtgggccttgctggagtggcgctggcgcgcgctctggcggggcctgccatggatccgcggaagcctgctgatgctcctggtggccgcgccctggtacctgctggcggagttgaagacgccgggcttcctcgagtacttcctactcggcgagcattggcagcgcttcgtcaccgccggctgggacggcgaccgctacggcaatgcccacgcctatccctacggcagcgtctggctgttcctgctggccgccgcgtttccctggagcctctggctgccgctgctgctctggctgggctggcgccagcgcggggaggtggtcgatggcgtcgcctcgcgcaggcgctactggctgttctggggactggcgccgtgcctgttcttcaccttcgccggcaacgtcctctggacctacgtgctgcccggcctgccggccctggcgttgctcgccgccgacctgctgcgcgcgccgctggcgcgcagcgcctggctgcggcgtggtgggttggcttgcctggcactgaccccattgctgttcgcgctgttcctcggctccctgttgctgggctcgcgcgccgagcagaagtccaccgccgcgctgctggccagcgacgccggctggcgcgagcggccgctggtgttctggccgaagcggccgtactcggcagtgttctacagcggcgggcgggcgcaacgggcggaggacagcgagctggccggctggttgcgtcgcgacgccctgctggcgatccgctcgcgttcgttcggcgccttgcccgacgaggtgcgccagcgcttgcgctgccggccgccggtgggacagtaccagctatgccagggcgtggcgccgcctggctga

SEQ ID NO: 318274 - DNA, 495 bp, Pseudomonas aeruginosa
atggcgggaggacccacggcactgacgctcatcgcccggacgagcgcaacgggcgcgcagccactatcattgcgcgcccgttttccccgcacccgcccgccgatgaagaaaatcccgctcgccgccgccgaccccgaccgcctggatacctgggtgaaataccgcgaaggcctgtgcggcgagtgcaacgcgacctgctgcacgctgccggtggaagtgcgcatcgacgacctgatccgcatgcgactggtcgacgagttcgagcgcgaggagccggccaagcgaatcgccaagcgactggaaaagaatggcgtgatcgagcacttcaaccacaagcgcgagatcttcaccctcacccgcatggccaacggcgactgcttgtacctcgaccgcaagacccgcctgtgcaccatctatgcccgccgcccggacacctgccgcaaccacccgcgcatcggcccgcgtcccggctactgcgcctaccggccgaggtag

SEQ ID NO: 318275 - DNA, 1236 bp, Pseudomonas aeruginosa
atgtccttttcccgcactctcggcgacggccggatcaatctcgaacagcaacgcaagcgcgccaaggagctgttgcgccagtggcgccgcgacccggccagccgtacagggcttccggggcaggagccgcgcctggccgacgcccagtggcaggtggcgcgcgaactgggcttcgccagttggccgcgactcaaggtgcatgtcgacgccatcgccttcgccagccgccaccccgatctggtcggcggcgatgaggccgcgaccctgcacctgcgctgcggcaacgacatcgcccacggcctgaagctcgccggctttcgcggcggcttccggatgttcgccgacccgctgaccatgggaccggtgccgaacctgccgttgcccgagttcctcgccctgcgcagcgactacctgagccgcgccttcgagctcgacccggccgacgcccaggcccgccagcgccaggaatacgccgggctcgagcggctcggcgaatactcgcgggtggcgctctggtgcgaggcggatgcctacgaccagttgttcctggtccgggtgctggcaggaatgcagacgccgccggagcacctggaactgatcgagatcgaccgcgtgccaggcgtcgagcgcttcgtcggcatcggccaactggcgcctgagctgctcgcctggctatggacccggcgtcgcccgctggacgccgaagccctggcgctggcccgcgcggcctgggacgcctaccgcgatccggcgccactgcgctgggcgcaactggccgccgcgccgaccccggcgctaccgttgctggggccggcgctgcgtcggcaactgcatgaactgccggccctgcgcgacggcctgtcgctgagcgaacggctgaccctggagatcgtccgcgacggcgagcggccgagcgccggccaggtcttcgccgagctgaccgcacggcgcgagccgctgccctatctcggcgacctgatgttccgcgtcctgctccgcgcgctgctggaagagcccggcgcgctgctgcgcacgccggcaccggaactgccctgggaacgccagccgctggccctgaccgctgcgggccgcgaggtcctggccgggcggcgctaccgcctcgacctcggcgcccccgaacgctgggtcggcggcgtatgcctgcgcgccggcaccgcgcactgggcgctggacgagcaggaccggccggtatggcgggaggacccacggcactga

SEQ ID NO: 318276 - DNA, 450 bp, Pseudomonas aeruginosa
atgcccactccaccctggtggctgttcgtcctgcccctgctcgccggcgcctgcctaccgctgcaggcagggatcaacggccagttggccaagcaggtgtccagcgtcctcgccgcggcactgatctcgttcttcgtcggcaccctcgggttgctcgccctgactctctcgcagcgcgagtttcccggcctggcggcattgcgcgggctgagctggtggcactggtgcggcggtttcctcggcatgttcttcatcttcatcgccgccttcgccgcaccgcgcatcggcgcgctgatgttcatggtgctggtgctcaccggccagctgggcatggccatgagcctcgaccacttcggttgggccggcttccgcgaggcaccgatcagcgcgctgaagctgggcgggttggcactgatcggcgccggcatctggatgatccgcaagggctga

SEQ ID NO: 318277 - DNA, 2046 bp, Pseudomonas aeruginosa
atgcgcaacccctacccgccgctcgccgccgctccctatccgcacctgctggccccgctggacctgggcttcacccgtctgcgcaaccgcgtggtgatgggttcgatgcacaccgggctggaggatcgtctgtgggacttcggcaagctcgctgcctactaccgcgagcgtgcccggggcggcgtcgggctgatcgtcaccggcggtttcgcgccctgccgcgaaggttggctgctgcccttcggcagcagcctcaccagcgccctggaggtgcccgcccatcgtcgcctgacccaggcggtgcatgccgagggcggcaagatcctgctgcagatcctccacgccgggcgctatggctaccacccgatggcggtgtccgcctcgccgttgaagtcgccgatcagttggttcaccccgcgcgagctctccgagcgcggcatccgcaagaccatccgcgccttcgtccgttgcgcgcggctggccaaggccgccgcctacgacggcgtggaggtgatgggcagcgaaggctacctgctcaaccagttcctctgcccgcgcaccaatcgccgcgacgaccagtggggcggcccgctggaaaaccgcatgcgcctggcgctggagatcgtccgcggcatccggcggatcgtcggccaacgcttcatcctctgctatcgcctgtcgctgctcgacctggtcgagggcggcaatacctgggacgaggtgcggcgcatcgccctggccctggaggaagccggaatcaccctgctcaacaccggcatcggctggcacgagtcgcgcgtgccgaccatcgtcacctcggtgccgcgcgcggccttcgccgaggtcagcgcacggctgcgccacgagctgaaggtgccggtgatcgccagtaaccggatcaacacccccgaggtcgccgaatccctgctcgccaccgacaaggccgacctggtgtcgatggcccggccgctgctggccgacccgcagttcgtggccaaggccggcgccggccgggccgaggagatcaacacctgcatcgcctgcaaccaggcctgcctcgatcatgccttcgccaaccgccgcgccacctgcctggtcaacccgcgggcggccttcgagaccgaattgcgctaccgcaaggcgcgcacgcagaagcgcatcgcggtgatcggcgccggccccgccgggctctccgccgcctgcgtggccgccgagcgcgggcatcgggtcagcctgttcgaggcgagcggggaaatcggcgggcagttcaacctggccaagcggattcccggcaaggaggagttccgcgaaaccctgcgctacttccgcgtgcgtctggaacgcctcggcgtcgacctgcgcctcggccaccgggtgcgccagggcgagctggacggtcagttcgacgacgtggtggtggccaccggcatccagccacgccggccaaggatcgacggcatcggcggaccgaccgtactcagctacgtggacgtgctgcgcggcgcgccggtgggcgcgcgggtcgccatcgtcggcgccggcggcatcggcttcgacgtcgccgccttcctcgtcgccgcgcccagcgacggccagccgcgggcgctcggcgaatggctcgcggaatggggcgtggacctcgacaacagccagcccggcggcctccgcgaacccgctccgacgcggccggcgcgccaggtctggctgctccagcgcaagcccggcgctcccggcgcgcagctcggcaagaccagcggctgggtacaccgcgcgcacctcaggcacaacgccgtacgcatgctcggcggggtggagtacctgaagatcgacgaacgcggcctgttgatccgcgtcgacggcgaggaacgctggctggaggtggacaacgtggtgatctgcgccggccaggagccgctgcgcgagttgcagatcagccaggcggcggaaagcctgcgcttccacctgatcggtggggcgcgggtggcaggggaactggatgccaagcgggcgattcgcgagggggccatgctggcggcgcgcttgtag

SEQ ID NO: 318278 - DNA, 930 bp, Pseudomonas aeruginosa
atgaacaagaacaagacgttcctcgcggcggcgctggtagcgctggccgccagccttcccgtgcacgctgcgaccgactacacccgcacgcgctatcccatcgtgctgtcccacggtctgttcggcttcaagagcgtcggcccggtggactactggcacgctatcgtgccggccctggagaaggacggcgcgaaggtcttcgccacctcgcagtcgccggtgaacagcaacgaggtgcgcggcgaacagctactggcgcaggtggaggaagtcctggccctgaccggcgcggagaaagtcaacctgatcggccacagccagggcggcatgaccgtgcgctacgtcgccggggtggcgccgcaactggtggcctcggtcaccaccatgggcacgccgcacaagggcacgccggtagccgacgcggtgaccggcttcagcgagttcctcgggccgatcggcaccgaggtgatcgcctcggcggtggaggcgctgttctcggtggtcgacatcgtcgacggcggcgagtgggtcaagggcgacgcgctggctgccctgaacagtctcaacactcccggcaccgcgcggttcaaccagcgcttcccgcaggcgatcccggccagcgcctgtggccagggcgcggagacggtagccggggtgcgctactactcgatgagcggcaccggctccctgaccaatgcgctcgacccgagctccgccggcctggcggtgaccgggctgctgttcggcgaggccaacgacggtctggtcggccaatgctccagccatctgggcagcgtggtgaaggacaactaccggatggaccatctggacgaagtcaaccagttgctcggcctggtcagcctgttcgagagcgacccgacccaggtctatcggcagcatgccaatcgcctcaggaatgtcggactctga

SEQ ID NO: 318279 - DNA, 591 bp, Pseudomonas aeruginosa
atggatatgaaccgtcggcaattcttcaaggtctgcggtataggccttggaggatcgagccttgcggcgctcgggatggcccccacggaggccttcgccgaccaggtccgccacttcaagctggcgcacacggtcgagacccgcaacacctgtacctactgttcggtcggttgcggcctgatcatgtacagccagggcgacggcgccaagaacgtcgcgcagaacatcatccatatcgagggcgacgccgaccatccggtcaaccgcggcaccctctgcccgaaaggcgccggcctgctggactacatccacagcccgaaccgcctgaagtatccggaagtgcgcgaggccggctccagcgagtggaagcgcatcgagtgggacgaagccctcgagcgcatcgccaagctgatgaaggaagaccgcgacgccaacttcgtcgagaagaacgagcagggccagaccgtcaaccgctggttgaccaccggcttcctcgccgcgtccgcctcgtccaacgaggccggctacatcacccacaaggtgatgcgctccctcggcatcctgggattcgacaaccaggcgcgtgtctga

SEQ ID NO: 318280 - DNA, 2442 bp, Pseudomonas aeruginosa
atgaccaaccactggaccgacatcaagaatgccgatctggtgctgatcatgggcggcaacgccgccgaagcccacccgtgcggattcaaatgggtcaccgaagccaaggcgcacaacaaggcgcggctgctggtggtcgatccgcgtttcacccgttccgcctcggtcgccgactactacgcgccgatccggaccggcaccgacatcgccttcctcggcggcctgatcaactacctgctggaaaacgacaagatccagcacgaatacgtgcgcaactacaccgatgtctcgttcatcgtgaaggaaggcttcagcttcgaggacggcctgttcaacggctacgacgccgagaagcggacctacccggacaagtcctcctggggctacgagatcggtgaggacggctatgccaaggtcgacccgaccctgacccacccgcgctgcgtgttcaacctgctcaagcagcactacagccgctacaccccggacgtggtgagcaacatctgcggtacgccgaaggacatgatgctcaaggtctgggcggaaatcgccgagacctccaagccgggcaaggtcatgaccatcatgtacgccctgggctggacccagcactcggtaggcgcgcagatgatccgcaccggcgcgatggtccagctgctgctgggcaacatcggcatgcccggcggcggcatgaacgccctgcgcggccactccaacatccagggcctgaccgacctcggcctgctgtccaactcgctgccgggctacctgaccctggcgatggacgccgagcaggactacgacgcctacatcgccaagcgcacggccaagccgctgcgcccgggacagctgtcctactggcagaactacggcaagttccacgtcagcctgatgaaggcctggttcggcaagtcggcgaccaaggaaaacaactggtgctacgactggctgcccaagctcgacatgccgggcgccggctacgacgtgctgcgctacttcgacatgatgtaccagggtaaggtcaacggttacttctgccagggcttcaaccccatcgcctcgttccccaacaaggccaaggtcggcgccgcgctggcgcgcctgaagtggatggtggtgatggacccgctggtgaccgagacctcggagttctggcgcaacgtcggcgagtacaacgacgtcgacaccgccagcatcaagaccacggtgttccgcctgcccacctcctgcttcgccgaggaagacggctcgatcgtcaacagcggccgctggttgcagtggcactggaagggcgccgagccgccgggccaggcgcgtccggacatcgccatcatggccgggctgttccaccgcctgcgcgagatgtaccgcaaggacggcggggccttccccgacccgatcctcggcctcgactggtcctacctcaagcccgacgaaccgggcccggacgaactggcccgggagttcaacggcaaggccctgagcgacctggtcgacccggccaacggcatgatcctggccaaggccggcgagcagttgccgggctttgccctgctgcgcgacgacggcagcacggcgagcggctgctggatcttcgccggctcctggacccagcagggcaaccagatgggccgccgcgacaacagcgacccctacggcatgggccagaccctcggctgggcctgggcctggccggcgaaccggcggattctctacaaccgcgcctcggccgacgtcagcggcaagccgtgggacccggagaagaagcgcctggtgtggtggaacggcaagtcctggggcggcaccgacgtgcccgactacaaggccgacgtaccgccggaagccgggatgaacccgttcatcatgaaccccgaaggggtggctcgcctgttcgccgtcgacaagatggccgaaggcccgttccccgagcactacgagccgttcgagacgccgatcggggtgaaccccttgcaccgcgacaaccgcaaggcgatcagcaacccggcggcacgggtgttcaagaacgacatggaactgttcggcacggccgacgagttcccctacgcggcgaccacctaccggctcaccgagcacttccactactggaccaagcactgccggctgaatgcgatcacccagcccgagcagttcgtcgagatcggcgaggcgctggccaaggagctgggcatcaatgccggcgacaaggtcaaggtctcctccaaccgcggctacatcaaggcggtggcggtggtgaccaagcgcatccgcccgctgcaggtggacggcaagaccgtgcaccacgtcggcatcccgatccactggggcttcgccggcatggcgcgcaacggcttcctggccaacaccctgacccccttcgtgggcgacgggaatacccagacgccggagttcaagtcgttcctggtcaacgtggaaaaggcgtga

SEQ ID NO: 318281 - DNA, 930 bp, Pseudomonas aeruginosa
atgagtagtcaggacatccacgcccgctccgcgaccaccacgccgatgccctcggtgcggaaccaggaggaagtggcgaaactgatcgacgtgtccaagtgcatcggttgcaaggcctgccaggtcgcctgctcggaatggaacgagctgcgcgacgaggtcggccacaaccacggcacctacgacaaccccatggacctgacggccgactcgtggacggtgatgcgtttcaccgagcacgagaacgaggccggcaacctcgagtggctgatccgcaaggatggctgcatgcactgcgccgagccgggctgcctgaaggcctgcccgagcccgggggcgatcgtgaagtacgccaacggcatcgtcgacttcaaccaggacaagtgcatcggttgcggctactgcatcaccggttgcccgttcgacatcccacggatctcgcagaaggaccacaaggcctacaagtgcagcctgtgttccgaccgcgtctcggtgggcatggagccggcctgcgtgaagacctgcccgaccggcgccatcgtcttcggcagcaaggaggacatgaaggaacacgccgccgaacgcatcgtcgacctgaagagccgcggttacgagaacgccggcctgtacgaccccgaaggggtgggcggcacccacgtgatgtacgtgctgcaccacgccgacaagccgtcgctctatgccggcctggccgaccagccgagcgtcagcccgctggtcagcctgtggaagggcgtgaccaagccgctggcgctgctggccatgggcgccacggtgctcgccgggttcttccactatgtgcgcgtcggtcccaaccgcgcggacgacgaggaagaccacgggcaagccgaggcaccggtgcaccaggtcgatccgtcggtacacacctttgacccgcacgagcgtcgttga

SEQ ID NO: 318282 - DNA, 627 bp, Pseudomonas aeruginosa
atgaaaaatgaaatccagcgctacaacgccaacgagcgcagcaaccactgggccgtggcgatcctgttcttcatggccgggttgtccgggctggcgctgttccacccggcgctgttctggctgaccaacctgttcggcggcggtccctggacgcgtatcctgcaccccttcctggggctggcgatgttcgtcttcttcctcggcctggtggtgcgcttcgcccaccacaaccgggtgcagaagagcgatatccagtggctcaagcagtggcgcgacgtggtcagcaaccgcgaggagaacctcccggaagtcggccgctacaacgccgggcagaagctgttgttctgggtgctgctgctgagcatgctgaccctgctggtcaccggcatcgtgatctggcgccagtacttcagcgcctggttcggcatcgaggcgatccgcctgtcggcgctcctgcacgccttcgccgccttcgtcctgatcgccagcatcatcgtgcatatctacgccggcatctgggtcaagggctcgatgggcgcgatgctctacggcaaggtcagccgcgcctgggcgcgcaagcaccataacggctggctgaaggaagtcggcaagggcgaggagcactga

SEQ ID NO: 318283 - DNA, 930 bp, Pseudomonas aeruginosa
gtgtcacgcaccattcttcagccggggcagatcgaagccgccgccaacattcccccgcacctgcaccagccgtcgcgcgacctgttcgcccgccgcggcgagcgtctgctgcaactggccgaggggcacccgatgggcgactacctgcggctggtcgccggtctctgccggctccagcaggcgctgctggacaacccgccggccctggccccgctcgaccccgagcgcctgcgcaagagccgcgagcacggcatgccgccgctggcctacgacctgctggtgcgcgaaggcgcctggctgccctggctggatgcactgctcgcgggctacccggcaccggccaacgccgccgtcggcgcggcactcgaacaattgcgcgaagccgatgaaggccagcgcaaggcctgggccatcgccttgctcagcggtcagttcgacctcctgccggcggccctggtgccgttcctcggcgccgccctgcaggtagcctggagccattggctgctgggactggaggagggcgcggtggtcgagaccgagagccggaccctgtgccccgcctgcggctcgccgccgatggccgggatgatccgccagggcggcaaggaaaccggtctgcgctacctgagctgctcgctgtgcgcctgcgaatggcactacgtgcggatcaagtgcagccactgcgaggaaagcaagcacctggcctacctgtccctggagcatgacgggcagccggcggaaaaagccgtgctgcgcgccgagacctgccccagttgccagggctacctgaagcagttctacctggagttcgaccgccacgccgatgcccttgccgacgacctggccagcctggcgctggacatgcgcctggccgaggacggctacctgcggcgttcgccgaacctgttgctggcccccggcggcgaatag

SEQ ID NO: 318284 - DNA, 1407 bp, Pseudomonas aeruginosa
atgagttccgttcgcttgccttcggtcgaccgcctgctgcgcagcgcggcggccgctcccctgcaccagcgctacggccgcgaggcgttgctggcgaccctccgcgacctgctcgacgaactgcgcgagccggcccgacgcggtgccctcgccgagatcgaactgagcgaggcggtgctcgccgggcgagccggcgaacgcctcgccgcgcagcatgccagccgcgtgcggcgggtgttcaacctgaccggcacggtgttgcataccaacctcggccgcgccctgctgccggacgaggccgtcgaggcgatcaccctggccgcgcgctacccgctgaacctggagttcgacctggccagcggcaagcgcggcgaccgcgacgacctgatcgccgggctgatccgcgaactcaccggcgccgaggcagtcaccgtggtcaacaacaacgcggcggcggtgctgctggcgctgaacagcctgggggcgcgcaaggaagggatcatctcgcgcggcgagctgatcgagatcggcggtgccttccgcattcccgacatcatggcccgcgccggcgtgcgcttgcacgaggtgggcaccaccaaccgcacccacgccagggactacgaagccgccatcggcccgcgcagcggcctgctgatgcgcgtgcataccagcaactacagcgtccagggcttcaccgccagcgtgcccaccgcgcaactggcggccatcgcccatggccatggcttgccgctgctggaagacctcggcagcggcaccctggtggacctgacccgctggggcttgcccaaggaaccgacggtgcaggaagccctggccgacggcgccgacatcgttaccttcagcggcgacaaattgctcggcgggccccaggccgggctgatcctcggcaaccgagaactgatcgggcggatcaagaagaacccgctcaagcgcgccctgcgcgtcgacaagctgaccctcgccgccctcgaggcggtgctcggcctgtaccgcgatccggaccgcctcgccgaacgcctgaccaccctgcgcctgctcagccgcccggcggcggagatccgcgcccaggccgagcgtctggcgccggcgctgggcgaggcgctcggcgagggctgggaggtcgctgtggtcgacgccctgggcatgatcggcagcggcgcgcagccggtggcgcggctggccagcgccgcgctgtgcctgcgtccgcggcagcccaggcgcctgcgcggacgcgccctgcgcaacctcgaggaagccctgcgcgggctgccgctgccggtgatcggtcggctcgacgacgacgccctctggctcgatctgcgccagctcgacgacgagccggcgttcctcgcccagttgccgcgactgcggagcgagctgtcgtga

SEQ ID NO: 318285 - DNA, 1926 bp, Pseudomonas aeruginosa
gtgatcgtcggcaccgccgggcacatcgaccacggcaagacctcgctgctgcgcgccctcaccggcatcgagggcgaccgccgcccggccgagcgccaacgcgggatcaccatcgacctgggctatctctacgccgaccttggcgacggcagccccaccggcttcatcgacgtgcccggccacgagcgcttcgtccacaacatgctggccggcgccagcggcatcgattgcgtgctgctggtggtggccgccgacgacggcttgatgccgcagacccgcgagcacctggcgatcgtcgaactgctcggtatccgccgggcgctggtggcgctgaccaagatcgaccgggtcgagccgcagcgggtgcagcaggtgcggacccaggtcgaacacctgctggcctccggcccgctggcgcgctcgccgatcttcccgctctccagcagcaccggggagggcgtcgaggcgttgcgcgaagcactcggcgggctcgccggcgaagtccgcgagcgtagccgcgagggatacttccgcctggcggtggaccgggccttcagcgtcgccggcagcggcatcgtggtcaccggtacggccttctccggacaggtcgcggtgggcgacgaactgctcctcggcaacgccggacggccggtgcgggtgcgcggcctgcacgcgcagaaccggcccgcgcaacaggcctgggccggccagcgcgtggccctgaacatcgccggcgagcgcctcgcgctggaacagatccagcgcggcgactggctgctgcaggccgcgctgcacgcgccgaccacgcgggtcgacatcgacttccgcctgttgcccgacgaactccgcgacttcacccactggaccccggtgcacctgcacctgggcacccaggacgtcaccgggcgcctggccctgctcgaaggcgaacaactggagcctggccaccgcgccttcgcccaactggtgctgaacgcgccgatccaggccctgcatggcgaccgcctggtgctgcgcgaccagtcggcgcagcgcacccttggcggcgggcgggtgctcgacggcgccgcgccggcgcgcaaccgacgaacgccggcacgtctggcacagcttcaggcgctgcgccaggaaagcctggaggaggcgctgccgaccttgctcggcgcggccgagaacggcctcgacccgcaacgcctggtgcaatccttcaaccgcccgcgcgagcactggcggctgccggaagaggtggtcgaggtgcagacccgcctcggcccccggttgttcgccggggagcactggttcgccctggtcgagcaactgctcgccggcctgcggcgcttccacgaagagctaccggacgaactcggtcccgaccgcgaccgcctgcgtcgctacgccctgccgcagctggagcggccggtgttcatcgccctgctcgacgccgccctggccggcggcgatgtgcacagcagcgggccctggctgcacctgcccggccacgaagtgcgcctgagcgatagcgaggagcaactgcgcgcgcgcctctggccgctgctcgaagccggccgctacgacccgccctgggtccgcgacctggcccgcgagctgcgccaggatgaagccgtcatgcgcaacctgctgcgcaagctggcacgcctgggccagttgcagcaggtggtgcgcgacctgttctacccggaagccaccctgcgtcaattggccgagatcgccgtgcaggtgcgcgaccccgccgggctgatccgcccggcggaattccgcgaccgcctgggcatcggccgcaagcgcagcatccagatcctcgagcacttcgaccgcatcggcctgacccgccgcatcggcaacgaccgtcgcctgcgcgagggttcggcgctggccgaacagttgctcggcggcgtctcgccctga

SEQ ID NO: 318286 - DNA, 819 bp, Pseudomonas aeruginosa
atgcaggccatcgccccgaacgcgctcgaccgctggcacgaacacctggcgctggcgatccggcgcctgcgccaacccgacttcctcgccgcgctggtcgacgccatccaccaactggtgccgatcgagtcgagcatgatcagcctggaacgcaagggccacgcgcccaccctgctctacgagcgcggcatcgccgagcgcttccgcgaggcgatcatccgccgctacttctcccgcggctacctgctcgaccctttctgcctggcggtggaggaaggccttccggaaggcttctacaccctcggcgagatcgcccccgacgacttcttccagagcgcctactaccagacctactacctcggcgccggagcggtggaggacgtctactacatcctcgacctcggccctaccgagaagctctcgatctgtctctacaacggcctttcggcgagccgctacagcgacgcccaggtcgccgccctagccggcctggcgccgccggtgctggagctggcccggcagttctgcgccgggcgcgccgacctctcgccgaacccgcaggccgacctcgccccgcgccttcaggaagtgctgcgcggcttcggtcgcgacgtgctcaccgaccgcgaacgcgaggcctgccacctgctgctcagcggccactcggcgaaatccagcgcgcggctgatggacatctccccggagaccgtgcgcatgcaccggaagaatctctacaccaagctggaagtcggctcgcagtcggaactgttcgcgctgttcatcgagtgcctgagccaggggcagcgcgtcggcccctga

SEQ ID NO: 318287 - DNA, 1407 bp, Pseudomonas aeruginosa
atgaacgcaagactgcacgccacgtcccccctcggcgacgccgacctggtccgtgccgaccaggcccactacatgcacggctaccacgtgttcgacgaccaccgcgtcaacggctcgctgaacatcgccgccggcgacggcgcctatatctacgacaccgccggcaaccgctacctcgacgcggtgggcggcatgtggtgcaccaacatcggcctggggcgcgaggaaatggctcgcaccgtggccgagcagacccgcctgctggcctattccaatcccttttgcgacatggccaacccgcgtgccatcgaactctgccgcaagctcgccgagctggcccccggcgacctcgaccacgtgttcctcaccaccggcggttccaccgccgtggacaccgcgatccgcctcatgcactactaccagaactgccgcggcaagcgcgccaagaagcacgtcatcacgcggataaacgcctaccacggctcgaccttcctcggcatgtcgctgggcggcaagagcgccgaccggccggccgagttcgacttcctcgacgagcgcatccaccaccttgcctgtccctactactaccgcgctccggaaggagtgggcgaggccgagttcctcgatggcctggtggcggagttcgaacgcaagatcctcgaactgggcgccgaccgggtgggggcgttcatctccgagccggtgttcggctccggcggcgtgatcgtcccgcccgcgggctaccaccggcggatgtgggatctgtgccagcgctacgacgtgctgtacatctccgacgaagtggtgacctccttcggccgcctcggccacttcttcgccagccaggcggtgttcggcgtacagccggacatcatcctcaccgccaagggcctcacctccggctaccagccgctgggcgcgtgcatcttctcccggcgcatctgggaggtgatcgccgagccggacaagggccgctgcttcagccatggtttcacctactccggccacccggtggcctgcgcggcggcgctgaagaacatcgagatcatcgagcgcgagggcttgctcgcccacgccgacgaggtcggccgctacttcgaggagcgcctgcaaagtctccgcgacctgcccatcgtcggcgacgtgcgcgggatgcgcttcatggcctgtgtcgagttcgtcgccgacaaggcgagcaaggcgctgtttccggaaagcctgaacatcggcgagtgggtccacctgcgggcgcagaagcgcggcctgctggttcgtccgatcgtccacctgaacgtgatgtcgccgccgctgatcctcacccgcgaacaggtcgataccgtggtccgggtgctgcgcgagagcatcgaggaaaccgtggaggatcttgtccgcgccggtcaccggtaa

SEQ ID NO: 318288 - DNA, 1398 bp, Pseudomonas aeruginosa
atggacgacaacaagaacaaggtcctgcggttgcgcgatgtggtgctctacacggtctcggcgatgctcttcatggaccagatcgccctggcttcctccctcggtccgtcgagcctgttctggtggctctacgtgctggtcctgctgttcctgccgatggccatgatgacctccgagctgggcaccgccttccccgccaacggcggcgtctaccactgggtgcgcagcgccttcggcttccgctggggggcccgggtgtcatggatgtactgggtcaacaacgcactgtggatgccttcggtctacaccctgttcggcagcatgctcggcgccttctatttccccgagctgagcctctggggcaagatcgccatcggcatagccctggcgctgctcaccgcggcgttcaacgtggtcgcgctgcgcctgggcaagtggctgccgaacctcggcgcgctgctcaagctgctcgcggtgctcgccctgggcgtcggcggcctgcacttcggctggaaccatggcttcgccaacgacttcagcctggactccatcgtcccgtcctcgccgggccagatggccgcgctgggagtgatggtctatggcatcatggggaccgagctggcctgttgcagcgccgcggagatgcgcaacgcgcgccgcgacatcccgcgcgcggtgctgatctccgggctgatcgtcggcgccttcaacatcttcggcaccctcggcgtgctggccgcggtaccggccgaggaaaccgacgtcacccggatcttcgcccacaccctctacaacatctacggccacgacggcgccggcgggatgctcgccgacctggtcggcgccttcgtcctgttcaccctcttcaccaacatggtcacctggagcatgggcaccaaccgtgccgcggtggaagcggccaaggccggcgagctgccggcgctgttcggcgtggtccattcgcgccacggcacgccgatcggctcggcggtgctggcctcggcggtgagcatcgtcctgctgttgctctacggcctggtggcgcacactgccgaggaactgttctggaccctgctgtcgatcttcgccatggttttcatgatgccctacgtgctgatgtgcctggccttcgtccgcctgcgccgcgccgacccgcgtccacggccctaccggatgccgctgggcgaccgcctggccagtctctgggcgctgttcgtcgcgctgcatgtgctggccggcatcggcctgttcgtcgtcacccccggcgcgccgatggactgggcctacgccggcaagatcgtcggcggcgtggcgctggccctggccgtgggcgaactgctgatccgccaggcggcgcgaaggcgcggcgtgatgtcactgcgcggtgcctacggttga

SEQ ID NO: 318289 - DNA, 618 bp, Pseudomonas aeruginosa
atgtccgaacgagagcactggcaacgggtatacgagagcaagccgtccgacgcggtgagctggttccaggccgaggccacgctgtccctcgacctgatccgacgcatcggcgcgccccgcgaggcggcgatcatcgatgtcggcggcggcgcctcgaccctggtcgacggcctgctcgccgaaggcttcggcgacctgacggtgctcgacctttccgacgccgccctgcgtgtcgcccgcaaccgcctcggcgcgcgcggcgaagaggtgcgctggatcgccggcgacattaccggcgtcgacctgccggaagccacctacgatgtctggcatgaccgcgccgtgttccacttccttaccactgccgaagcccgccgcgcctacgtgcgccaggtgatgaaggcggtccgccacggcggccacgtgatcgtcgccaccttcgccgccgacggcccgaccgaatgcagcggcctgccagtcatgcgctacgacgccgacgaactgcacgccgagttcggctccgccttccagctcaccgagcaccgcgacgaacaccacgtcactcccgccggccgggtccagcacttcgtctactgccattgcctgaaacgcctgtga

SEQ ID NO: 318290 - DNA, 723 bp, Pseudomonas aeruginosa
atgacgctgatcgccgccgcccagagctgcgcccaccccgccgatctgccacgcaacctcgacgaccacctgcgcctgatgcgtatcgcccaggcacggggcgtgcgcctgctggtgtttcccgaactgtcgctcaccggctacgaacccaccgctgccgccgccctcgcccagccggcggacacgcccctgctgcaaccgctgcgccagctcgccgagcaggcacggatgaccacggtggtcggcctgccgctgcgctcgccgaagcatgccaagccgctgatcgccgccctgatcctcggcgccgacggcagcctcggcgtctatgccaagcagcacctgcacgcgggcgaggtacgccacttctcagccggcgacggcggccccctgctggagatcgacggcctgccgatggcgttggcggtctgcgccgacttcagccaacccagccacccggcccacgccgcccgtgccggcgctcgcctctacatcgccagcgcgctgatcggagaaaacggctacccggccgactcggccctactggccggttatgcccgcgagcacggaatgggcgtgctgctggccaaccatggcgggccgacgggtggctggaaggcggcgggcaggagtgcgttttggaatgagcggggagcgctggtcagggagacgacggggacgggtgagacgctgcttctgctggaacggaccgagatagacgcttga

SEQ ID NO: 318291 - DNA, 441 bp, Pseudomonas aeruginosa
atggccgagatcaatccgctttcaacggacctgcaacagcaactggcggagctgcaggcacaggggctcgccttgcttggcgtcgccgcggacgagacgccggcgcagatcgtcgccgccgtcaccgactacgtgcgcgatgcgagggagcaggggcgcagcctcgacgacgaggcggtcttcgccctcggcgcgctgatcggcgcgcagtacgtgcgtggcctcggctggcactggggcgacgtgacctgggacggcgacccggacagcgccgcggtcggcgtgctcagccccgacgaatcgctgttcaacaaccccatcggctgggtaggccagatcgccgaaagcggcggcggggtgccgttcatgctcagctacaacatgatcctggccaaccaggtgccgctgttcgagcggggcagcgccaccggtctctattga

SEQ ID NO: 318292 - DNA, 744 bp, Pseudomonas aeruginosa
atgacggatcttgaacacgcggtggaaagcaaccgacgcgcctgggacgcgtccgccgacagtcacctgcgtggcagcggctggcaggaattgtcgctggcggtacaggaaaccggcttcagttgcctggacgagaccctggctggcgtgctgcgcaatctggacctggccggcaaggcggcggtccaggtcggctgcaacaacggccgggaagtgctttcgctgtacgccttcggcgtcgcgcgggcggtggggatcgaccagtccgccgccttcctcgcccaggcgcggcaactggccgagcgctcgccgcatcagccgcgtttcgtcgaagccaatgcctacgagctgccggccgagctgaacggtcagttcgacctgctgctgatcaccatcggtgtgctcaactggatgcccgacatcgcgcgcttcttcgcctcggtgagcggcctgctgaagccgggcgggcaattggcgatctatgagacccacccgttcctggagatgctcgaacccgagtcggagcaaccgttcgaactgcgcaacgactacttcaccgacacgccccacgtatcccgggaggccatcgtctacgaaggcagcggcagcgataccggcatcgccagctactggtacgtccacccgctcggcgacatcctcggcgggctgctcggcgccggcctgcgcctgagtcacttcaaggagtacccgcactcgaaccgcgaggaactctacgacctctaa

SEQ ID NO: 318293 - DNA, 579 bp, Pseudomonas aeruginosa
atgacctgcgtcgaggccgagcgaggcgcgccgctgcgtgtggtggtggtcggcaccagcggggccgggaagacgaccttctccgccgcgctggccgccaggctgggttgtacgcatgtcgaactcgaccgactctactggggccccggctggcaagccgtgccccacgaacgcttcgagcacgccgtggagcgggcgacgacggcgccgcgctgggtcgccgacggcaactacagcgccgtccgcgagttgctctggggccgcgccacccacgtggtatggctgaatttcgggcgctggacggtgttctcccgggtccttcgccgcaccctggcccggggcctgctgcgcacccgcctgtcccacggcaaccgtgaatcgctgcggatggcgttctgctccagggattcgatcctgctctggtcatggaccaccttcgcaggcaaccgccgcaaatacaccggcctgcgcgaggatccgcggttcgcgcatttgcgctgggtggaggttggcgagccggggagggtgggggaggtgatcgagaggttggtggaagccgcgctcgcacagtcgcagtag

SEQ ID NO: 318294 - DNA, 747 bp, Pseudomonas aeruginosa
  misc_feature (675)..(684): n is a, c, g, or t
atgtcctcaccccaaccgccccgcttcgacggccaacgctggagcaacgccgacgacgaccgcatcgaggtgctgcctgccgaccccgcctggccacaacacttcgccgccgaagccgaggccatccgcatggcgctggcgctgcccgggctgggcatcgagcatgtcggcagcaccgcggtgcccgggctcgacgccaagccgatcatcgacatcctcctgctgccgccgcccggccacgatccgcagcggctggtagccccgctggagggcctcggctaccagttctggcgcgagaacccgaacacccagcggatgttcttcgtcaaaggcatgccgcccttcggccatggccgcacccaccatgtccatgtcatgcccctggcccaggccgaccgctacctgctgttccgcgactggctgcgcaaccaccccgacgacgcccgcctctacgccgaaaccaagcacgccctggcccgccgctaccccaccgaccgcgaggcctatacccgtggcaaggacgaggtcgtcgcaaggattctcggccgggcgctggcggcgacgcggcacccaatgatacagagtggcctggtaaggggagaacgcgaaatgcacgccagggaactgcgtgaaacgctggtcgccggcgcggaatcgacgccaggcggccccgcnnnnnnnnnnggccccgccgatacagcctatttcgagtcgctgcgcagccgggtaagcaagccccaggactga

SEQ ID NO: 318295 - DNA, 468 bp, Pseudomonas aeruginosa
atgagcgcgaacctgcacggcctggagttccccgacgggctgttctacgccccggactacaacctgtggttgcgcgaggaagtcgacggcagcctgaccctgggcctgagcgcctacggctgcgcgctgtatggcgaaatcttcgccttcacccccaagcgcgacggctggcacatcgaacgcgaccgcagcttcggcgtggtcgagttcgccaaggctgcctcctcggcccgcagcccgttggccgggaccctgctggcgagcaacccggcggtggtcaagcgcccggcgctgatcaaccgggattgctacggcgagggctggatggtacggctgcaaccggacgactgggcctcggcgcggagcgcgtttctccagggagacgcggcgcgggaggcattcgccgagcgcatgcgcctggatgggttcgatccgcagcatccaggggtgcaggcgctggacgtctga

SEQ ID NO: 318296 - DNA, 378 bp, Pseudomonas aeruginosa
ttgaaccctgacacccacgcccagcgcgtcctcatcatcgtctccagcggcccgagcaccccggcccgctgcgccgcgcccttccacaccgccaccctgctggcctgcatggacgccgaggtgaccctgttcctcagcggcgaaggcgtgcagttggcccgccgcgccgtcgccgaccagttgcgcgcgctggacggcggcgagccgctgcgccacttcatccgccaggcccgcgaggccggcgcgcgcctgatgatgtgccgccaacccggggtgaacatcgacgaaagcgaactgatcgaggaactcgacgaaatctccagcggcggcgaactggcacggctgatcctcgaatccgagcgggtgctgaccctatga

SEQ ID NO: 318297 - DNA, 483 bp, Pseudomonas aeruginosa
atgcagctcagccaccgcccggcggagaccggtgacctggagacggtcgccggcttcccccaggaccgcgacgaactcttctattgctaccccaaggcgatctggccgttcagcgtcgcccagctggccgccgccatcgccgaacgccgcggcagcaccgtggccgtgcacgacggacaggtgctcggcttcgccaacttctaccagtggcagcacggcgacttctgcgccctcggcaacatgatggtggcgcccgccgcgcgcggcctgggcgtggcccgctacctgatcggggtcatggaaaacctcgcccgcgaacagtacaaagcgcgcctgatgaagatttcctgcttcaacgccaacgccgccgggctgctgctctatacccagctcggctaccagccgcgcgccatcgccgaacgccacgatccggacggccggcgcgtggcgctgatccagatggacaagccccttgaaccctga

SEQ ID NO: 318298 - DNA, 564 bp, Pseudomonas aeruginosa
atgatccgccgaatcctgctgctcggcctgctcctcagcctcgcagcctgcgaaaccacccagctcgaccgcgacttcgacagctcccgcgacttcgccgcctaccgtagctggagctggtcgcaacccgccttcgaataccgccccgacgacccacgcatcaagagcgacctcaccgagcaacgcatccgcgaagccgtcgcccagcagctcgaccagcgcggcctgcgtccggcccagggcaacgccaggggcgacgtcacggtgcgcgcctacctgatcgtcgacgatcgccaggaccagatcaccaccaactacggcggcggttactggggcggctactggggaggatactggggcggcccggcgatggccgagacgcgcaccgtgaattacaaggttgccaccctccaggtcgacctgttcgacggcaaggacggcaagctggtctggcgcggcagcggcgagcagatcatgcgcaccagcccgccgagcccggccgagcgcgagcaggcgatccgcgagacggtgcagaaagtcatgtcgcaatacccgccgcgctga

SEQ ID NO: 318299 - DNA, 936 bp, Pseudomonas aeruginosa
atgaatcgaagtattgcgatcctgctgctgggcctgtcgctgaccggctgcgtcgaggcacgctcggtggtaccggcggatggcccgggcccgctgctggtggcccatcgcgccggcaccgcggactacccggagaacaccctgctggcgatccgcaaggcgctggacaacggcgccgacgcgctatggttgtcggtgcagttgagcgccgatggccatccggtgctctatcgccccgctgacctggcggtcctgacccagggcgccggcgcggtcggccagtcgagcctggccgagctggcgcgcttgaacgccggctatatgttcaaggccgaggacggcagctatccctaccgccagaagccgctgcggattcctacgctgcgccaggcgctgcgggcgatcccgccgcaggtgccggtgttcctcgacatgaagtcgctgccggtggagccgctggtcgatgccgtggccggcgagctggagcggcagaaggcctggtcgcgggtgcgtttctattccaccgagaaggccgccaacgactacctgacgcagcgctacgcggaccgcgcgcgacagttcgaaagccgcgatgcgacgcgcaaccgcctggtcggcctggccttcggcgagcgctgcgaggcaccgccggccggcggcacctggatgggcatcgagctgcgccgcgaactgacggtgaccgagcgcttcacccttggcgagtcttcctacaaggtgccggcggcgcagttgtggacgcgcaaagcgatggactgcgtgcgccgcgagccggtgaaggtggtgatgttcggcatcgagaccgccgaggactaccgcaccgcgcgcgccctgggcgccgacgcggtgatgagcaactcgcccaggaagatggaggcgatccgccgccgggtgctcgccgatcagcccggcgggtag

SEQ ID NO: 318300 - DNA, 621 bp, Pseudomonas aeruginosa
atgcaatcgcgactgttgatcctgccgttactcgccagcctggccgccctcggtgcctgccagggcgacaatccctaccgcgccagctctctgccctacccgccgcagccggccaccgcggccaatcccggcctcgatcccggcgcctatccggcggcgccgcgcgactacgcccgctaccgtagctggagctgggccgccgccggggtcagcggctttccccagggcctggacgacaaccagttgcgcgacgccgtcagccagcagctcgaccagcgcggcctgcgcccggcgcggccgggcagcgcggccgacctgcaggtcagcgcgttcctgcgcaacgaactgcgcacccgccaggtcaccgactactacggcggctactacggcaactacggcggctggcgcgatccctggtacggctatggcgccagctacccggtgacccgcagctacaccgtgcaggtcaccgtggtccgcgtcgagctgaacgacgcccgcagcggccagccggtgtggggcaacagcgccgagttcgactccggcgactccgccagcgaacaggccaaggccctgcgcgaagcggtgaaacgggcgctgtcgagctacccgccgggctga

SEQ ID NO: 318301 - DNA, 750 bp, Pseudomonas aeruginosa
atgagcgaccgccatttcgacaaactggcgacgcgcttcgccgaaaagatctatggcggcgccaagggtgcgatccgcctcgcggtactccaggccgacctcgccgaggccctcccggagcgacctctgcgggtcctcgacatcggcgccgggctcggccacatgtcgctctggctggccgctcgcggccaccgcgtaaccctcgccgagccagcgcaacccatgctcgacggcgcccgccagcgcttcgccgaagccgggcaggccgccgaattcatccaggcgccatggcaggaactgctcggccagttcaccgagccctacgacctggtgctctgccacgccgtgctcgagtggctggccgaaccccatgcgatcctgccggtgctgcaccaactctgcgcacccggcggctggctgtcgctggccttctacaatcgcgacgcgctgatctaccgcaacctgctcaagggccacttccgcaagctgcgcaaggaacgcttcgctggcgaggggcagagcctgaccccgcagcgcccgctcgacccgcgcgagctggaacaggcgctggcagcgcgttggcgcatcgaggcgcgcagcggcgtgcgggtgttccacgactacatgccgagcgagttccaggccaaggccgaacggctcgacctggtggaaatggaactggcctaccgccgccacccggcctttgccgggcttggccgctacctgcactggctgtgccgcccgcaatga

SEQ ID NO: 318302 - DNA, 306 bp, Pseudomonas aeruginosa
atggacctgcacgaactcaccgcgcgcctgcacgccatccgcgaccgcaacgactggcgccaattccacagcccgaagaacctggccatggccgccagcgtcgagatggccgaactggtggagatcttccagtggctgacggaagaccagtcgcgcacgctgtcggccgagcagctcgaacacgctggccaggaagttggcgacatcgtcctttatctgctgctgttctgcggggaaaccggcctcgacctggaacaggtggtgcgcgccaagctggccgactgcgaacggcgcttcctgccatga

SEQ ID NO: 318303 - DNA, 732 bp, Pseudomonas aeruginosa
gtggacccgaagcacctcgagcgctaccgccaggtctgcggcttccgcgacgacggcctgctgccgccgacctacccgcacatcctcgccttcccgctgcagatggcgctgctcaccgacaagcgcttccccttcccgctgctcggcctggtccacctggagaaccgcatcgacgtgctgcgcgcgctcggcggcctcggcccgttcaccgtgagcgtcgcggtggaaaacctgcaaccgcacgacaagggcgccaccttcagcatcgtcacccgcctggaagaccagcttggcctgctctgggtcggcgacagcaaggtgctctgccgcggcgtcaaggtgcccggcgaaattccgccgaaagccgagcaggagccgctgccgctggagccggtcgacaactggaaggcgcccgccgacatcggccggcgctatgcccgtgccgccggcgactacaacccgatccacctgtcggcgcccagcgccaagctgttcggctttccccgcgccatcgcccacggcctgtggaacaaggctcgcagcctggccgccctcggcgagcgactgccagcctcgggctatcgggtcgaggtgcgcttccagaagccagtgctgctgccggccagcctcaccctcctggccagcgcggcggcggcggacggccagttcagcctgcgcggcaaggacgacctgccgcacatggccgggcattggagccggctacagggctga

SEQ ID NO: 318304 - DNA, 1917 bp, Pseudomonas aeruginosa
atgcacctgacaccccattggatccccctggtcgccagcctcggcctgctcgccggcggctcgtccgcgtccgccgccgaggaagccttcgatctctggaacgaatgcgccaaggcctgcgtgctcgacctcaaggacggcgtgcgttccagccgcatgagcgtcgacccggccatcgccgacaccaacggccagggcgtgctgcactactccatggtcctggagggcggcaacgacgcgctcaagctggccatcgacaacgccctcagcatcaccagcgacggcctgaccatccgcctcgaaggcggcgtcgagccgaacaagccggtgcgctacagctacacgcgccaggcgcgcggcagttggtcgctgaactggctggtaccgatcggccacgagaagccttcgaacatcaaggtgttcatccacgaactgaacgccggtaaccagctcagccacatgtcgccgatctacaccatcgagatgggcgacgagttgctggcgaagctggcgcgcgatgccaccttcttcgtcagggcgcacgagagcaacgagatgcagccgacgctcgccatcagccatgccggggtcagcgtggtcatggcccaggcccagccgcgccgggaaaagcgctggagcgaatgggccagcggcaaggtgttgtgcctgctcgacccgctggacggggtctacaactacctcgcccagcagcgctgcaacctcgacgatacctgggaaggcaagatctaccgggtgctcgccggcaacccggcgaagcatgacctggacatcaagcccacggtcatcagtcatcgcctgcacttccccgagggcggcagcctggccgcgctgaccgcgcaccaggcctgccacctgccgctggagactttcacccgtcatcgccagccgcgcggctgggaacaactggagcagtgcggctatccggtgcagcggctggtcgccctctacctggcggcgcgactgtcgtggaaccaggtcgaccaggtgatccgcaacgccctggccagccccggcagcggcggcgacctgggcgaagcgatccgcgagcagccggagcaggcccgtctggccctgaccctggccgccgccgagagcgagcgcttcgtccggcagggcaccggcaacgacgaggccggcgcggccagcgccgacgtggtgagcctgacctgcccggtcgccgccggtgaatgcgcgggcccggcggacagcggcgacgccctgctggagcgcaactatcccactggcgcggagttcctcggcgacggtggcgacgtcagcttcagcacccgcggcacgcagaactggacggtggagcggctgctccaggcgcaccgccaactggaggagcgcggctatgtgttcgtcggctaccacggcaccttcctcgaagcggcgcaaagcatcgtcttcggcggggtgcgcgcgcgcagccaggatctcgacgcgatctggcgcggtttctatatcgccggcgatccggcgctggcctacggctacgcccaggaccaggaacccgacgcgcgcggccggatccgcaacggtgccctgctgcgggtctatgtgccgcgctcgagcctgccgggcttctaccgcaccggcctgaccctggccgcgccggaggcggcgggcgaggtcgaacggctgatcggccatccgctgccgctgcgcctggacgccatcaccggccccgaggaggaaggcgggcgcctggagaccattctcggctggccgctggccgagcgcaccgtggtgattccctcggcgatccccaccgacccgcgcaacgtcggcggcgacctcgacccgtccagcatccccgacaaggaacaggcgatcagcgccctgccggactacgccagccagcccggcaaaccgccgcgcgaggacctgaagtaa

SEQ ID NO: 318305 - DNA, 1491 bp, Pseudomonas aeruginosa
atgactgatctccgcgatgcctcccgcgacgaacgcctgctggcggcccacggctatcgccaggaactggagcgcgggctgagcctgtggtcgtccttttccgtcggcttcgccaccatctcgccggtggtgggcatctactcggtgatgtccctcggcgccatgagcatgggcccctcctgggtctgggtggtgccgctgtgcctgctgctgcagttcggcgtggcgctggtctacgccgagctgtcctcgcagtttccgctggccggcggctgctaccagtgggtgcgacgcctggtgggcgaccgcctggcctggttcaccggcttcctctacctggcttcggcgctggcctcgctgactaccgtggcctacctcggtggcttctggctcggcctgctggcgaccggcgcgccgccgtcggccaacggccaggtgctctgcggcgcgctgctgctggcgctgggactggcggtgaacctgctggggatcaacccgctgaagtacttcgtcaatgccgggatcgtcgccgaggccatcgcctccatcggtatcggcgtgctgttgctgctgttcttccgcaaccatccgctcgacctgctgttcagcggcccgggcggcacaggcgatgcggacggttcctacctggacggcgtgctgaccgcgctggcggtgggcggctgggccttcctcggcttcgacgcctgctcgcagatttccgaggaaaccaccgatgcccgcgtctccactccccgggcgatcctgcgctcgatgctggtggtgggattcaccgtgatgctcaccgccttcgccgtgaccctgtcctaccaggacatcggcgcggtggtcagcggccaggtggtcgacccggtcaccccggcggtggtggacgccttcggcgcctgggccgagcggcccttcgtcgcagtggtgctgatcgccttcgtcgcctgcgtggtgtcggtgcagacctacatcggccgggcgatcttcggcatggcgcgcgacgccatcctgcccggctccgccctgctgcgccgggtcgaccggcgcaaggtgccgatggcggcgatggtctgcagcacgctgctggccagcctcggcctggccctggggctgaacgccacggcggtcggcacgctgatcgcgttcggcagcggcggtttcttcgtggtcttcctgatcgtcgccgcctgcgctctctgggcccgcctcgtcggccgttgggacccggacaagggcgccttgcgcctgggacgcgcggggctggcggtgaacgtcctggcagtcgcctggctgtcgttcgaggcgctcaacgtcgcctggccgcgggccagcctcgccccgcccgacgcgccctggttccaggtctgggcggtggtcgtggtgttctccgcgctggccgcgttcggcctgctctacatggtcatcgccaagccgcatcggcgcatcgccaccagcctcagcttcgccgctccgccggcggactga

SEQ ID NO: 318306 - DNA, 1182 bp, Pseudomonas aeruginosa
atgagcgacctgcattactggaactaccccaccgatatcctctgcggcgtcggcgccctggaacaactgccgaggcgttgcgcgctggcgggcgcacgccggcccctgctggtcaccgatcccggcatgcgcgccctggagcccctgcgcctggtgcgcgaatgcctggaacgcgccggcatcgaccatgacctgttccacgaactgtcgagcaaccccagcctcgctgaagtccacggcggcgccaggcgcttcgaggctggcgggcatgacgcgctgatcgccctcggcggcggcagcgccctcgacgcggccaagggtatcgccctgctcagccgcgacccgcacggcctcgaacgcttcgaatggacacagacgctgcgcagctattcgaccctcgccgactacccgctgctcggcctgccgccgctgctggcgctgcccacgaccgccggcaccggctcggaactgggacgcgaggcggtgctgaccgatacgcaactgggcatcaagcgggtggtcggccatcgcgagctgctggccgcctgcgtattcctcgacccgcgcctgacccgcgggttgccgccggcgctgagcgccgccaccggcatggacgccctcacccatcacctggaggcgctgttctcgccgctctaccatccgatgtcggcgggcatcgccctggaaggcgtgcgcctggtcaggcagcacctggaaaacgccgtgcgcgacggcaacgacctcgccgcccgggaaggcatgctggtagcctcggccagcgccgcggtggcattccagaaggggcttggcggggtccacgccctggcccacccgctgggcgctcgccatcacctgcaccacggcctgctgaacgccgtgctgctgccctacgttctgctggccaaccgcccggcgatagaagccgacgccgcgcgcctggcgcgctacctggaactcgacgaagcgagcttcgacggcctgctggcgtggatcctcgaactgcgcgcgcgcatcggcatcccggcgaacctcgccgccctcggcctggatggcgaggacgcgcaatgggtgggcgagcaggcgctggccgacctgtcgtcctcggcgaccaacgccctgccgctcgatgcccgggattatgcgcgcatctaccgccaggcggtggccgggactctcgcctga

SEQ ID NO: 318307 - DNA, 903 bp, Pseudomonas aeruginosa
atgctgagaaacgtcaccgacctagacctgcgtctgttgcgcatcttcgcctgcgtggtgaagtgcggcggtttcaccgcggcccaggccgagctgaacatgagccagtcgaacatcagcatgcacatcgccagcctggagaagcgcctcggctaccggctctgcgagcgcggcaagggcggcttccgactgaccgccaagggtcgccgggtgctggaggcttcgcgaacgatgttcgacgccatcggcctgtttcgcgaccaggcgcaggcgttgtccggacgtttggtcggggagctgtacctgggcctggcggacaatctcgcgaccttgccccaggcccgtttcggcgatgcgctggcgcgcttccagcggcgcgaccaggatgtccagctgaaccttttcgtcaattcgcccaccgagctggaactggcggtgatcgaaggcgagctggacctggcgatctcctatttcagccgttcgcggccgagcctcgaataccgcccgctgtatcgcgaagagatcggcgtgttctgcggcgatcgccatccgctgttcgccgaggcgcagccgaccctggagcggatcgccgcctgtgactgggtgatgcacggcttcctgccggaaaacctggtcctgccgctacgcccgtcgcgcagccgcgccaccgcctaccacatggaagcggtcgcccatgccgtgctggccggcacccacctgggctacctgccgacccattacgccgaagcctggatcgagcgtgggcggatgcgcgcgctgttgccggagcggctgagctacccggtggagcacagcatgatcgtctatgccgggcgccccctcagcgaagccgcccgcgccttcatcgacgacctgctgcaggtccacggcctggggtcctga

SEQ ID NO: 318308 - DNA, 1335 bp, Pseudomonas aeruginosa
atgaacaaccacaacggtaccctgcaccgtggctggcaatcgctccagcgctggcgcatccagatcttcgtcatcacctggctggcctacgccgccttctacttcacccgcaaggccttctcggtggccaagctcggcatcgccgaagacccctccttcgagctcgacaagagcgccatggccgatctcgatgccctctacctggccgcctacgccgtgggccagttcatgtggggggtgttcgccgaccgcttcggcacccgcgtggtggtgctcggcggtttgctcacctcggcgctggcggcgctggtgatgggtaccctcgccaccctgccgatcttcgccgcctgcatggtggtccagggcctggcgcagtccaccggctggtcggggctgtgcaagaacatcggcgccttcttcgccacctacgagcgaggccgcgtgctcggcctgtggagtacctgctacgccttcggcgggctggtggcgacgccgttcgccggctggtgcgcctaccggttgacgcatgactggcgcatggccttcctgtcctcggcgggagtggtgctggcggtggccgtgctgttcttcttcctccagcgcaaccgtccgcaggacgtcggcctgccgcccgtggaggccgaggccgcgcgccccgccaacgcgccccggccgagccattccggcgccctgctgaaggcgctcaggaatccccacgtgctggtcctcggcctcgcctacttcctgctcaagccggcgcgctacgcgatcctgctctggggcccggtgatcatctacgaacgcatgccggagatcggcaaggtcgcctcggccatcgtgccttcggccttcgaggtcgccgggctggccgggccgatcctcatcggcctggcctcggacaagctgttcggcgcccgccgcatgccggcctgcgtgctcagcctggcggcgctgaccgtgagcctggcgctgttcgtcccggcgatgcagagcggcagcctgtacctggtggtcggcctgctgttcatgatgggcgtcaccctctacgggccggactcgatgatcagcggcgccgccgccatcgacttcggtaccagcgaagcagccggtaccgccaccggcttcgtcaacggctgcggctcggtcggggcgatcctcggcggcctgctgccgggctacttcgacaccctcacggtgttcttcgtgttcaccgccaccgcgctgctcgccagcctgctgctggtgccgttctggaacagccggccaggcgcgtgccgcgtcgaaccgaaggcgcatgccggcgggccgctgctggcggccggcaagccgcgttga

SEQ ID NO: 318309 - DNA, 717 bp, Pseudomonas aeruginosa
atgcgcgacgagccgtcccgccccctgacggtgatctaccagtccctgcgcgagcagatcgagcgcggcctgctcgcgcgcggcagcaagctgcccagcgaacggcaattgagcgagctgttctcgaccacccgcatcaccctgcgcgaggcgctcggccagttggaggaccagggcctgatctaccgcgaggaacgccgcggctggttcgtctcgccgcagcggctgctgtacaacccgctggtgcgcagccacttccacgcgatggtcgccgaccagggccgggtgccggagaccgaggtgctcggcgcggcgatgatcccggccagcgtcgacatctgccagcgcctggagctgccggcgctgtcgcgggtgttccagatccgccgggcgcggcgggtcgacgggcggctggtgctgtacgtcgagcactacctgaatcccgcctattttcccggcatcgagcgcttcgacctgactcgctcgctgaccgatctctacgccaaccactacggcatccgctacggccgggtgcgcttcgaaatggtcccgaccatcctcccggcggaggccgccgggccgctgcgggtctcggtgggtagcccggcgctacagatcgtgcgggtcaaccgcgaccaggcgggccgcctgatcgactgcgacctggagtactggcgccacgacgcgctacaggtcaacgtcgaggtgcccgagtag

SEQ ID NO: 318310 - DNA, 903 bp, Pseudomonas aeruginosa
atgagcgacagtgaaaaatcgaatagccgcctgttcgacctcgacctgctccgcgccatcgtcacggtggccgactgcggcagcttcaccactgccgccgcgcgcctgcactcgacccagtcgaccgtcagccagaaggttcgccgcttggaggaaatggccggacaccgcctgctggagcgcggcaaccgcgacgtgttgccgaccgacgccggcgatacgctgctcggctatgcccgccgcctgctggcactgaacgacgaactggccgaggcgctatccggcgccacggtggcgctgacggtacgtatcggcgtgccggacgacttcgccgccggccgtaccaccgagcgactggcggccttcaaccggcgttatccacaggtcaagctggaagtcaccagcggcatgagccgcgacctcagcgccagctacgaccgcggcgaactggacctggtgctgctcaagcagcgacgcgccagccgcgaggcactggcctgctggccggaaaagacatgctgggtggacagcgccaggaacccctgcatcgacctcgacccgctgcccatcgtcaccttcccgccgcgcggggtctaccgcgacgagatgatcgccgccctggaagcggtcggccggcgctggcacatcagcttcaccagttccagcctcagcggcctgcaatcggccatcgccgacggcatgggcatcggcctgctgccgctgcgcgcggtgagcgcaggccacgcggtgctgccgaagaacgccgggctgccggcggtggacgtgttcgaagtggcgctgctgcaccggccggcggcggatccgatggtgaaggcactggcacgcgtgctgtcgcgggtgctggcggaagatacccggagccggccctcattcgaaaaatga

SEQ ID NO: 318311 - DNA, 837 bp, Pseudomonas aeruginosa
atgtccaagtccagctactacgcgccgcacggcgggcacccggcacagaccgagctgctcaccgaccgggcgatgttcaccgaagcctatgccgtgattcccaagggggtgatgcgcgatatcgtcaccagccacctgccgttctgggacaacatgcgcatgtgggtgatcgcccgcccgctgtccggcttcgccgagaccttctcgcagtacatcgtcgaactggcgcccaacggtggcagcgacaaaccggagcaggatcccaacgccgaggccgtgctgttcgtcgtcgagggcgagctgagcctgaccctgcagggccaggtccacgccatgcagccgggcggctacgccttcattccgccgggcgccgactacaaggtgcgcaataccaccggccagcacacccgcttccactggatccgcaagcactaccagaaggtcgacggcgtaccgctgccggaagccttcgtcaccaacgagcaggacatccagccgctggtgatgccggacaccgaaggccgctggagcaccacccgcttcgtcgacatgagcgacatgcgccacgacatgcacgtcaacatcgtcaacttcgagccgggtggcgtgatccccttcgccgagacccacgtgatggagcacggcctgtacgtgctggaaggcaaggcggtataccgcctgaaccaggactgggtcgaggtggaggccggcgacttcatgtggctgcgcgccttctgcccgcaggcctgctattcgggcggcccggggcgcttccgctacctgctgtacaaggatgtcaaccggcacatgcgcctgaccctcaatgcgccgcattga

SEQ ID NO: 318312 - DNA, 849 bp, Pseudomonas aeruginosa
atggcaatcccaagcatcccgcgtttggccgtactgacgctcgggctggcgctcgcagcggccgccagtgccgccgacgaggcgcaactgatcgaggcgatcaacgcctaccgcggtcaggtgcagtcctgcggcgggcaggccagcggtgaactgccgccgctggccgccgacccgcgcctggccttgccggtgaatgccgccggcgacctgcagcaggcgatggcacaggccgcctacccgatggtcaacgtgcagtcgatcagcctttccgggccgcgcgatgccggcgcggcgatgaaggcactgcaggaaagcttctgccgcgtggtgctcgacccgcagttcgtcgacgtcggcgtcagccgccaggaccgcgactggcgcatcgtcctcgcccggccattgctgcgcggcggcatgggcgattggcaggcggaagggcagaagctcctggaacggatcaatgccgcccgcgggcaagcccgccagtgcggtggcaaaccttacgcagcggcccagccgctggcctggaacgccacccttggcggcgccgccgaagcgcattcgcgggcgatggccaacggcaatttcttcgaccacctcgaccgcgacggccgcacccccggcgaccgcgccgagctggccggctacagcggcgggctgatcggcgaaaacatcgccgccggccaggacggggtggacaaggtggtcgacggctggctggccagcccgggccactgcgccaacctgatgaatcccggctaccgcgagctgggcgcggcctacgccaccgatccgaagagcgacgcgggaatctactggacggccatgttcggttcgccctga

SEQ ID NO: 318313 - DNA, 876 bp, Pseudomonas aeruginosa
atgaattgggacgacacccgcgtcttcctcgcgctctgccgcgagcacaccctgcgcggcgccgcccgcgcgcttcacgtcgaccaggccacggtgggccggcggctggcgtcgctggaggcggcgctgggctcgaccctgttcctgcgcacctcgtccggctacctgctgaccccggccggcgaggcggccttcgaactggccgagaagatggagcgctcggccctggagttgctacggcggacccgcgggatggaccaccgactgtccggcgaggtgcggttgtccaccaccgactccctggccgtcgacttcgtgctacccgccctggcccgcctgcaccttgaacacccggatatccgcgtgctgctcaacagcgcttcggccgtggtcgacctgcccaagcgcgagaccgacatcgcgattcgcaccctgcggccggaaaatcccgatttgatcctgagaaaactcgccagttggcccatgggcctgttcgcttccgcggactacctgcggcgcaacggcgtgccggtgcccggcgagcgtttccgcggccacgacctggtgatgtacgaaccctattggcacagcgagcgcgaactgaccctgggcggcgagccgatccgcgacggccgggtggtcatcgcggtgaattccaacatgatggtgcgccaggccctggcgcgcggcctggggctctgcgagctgccgctgtacatgggcgagcgcgacggactggtgcgggtctggccgcagcgcgagcgacgccggccatacgaggtgtggatggttacccacaaggacctgcgccacaccgcgcgggtccgcgcggtgatcgaacagctggtggaggcgttcgccgaagcgccggcctga

SEQ ID NO: 318314 - DNA, 1017 bp, Pseudomonas aeruginosa
atgagcagtacgaaccgatttcccgaacgaatgaccgccatcgagatcgcccggcccggcggccccgaggtactggtggcgaccagccggccgctgccgacgcccggcccgcgcgaggtcctggtcgaagtccgcgccgccggcgtcaacggtcccgacgtgcttcagcgcaagggcgtgtacgacccgccgcccggcgcctcggacattcccggcctggagatcgccggcacggtgcgggcggtcggcagcgaggtcagccgcttcgccgtcggcgaggcggtgatggcgttgattcccggcggcggctacgcgcagttcgcggtggccgacgagcgcaccaccctgcacctgcccgacggcctgggcatggaggaagcggcggcgctgccggaaaccttcatgaccgtctgggtcaacctgttccagcgcggtggcttcaaggccggcgagacgctgctggtccacggtggcgcctccggcatcggcaccgccgcgaccatgctgggcaaggccttcggcgcggcgaaaatctttaccacgatctccagcgaggcccagcgcgaggccagcctgcgcctcggcgctgacctggcgatcaactacaccgagcaggatttcgtcgaggaagtgctgcgcggcaccgaaggtcgcggggtcgatgtgatcgtcgatatcgttgccggcgactatgtgacgcggaactaccaggcggcggcgatgaacggacggatcgtgcagatcggcgtgatcaagggcaaggccgccgaagtcgacctgttcccgatgctgagcaagcgcctggtccatcttggctcgaccctgcgctcgcggagccacgacgagaaaggcgcgatcatcgccgaactggagcgccaggtctggccgcacgtgcgcgccggcactgtccggccgcaggtgttccgcaccttccccctggaacaggcgcgccaggcccacgaactgatggactccggccagcacatcggcaagatcgtcctcacgtcagctccctga

SEQ ID NO: 318315 - DNA, 789 bp, Pseudomonas aeruginosa
atgggcttttgccggcaagccggggatcatgcggaaaaagccaggaacgtccgctccatgaccgactacgccagccttctcttcgacagcgtcgcccggctgcgcaaggccgctaccaccgaggcggtctgccgcgagatggtggagttctccgcacgcctgggcttcgaccgggtgatcgtctgcagcctgttcccccgccccgacgaggacgaactgatcgacgagctgttcttcgtccatggcgactgggccgaggggcgcagcgcccagcagcgcgacgcctatcttctgcactgtccggtcacccggcacatcctcgaactggacgagccgttcttctggtcgaagagcccctcggaggatcccgagcgcatgacctaccgcatcgtccgtggggtccgcgacctcggccaggtcaatggcatgcaggtgccggtgttcggccgcaacggcctggagggcgcggtgtctttcgccggcgagcggctggacctgaatgccggttgcaagctcgccgcccaggccttctgcccgatcctgttcttcgccctgaagcgcctgcgcggccctgtgtcggcgggcgatgcgcaagcgctcagcgagcgcgagcgggaagtcctgcaatggatcgccctgggcaagcagcaggcggaggtggcggcgatcctgatgatttccgagcgcaccgtggagaatcacctgcgtgccgcccgccgccgtctcggcgcggcgtccaccgcccaggcggtggcgcgggcgctgcgcctgggcgatatcgaggtctga

SEQ ID NO: 318316 - DNA, 876 bp, Pseudomonas aeruginosa
atgagcaacgagcgcgataccagcagaaccccgacgcccgaccacgccgagcacaacgcgttctttccctcgccctattccctgagccagtacacctcggcgaagaccgacttcgacggcgccgactacccgaccccgtacaagggcggcaagaaggtgctgatgatcggtaccgacgaacgctacatcctgatgcagaacggcagcatgttctccaccggcaaccacccggtggaaatgctcctgccgatgtaccacttggacaaggccggcttcgagttcgatgtcgccacgctctccggcaacccggtgaagctggagatgtgggcgatgcccggtgaggacgaggcggtgaagagcatctacgcgaagtacctgcccaagctgaaagcgccgcggaagctcgccgacctcctggagcaggccgtcgccgacgactcgccgtacgccgcggtgttcgttcccggcggccacggcgtgctggcgggcattccgcacagccgggaggtgaaacggctgctcaatgccttcctcgccaaggaccgctacatcatcaccctttgccacggtccggcctgcctgctggcaccggcggtcgacgagaagccggaggactacccgttcaagggctacgagatctgcgtgttccccgacgccctggacaccggtgccaacctggagatcggctacatgcccggtcccctgccctggctggtgggcgagaacctgcagaagctcggggtgaagatcctcaacaagggcatcaccggccaggtccaccgcgaccgcaagctgctcaccggcgacagcccgctggcctccaacaaccttggcaagctggccgccaagacccttctcgaagcgttcgcccgctga

SEQ ID NO: 318317 - DNA, 414 bp, Pseudomonas aeruginosa
atgtcactgccgccgtacctcaagcccggcgacaaggtcgtgttgtacgaccagcactgccgcttctgcacgctctggagcggtttcctggcacgccgcgccgaccaccggctgaagctgcttgccgcgcagtccgccgaaggcctggcgattctcgattggttcgggctggcacccgatcatttcaacacctggctgttcgtcgacggcgcctacgcctgcgacgacaacgatgccctgctcgaggtgctgcgcctgttgccgggcccctggcgtcacctgcgctggctgcgcctgctgccagcctggctgcgcgacgagtgccacgaggcgctacggcgcaaccgctggcgctggttcggccgccagcgcccaccccttcgtcgtcgctcctggcgtccccgtcgagcctga

SEQ ID NO: 318318 - DNA, 351 bp, Pseudomonas aeruginosa
atggcccttgacccgagccaacgccgacgactgcgccacgcgctatccgacgccttcgtcgacactctcctggagcccgaggatatcgcccggcggataaagggcgtcgacccggcgttgctggagcggttgttcttcgaggaggtggcgccggtctgccacggcaacctgctcagccccgctccggcggtatggaccgccttcgacgaggcctggctggaagaggccatcgagcgacgcctggcacggcaaaggagctgcgccctgcgacgctggcacgagcgctgcctggtcgcctggctgcgatggcgatacgccgacacctggcgcgcgatcgccggcgctctttga

SEQ ID NO: 318319 - DNA, 780 bp, Pseudomonas aeruginosa
atgacgcccagaaaaggaaagctacctgccgtgctcgcctgcatggcagcgctggcgggctgcaacatcaacccggcgaaccagggctcggtgtcgtcctggttctccatgcgcgccggcgatccgcccagcttcgtcaccggcgtggtcggcttcgagaacaccggcagcaacgacccgtccacccgcctgaccctgcgtttccgcgatcccgcctccaagacccatgcggcccacgtcaccacctcgtcgtactccgagctgttcagcctcgcactgacgccgcgctactacgagctttacgagttcgaggtgaggtacctgtcctataccgtcacccgcgagaccggtgcgtacgaggagcgctgcgaggccaacggcgaggcgctggagaagacggtccggaaaaggaagcgcagcgtcacccacacggcggtaaacgtggagtccaactgtcgttctacgccgctgaccaagaccgactactactacgagacctatacctccaagccgttctccgcgccgttccgtgccgagagcttcgccaccaactacatcggcgacttccgcgtgcagtgcagctacaaggagaagaagggcaagaccctcgtcgatagctgccatctcaactacggcgccgtcagccgcgatcgggtggatgcctgggtggcgcagatgaacgaggcagacaaggacaagcgcgagccgctgccgccggtacgccagcaggcggtcgacacgaagaaggccggcaagctcatccattcggtatttcgctga

SEQ ID NO: 318320 - DNA, 1269 bp, Pseudomonas aeruginosa
gtgtccacgaccagcctctgcccctccgccacgcgggaacacggtcccggcgcgaaacgcgtcctgcctctgctgttcctcacctgcctgctggatgccgctggcgtcggcctgatcgtgcccctgctgccgacgctgatcggcagcgtggcgccgctggcgatccgcgacgcggccacctggggcgccgccctggtgatgaccttcgcgctgctgcaattgttcttttcgccggtcctcggcagcctcagcgaccgcttcggacgccgccccgtcctggtcctggcgatgctcggcttcgccctcagctatctgctgctggcgctggccgacagcctctggatgctgttcctcggtcgcgcgctggccgggctcaccggcgccagcgtggccaccgcgatggcctgcgcggctgacctcggcacgcacgggcagcgcacccggcacttcggctggctgtacgccggcctcgccctgggcatgatcctcggccccgccctcggtgggctgctggcggtgcacggcacgacgctgccgctgttgctggccgccggcctgtgcctgctcaacgccctgctcgccggcctgttcctcgaggaaaccctgcccccgacgcgacgccgccgcctggacccgaggcggatgaatgccttgcgctcgatcagcggcctggctcggcaaccgggggtcggacgcctgctggcggtgcttgccctggtattcctcggcttgcaggcggtgatggtggtctggccgttcttcgtgatcgagaagtttcactggagcagcgcctggatcggctactcgctggccctctacggcgtgctcgcggtgctcgcccagaccctcggcgtgaacctctgcaagcggcgcctggacgacgcccgcctgctgcgcctgggcctcgccctgcaaggctgcggcctgctgctgttcgccctggtcgactcgtcattctggctggtctgcgcgctgctgcccttcgcgctcggcagcctcgccaccccggccatgcaggggctgctctcggcccgcgtgccggtcgaccgccagggcgagttgcagggcgtgctgagcagcctgatgagcctcgccgcgatcgtcggtccgccgctgatgagcggcctgttccactggggcagcggtccgctcgcgccagtgcccctggccggcgcgccattcctcgccggcgcccttctcgttctggccgggctggtcctggcctggcaacttcgacctacgggagaagaacgatcatggaccggatag

SEQ ID NO: 318321 - DNA, 978 bp, Pseudomonas aeruginosa
atggaccggatagacatgggcgtgctggtggtgctgttcaatcctggcgacgacgacctggaacaccttggcgaactggcggcggcgtttccgcaactgcgcttcctcgccgtcgacaactcaccgcacagcgatccgcagcgcaatgcccggctgcgcgggcaaggcatcgccgtgctgcaccacggcaaccggcagggcatcgccggcgccttcaaccaggggctcgacgcgctgttccggcgtggcgtgcagggtgtgctgctgctcgaccaggactcccgtcccggcggcgccttcctcgccgcccagtggcgcaacctgcaggcgcgcaacggtcaggcctgcctgctcggcccacggatcttcgaccggggtgaccggcgcttcctgccggccatccatctcgacggactgacgctcaggcaattgtctctggacggcctgacgaccccgcagcgcacctcgttcctgatctcctccggctgcctgctgacccgcgaggcctaccagcgcctcggccacttcgacaaggaactgttcatcgaccacgtggacaccgaatacagcctgcgcgcccaggcgctggacgtccccctgtacgtcgacccgcggctggtcctcgagcaccgcatcggcacgcgcaagacccgccgcctcggcggtctcagcctcagcgcgatgaaccacgccccgctgcgccgctactacctggcgcgcaacggcctgctggtcctgcgccgctacgcccggtcctcgccgctggccctgctggcgaacctgccgaccctgacccagggcctcgcggtgctcctgctcgaacgcgacaagctgctcaagctgcgctgcctgggctggggcctgtgggacggcctgcggggacgcggcggcgcgctggagaccaaccgcccgcgcctgctgaagcgcctcgccggcccggccgtggcgtccgtagcttccggcaaggccaaggcctag

SEQ ID NO: 318322 - DNA, 408 bp, Pseudomonas aeruginosa
atgctcaccggtctcaatcacctgaccctggcggtcgccgacctgccggccagcatcgccttctaccgcgatcttctcggctttcgcctggaagcgcgctgggaccagggcgcctatctcgaactgggttcgctgtggctgtgcctttcccgggagccgcagtacggcgggccggccgcggactacacgcactacgccttcggcatcgccgccgcggatttcgcccgcttcgccgcgcagctgcgcgcgcatggcgtgcgcgaatggaagcagaaccgcagcgagggcgattcgttctacttcctcgacccggacggccatcgcctggaggctcacgtcggcgacctgcgcagccggctcgcggcgtgccggcaagcgccctatgcgggaatgcgtttcgccgactag

SEQ ID NO: 318323 - DNA, 912 bp, Pseudomonas aeruginosa
atgccggctttcacccgttccgaactcgccgacctgaacgtcttcatgaccatcgtccggcgccgcagcttccgtcactcagcccaggagctgggtgtcagtacctcggcgctgagccacagcatgcgcaatctcgaggcgcggctcggggtgaagctgcttaaccgtaccagccgttcggtggtgccgaccgatgccggtagcgcgctggcggccaagctggaggatggtttccaggtgatcggcgaggcgctcggcgagctcgatgcctatcgcacctcgccggtgggccggctgcgcctgaacgtgccgcgcgatgcctcgcggctgctgctggggccggtcctcaggcgcttcaccgaggcgtatccggacctgcaactggaactttcggtggaggaccgcatggtcgacatcgtcgccgacggctacgacgccggcatccgttacggcggcacggtgccccaggacatggtcgcggtgccattgaccggggagctgcgctgggtggtggccgcgtcgcccgattacctggcgcgccacggcgtgccccagcggccggacgacctgttgcggcacgcctgcatccgcatgcgcctgggcgacaactcgttctacaaatgggaactgggcgacggcgagcggatggtcgaggtcgacgtgcccggccctttcagcgtcaacgaaagcaatacggcggtcgccgcggccctggacggcattggcctggcctactgcctggaagtgggaatcgccgaggagctgcgtagcggccggctgcaactggtattgcccgactggacctcgatgggcgcgccgttctgcctctattatccgagccgacgccagccgcaacccggcttgcgccaactgatggaaatgatccgcggcgactggctggggcgtgcctga

SEQ ID NO: 318324 - DNA, 990 bp, Pseudomonas aeruginosa
atgagcgttgaaagcattcgcatcgagggtatcgacacgccggtctcgcgcatcggcctcggcacctgggccatcggcggctggatgtggggcggcgctgacgacgcgacgtcggtggaaaccatccggcgtgcggtggaatccgggatcaacctgatcgacaccgcgccggtctatggcttcggccattccgaagaggtcgtcggcaaggccttgcaggacctgcgcgacaaggcggtgatcgccaccaaggcggcgctggagtggagcgacgcgggcatccaccgcaacgcctccgccgcacgcatccgccgggaggtcgaggactcgctgcggcggctgaaaaccgatcgtatcgacctgtaccagattcactggccggacccgctggtggcgcacgaggaaaccgccggcgaactggagcgcctgcgccgcgacggcaagatcctcgccatcggcgtgagcaactattcgccggaacagatggacgggttccgccagttcgctccgctggccagcgtgcagccaccctacaacctgttcgagcgcgccatcgacgccgacgtgctgccctacgccgagcgtaacggcatcgtcgtgctggcctacggagcgctgtgccgcggcctgctttccggacggatgaacgccgagacccgcttcgatggcgacgacctgcgcaagtccgacccgaagttccagcagccccgcttcgcccagtacctggcagcggtcgcgcaactggaggaactggctcgcgagcgctatggcaagtcggtgctggccctggccatccgctggattctcgatcgcggccctacggtggcgctgtggggggcgcgcaagccggagcagttgaacggcatcgccgacgccttcggctggcgcctggacgacgaggccatggcccgcatcgagcggatcctcgccgagaccatccaggatccggtcggtcccgagttcatggcgccgcccagccgcaacgcctga

SEQ ID NO: 318325 - DNA, 588 bp, Pseudomonas aeruginosa
atggaaaacgtctacaagaccccggaagcgcccctggtggaaacccgcggcgcgaagcgggcgcatttcttcgtcacctcgctgggcaagatgagcgtgctcttcctcctcaccctggggctctacggcgtgtactggatgtacaagcactggaaggcccagcaaccgcagatggagcggcggatcagcccggtatggcgggcgatcttcggcatcttctttttccacgccctcgcccggcggatccaccaggccctgccggaagagcgccaggcactatggagcccgagcgaggatgcgacctgggcggtgctgctgacggtcgcggcgaacctgatcagccacctcaccgacgtggtccccgcgctggagccctactcgctgccctcgctcctgctgctgctcacgccgctgatcccgatgcgtaacatccagcgccaggccaacctcgccagcggcgacccgcagggcacgggcaacgccggctattcgggctacaacctgctgttcatcgtgctcggcgcgctctactggctgctgatcctgatcggttccgcggtgatcctcttcggctcgtcccagggctga

SEQ ID NO: 318326 - DNA, 753 bp, Pseudomonas aeruginosa
atgcgcgctgtcgtcgaactgctcgccggcgcccgccgcctggtgatcttcacgggcgccggggtgtcggcggaaagtgggattcccaccttccgcgatgcccttggcggtctctgggcgcgctacgatccggcggccctggccacgcccgcggccttcgccgacgatcccgcgctggtctggggctggtacgagtggcgccgcctgaaggtgctgggtgtccagccgaatcccgcgcaccgggcgattgccgcattgagcggacgaatcgccgacacccggctggtcacccagaacgtcgacgacctgcatgaacgcgccggcagccgcgacgtccttcacctgcatggcagcctgcacgcgccgcgttgcgcaacctgcgcggcagcctaccgggacgccttgcccgattcggtcgagccggaagagggacgacggatcgagccgccgcgttgtccggcctgcggcggacaggtccggccgggcgtggtctggttcggcgaggcgctgcccgaggcggcgctgcgcgaggctttcgccgcggcctgcgagtgcgacctgttgctcagcgtcggcacttccggcgtggtgcagccggcggcgcggatacccggactggcgctggagcacggtgccagcgtcgtgcatgtgaacccgcaaccggtgcgcacccgccatccgcgcgaacactgtctcgtcggtccggccggcgagatgctgcccgaactgttgcgccgggcgtttcccggctga

SEQ ID NO: 318327 - DNA, 1497 bp, Pseudomonas aeruginosa
atgccaggggccgtggatttcaaggagcggatatcccgccagcgtccgcatgacagggaaacctacggacatgccgggaataccgatctgcaagacatcgtctaccagttggaaagcgaccgcgggcgcatcgtcaattccgccgccgtgcggcgcctgcagcagaagacccaggtcttcccgctggagcgcaacgcggcggtgcgcagccgcctgacccattccctggaagtgcagcagaccgggcgtttcatcgtccgcacgctgttccgccaactgggcccgcgtgccgcggaggccggcctggacgggctggaaggcgcgctggaaagcctggtggaaatggcctgcctgatgcacgacgtcggcaatccgccgttcggtcatttcggcgagtacgccatcaacgattggttcgaacgcaatctcgacgccctgttcgagcgccgcgtaccgccgggccagggcgacggcctgttgcagcagcgcatgctcaccgacctcaagcatttcgaaggcaacgcccaggccatccgcctggtggtgaagctgctgcgcctgaacctcacctacacgcagaccgccggcctgctcaagtacgtgcgtccggcctacgagccgaagccggacaaggcagcggcgaaccactacctgaacaagaagccgggcttctatctttccgaggaagccttcgtcgacgaactgcgccaagtcctcggcatgcgcccgggcactcgccaccctgtggcctacatcatggaagcggccgacgatatctcctattgcctggccgatatcgaagactcggtggaaaaaggcatcctcgacatccgtcaattggcggatctgctggtgaagaagtttgccgtccaccattcgccggacgcgccgattcccggcgacgcggacaacatgagcttccagcggatggtcgactactcactggaaaaggccgagcgggagccgatcaacaaggtcagcgaattcttcatccgcctgcgggtgaaaatgatccacccgctggtccagcacgccgcccagcagttcatcgacaacctcgaagcggttcatgccggcaccctcggccgcgcgctgatggaggacggcagcctgccgcacgccatcgtccagacgttcaaggacgtggccatggaatgggtgttctgccatccggaggtggaaaccctggaattgcagggctaccgcatcatccagggcctgctggatttctacgcgccgctgctgcgcctgccggccgaggagttccaggccctcgccgaaggtcgccaggccgccgcgccgcatccgcaactgctggttcggcgcctgccgagccagcagatcaaggcttacctggaggccatgaaaggtgtggcggaggacccgttgcagcggcagtgggagttctaccaccgctgccgcatgctccaggatttcgtcagcggcatgaccgaccagcatgcccaggacgaataccgcgcgttgtccgcgctgtaa

SEQ ID NO: 318328 - DNA, 321 bp, Pseudomonas aeruginosa
atgagcatcacatccaccgacatctgccaggccgccgatgccctcaaggggttcgtcggtttcaaccgcaagaccggccgctacatcgtgcgtttcagcgaagactccttcggcatggacgtcgccgacgacagcatcacgcccaccagcgagttcgtctggagttcggtacgcgacgacgtcatgcgcctgggccgcgagcagttgcagatcctgctggaacagaacatcaacgaacgactgaacatcggcgagccgctactggtctatctgcgccgccaggacctgccggaaatcaccgcacaacgccagttgcgctga

SEQ ID NO: 318329 - DNA, 540 bp, Pseudomonas aeruginosa
atgatccgggaaatcctcaagatgggtgacgagcgcctgttgcgcatcgcgcagccggtgccgtccgaactgttcggcagcgaggagctgcaacggctgatcgacgacatgttcgaaaccatgcatcacgtcggcggggtagggctggccgcgccgcagatcggcgtcgacctgcagctggtgatcttcggtttcgagcgcagcgagcgctatccggacgccccggccgtgccgccgaccatcctgctgaacccgcggatcaccctgctggacgacgagatggaagagggctgggagggctgcctgtcggtgccggggttgcgcggcgcggtatcgcgccatcggcgcatccgctaccagggcctggacccgcagggacagccgatcgaccgcagcgtcgaagggttccatgcgcgggtggtgcagcacgagtgcgaccacctgatcggccgcctgtatccctcgcgaatcaccgacttcagcaagttcggcttcaccgaggtgctgttccccgacctggaccccgccgcggacgattga

SEQ ID NO: 318330 - DNA, 573 bp, Pseudomonas aeruginosa
ttgccttcgttgcccaccttgcagcccctcgacctctacaggcgcaccctggcctgcctggtcctggcggtttcctgcctgggcggcggaggcctgtgggcggacgacgcacggacgtcggtcgagcaacgcagcaatgcggtcagccaggttctgctgggcatattcagctacgtgcgctggccgaaggagccggcggtcctgcaactctgcgtggtcggaccgaccgagtacgccgacggcctgctccgcggcatggtgcaggccaatggcaggcgcgtgcatgcggaacgccgcgcggtggacaacccggacctcggcacgctctgcaacgtgatctacctcggagtggtcgacgagcgcgagcgccagcaggtgttccgcagcctggccgggcatccggtcctgtccatcagcgagcgtggcaccgaatgcagcgtcggcagcatgttctgcctcaacgtcggcggcccgcgcatcaccttcgaggccaatctcgactccatcgcccgcagcggcgtacgcgtgcacccgagcgtattgaaactggcaaggcggcaggccactccgtga

SEQ ID NO: 318331 - DNA, 1308 bp, Pseudomonas aeruginosa
atgaaccgtcgtcgtcgctatacgggttccaatccatcgctgcgccgggtgctctatcgcgcgcacctgggcgtggcgctggtcgcggtattcaccgccgggctggcggtgaccctggtcggcctgctgaccctgcgcgcctatgccgaccccaaccagcaactgatcgcccgttccatcagctataccgtcgaagccgcggtggtcttcggcgatgcccaggccgccgaggagtccctggcgctgatcgcctccagcgaagaggtctccagcgccatcgtctacgaccgccagggacagaccctggccagttggcatcgggaaagcaccgggccgctgcacctgctggaacagcaactggcgcactggctgctcagcgcgccgaccgaacaaccgatcctgcacgacggccagaagatcggttcggtggaggtgaagggctccggcggcagcctgctgcgcttcctgctcaccggtttcgccggcatggtcctgtgcctgctgcttaccgccctgggcgccttctacctgtcgcggcggctggtacgcggtatcgtcggcccgctcgaccaactggcgaaggtcgcgcataccgtgcgccgcgaacgggatttcgagaagcgcgtaccggaagccggcatcgccgagctgagccaactgggcgaggacttcaacgccctgctcgacgaactcgaatcctggcaggcgcgcctgcaggacgagaacgcctcgctggcgcaccaggcccaccacgacagcctgaccagcctgcccaaccgcgccttcttcgaaggccgcctgagccgggcgctgcgcgatgccaacgagcatcgcgagcaattggcggtgctgttcatcgacagcgaccgcttcaaggagatcaacgaccgcctcggccatgccgccggcgacaccgtgctggtcaacatcgccatgcgcatccgtgggcagttgcgcgaaagcgacctggtggcgcgcctgggcggcgacgaattcgccgtcctgctcgcaccgctggcgtccggcgccgacgccctgcgcatcgccgataacatcatcgccagcatgcaggcgccgatccggctcagcgacggcagcacggtgagtacctcgctgaccatcggcatcgccctctatcccgagcatgcggataccccggcggcgctgctccacgacgccgacatggcgatgtacatcgccaagcgccaggcccgcggcagccggcgcctggcggaactcaacgacccccgcatccttcaggaagaaaaggagatagacagtgctaccccagaggctccacccaagtag

SEQ ID NO: 318332 - DNA, 507 bp, Pseudomonas aeruginosa
gtgctaccccagaggctccacccaagtagattgcttgccctcgccctgttcagccttgtgctgggcctggccggttgccagaccaagccgccgcagaccggcctgagcgccgagcagatcgccgtgctccaggagcagggcttcgaactccgcgacgaaggctgggagttcggcatgtcgagcaaggtgctgttcggcaacaatctagaccgtctcaatcccgacagccgcaacaccctgaccaagatcgcccgcgccctgctcgcggtagacatcgacaaggtccgcctggaaggccacaccgacaactacggcgacgaaggctacaaccagaagctctccgaacggcgcgccgaatcggtggccgcggtattccgcgaagccggcatgccggcggccaacatcgaggtccgcggccttggcatgagcaagccggtggccgataacaagacccgcgccggccgcagcgagaaccgccgcgtcgccatcatcgttcccgccgagtaa

SEQ ID NO: 318333 - DNA, 555 bp, Pseudomonas aeruginosa
atgaaccggcattactacatcagcgacaacctcgacgagctggaacggctcgaagccgaactggaagccagcggcatcgccaccgagcagatccacgtcctcagcgaaaaggacgcggagaccggccagcgccatctgcacgaagtctctccgttcatgaagaaggatgtggtccgctccggccgtgtcggcctgctggtcggcctcgtcctggccatcgtcgccgtggccttcgcctatgccagcggctggacggaaaccgccgccggctggattccggtgatcttcctcggcgccatgctctgcgcgttctgcctgtgggaaggcagcttcttcggcctgcagcgcaccaaccgcgccttccgtcccttcgaagaacgcctgcaccaggggcagcacctgttcttcgtcgatgtgaagaacgcccaggagccgatcctggtcaacgtggtcagccaccacccgcgcctgcaggacgccggcaccggccccgcggtctctccgctgctgctgggctggcagcaacgctggcggcagttccggcggatggtctga

SEQ ID NO: 318334 - DNA, 375 bp, Pseudomonas aeruginosa
atgaaactcgataaagcggcagccatcgcacagctcaaccaggccttgggcatgtccgtgctggatgccggcaacaccctgctcgcccgcttcaacaagagcaagaacgtctggtggttcgatattccgctcagccaactgaaggccggcaagttcctcaacctgctgctggcgaacccggccggcgatgcagtggagcacctgaaggtgcccaccggtttccttcgccatcagcaggacagcctggaactgcgcgacaagaacgcccgccggccgaccctcagcctggagctgagcgcggaccccggcaagcgcctgcgcgacgtccgccccggcggcgctggcctggacttcgccccgttcctccagccctga

SEQ ID NO: 318335 - DNA, 840 bp, Pseudomonas aeruginosa
atggcggtcatcgggcgtttcaattcactgcaggtggtcaagcacacggagttcgggctctatctcgacggtacccagcacggcgagatcctcctgcccaagcgctatgtgccgaaggaccagcccagcgaagtgggcgactggctcaacgtgttcatctacctggacagcgacgaccgcctgatcgccaccacccagacgcccaaggtccaggtcggcggtttcgccagcctgaaggtcgtggagatcaaccggatcggcctgttcctcgactggggcctgcccaaggacctgctgctgccgcattcggaagagaagcgtccgttgcaggtcggcgactactgcgtggtctacgtctacctggacaagcgcaccaaccgcatcaccgccaccgcacgcctggaccgccagctggacaacctgccgccgcgctacagcgtcggccaggcggtcgacctgctggtggtggagcgtaccgagatgggcttcaaggcgatcatcgagggcaagcactggggcctgatccacaagaacgaggcgttcaagttcctccgcagcggtatgcgcgaacagggctacatcaaggaattgcgcgcggacggcaagatcgcccttagcctgcagccggtcggcgccgaggccgccgtcgagctgagccagcagattctcgcccggctgctggaggccggcggcagcctgccgctcagcgacaagagttcgccggaagatatccaccggctcttcggggtcagcaaggggaccttcaagaaggccatcggcggcctctacaagaaaggcctgatcctgatccacccggaacgcatcgaactgccgcgctga

SEQ ID NO: 318336 - DNA, 2325 bp, Pseudomonas aeruginosa
gtgcgtccactcagccgttggctctcatcttgcggctcgcttctggcgctggccgcgctgttcctggtcgttcccctcgccggccgctactggctcggctggtcgacgccgttcggctatctctcggacctggccctcggcagcctgctggtgctgctcctgcatcgacgctccctgtggttcgcgctcccggtcatgctgctctggtgcctgttcctgatcggcaatgccgaactggtcggcgcggtcgggcgcatgccggaaccttccgacctcaagtacctgctggatccgcagttcgtcagcagctccacccagggcggcggcctcgcccacctgccactggcgctcggcctcggtggcgcgacattgctttgcgtgctgctctggcgtcgccgcggtccgcgcctgccgcgctatgcctacgcgctgccggcggcgttcctggcggcgcatgtcggcctgcaatacctgcgtccgagcgatgccgaccaatggcagcagtacaacctgccgcacaagctgctggccagcgcgctcagcagtggccaactggcggtcgaagactggctcgccgacgaccgtccggacaccccgccggacgtcgccgggctcaaccagctcgacctttccggaacgccgctgctggccggcggagggcgcgcgcgcaacgtcctgatcgtggccatggagggaatccccggcgcgtatatcgccgccaaccgcgccgccatcaacagcagctaccacgaagcgccgatgcccagactgagtggctgggccgaacgggcgatgaccaccccggactacgtgctgcacagccaccagaccatccgcggcctctacgccatgctctgcggcgactacagcaagctcgactcgggcacgccgaagggcgtcgagctgctcaacaacccggcccgggccagggagtgcttgcccgcccagctgcgccagcacggtttcagcacgcacttcctgcagggtgccggcctgcgcttcatggccaaggacaaggtcatgccgcagatgggcttcgacaagaccctcgggcgcgactggttccgcaacacgtcctacctggagtttccctggggcatggacgacaaggccttcttcgagggcgccgcgacctacgtgaagcagctgcgccagcagaagaaaccctggatgctgaccctgctcaccgtcggcacccaccagccctactcggcgcctgccgactacctggcccgctacccgagcgccaagcaggccgcggtggcctatctcgacgacgcgatcgacgccttcctcgccgacctggagaaacagggcgtgttgcgcgacaccctggtggtgctcacttccgacgaatcccacggtgtcgaccaggtgcgcctcgcctcggcctggggcttcaacctggtactggcaccggaacaggcggcgctgccgccgatcaagagcggcgtctacggccacgtcgacctcgccgcgtccgtcctcgactatttcggctaccgcgtgccggcggggatttccgggcgctcgctgttccgcgactacgccagcggccgcgaaatgatgtcctacaccaacggcatgctgcgccaccacgacggcaaggacaccttcgtcgaatgcgatttccagcaggtctgccggcgctaccgcagcgagggcttcatcgccgacgaagccgagttcctcggtcgcttcagcggtcgccaggcacgcctggtcagccagcgcgccgccgtcctcgaccactccgtgcaacaggccggccagttgggccaggagttccagttcgccacccacgaacgcatccgcctgaagccggaaacccacaacgactggaccgacaacctgatcggcgcgcaatacctggagatgccgaagaacagcaggaccacggtcaccctgaagatccgcgccttgcagatggaccgcaacggcgcccgggtgacgctgaagaccaaggagttcgaacgcgacgttcccataccggtaccggacatcccgcgcctgctcaagggcaagccgctggacatgagcttcaccttcgacaacccggaagcgcgcaaggccttctccttccacttgctcgccgagggccgcgggatcatcgagatcagcgacttccacgtggtcacggcggccaacccggaacccgtggaaagccgcagccaggtcgccgaagcggcgaaggaacagccgctgctgagcaccctgaaaagcctgttcgccaaccgccccgaaaccgaggaagcggaacgcgcggacgcccctcgggagcgcaccgtcatccccgagcagaaggccctgatcctttcgcactga

SEQ ID NO: 318337 - DNA, 336 bp, Pseudomonas aeruginosa
atgaagcacctggcattcctcgccctcggcggactcctgctggcgcccctggccgaagcggccagcttcgattgcgaaaaggctgagcgagcggacgaaaaggccatctgcgcgaaccgggcgctgaacgacaaggacgtcgagatgagcgtcaagtaccacttcctccgcggcctgttcgccatgggcggccgcggcgccatgcaggaccggcagcaggactggctgcgtgagcgccggcgctgcggtggcgacaccgactgcctctcccgtgcctacgcgcagcgtatcgacgagctggacaagcagtacgcgggtatcgacaagccgctctga

SEQ ID NO: 318338 - DNA, 1767 bp, Pseudomonas aeruginosa
atgccagccattctctcctcccgccaacgtatcgccctgcgcctggcctggcgcttcatggcgccttaccgctggcgcatgctcggggccctggtggcgttgctgttcaccgcggcgatcaccctgtccctgggccagggcatccgcctgctggtggaccaggggttcctcaccgcctcgcccgaattgctcaatcgctacatcctgctgttcttcgtgctggtgctcggcctggccgtgggcaccttcgtgcgcttctacctggtgtcctggatcggcgagcgcttcgtcgccgatatccgcaagcgcgtgttcgaccacctgatcgagttgcatcccggtttctacgaaaccaaccgtagctccgagatccagtcgcgcctgaccgccgacactacgctgctgcagacggtgatcggttcctcgctgtcgatggccctgcgcaatgccctgatgctggtcggcggggtgctgctgatgttcgtcaccaacgccaagctgaccagcatcgtggtgctggcattgccgctggtgatcgccccgatcctgctgttcggccgccgcgtacgcagcctgtcgcgggaaagccaggaccgggtggccgacgtcggcagctacgtcggcgaaaccctcggccagatcaagaccgtgcaggcctacaaccaccaggcgcaggatcgccagcgcttcgccggcaccgtcgaacgcgccttcgacaccgcgcgcaagcgcatcgcccagcgcgcctggctgatcaccgtggtgatcgtgctggtgctcggcgcagtcggcatcatgctctgggtcggcggccgcgacgtgatcgccggcagcatctcggccggcgaactggccgcgttcgtcttctacagcctgatcgtcggcatggccttcggcaccctcagcgaggtgatcggcgaattgcagcgcgctgccggcgccgcagagcgcatcgccgagctgctcagggcgcgcagcgagatccgcccgccagcgcaaccacgcaagctggcggcgcgggtgagcgggaggatcgaattgcaggcggtgcgcttcgcctatccgacccgtcccgaacactgggccatcgacgacatcagcctggccgtcgaaccgggggaaaccctggccctggtcggaccttccggtgccggcaagtcgaccctgttcgatctgctcctgcgtttcttcgatccgcagcagggacggctgctgctggacggacagccgatcgtcgaactggacccggccgacttgcgccgcagctttgccctggtgtcgcagaaccccgcgctgttcttcggcagcgtcgaggaaaacatccgctacggccgtccgcatgccagcgccgccgaggtcgaggccgcagcgcgtgccgcgcatgcccacgagttcatcctgggtctgccgcagggctacgccacccacctgggcgagggcggcatcggcctgtccggcggccagcgccagcgcctggcgatcgcccgggcgttgctggtagacgcgccggtgctgctgctcgacgaggcgaccagcgccctggatgcggaaagcgagcacctgatccagcaggccctgccaggcctgatgagcggacgtaccaccctggtgatcgcccatcgcctggccacggtgcagagcgccgaccgcatcgcggtgatcgaccaggggcggctggtggcgattggtagccacgcccgtctgatcgccgagaacccgctctatgcgcgcctggcggaactgcagttcgccgtcggcggacgctag

SEQ ID NO: 318339 - DNA, 192 bp, Pseudomonas aeruginosa
atggccatcatgaagaaaaccgtcgcgccgaaagccgccaagccggctcccgcggtcgaaacccgcgaatccatcgaagcgcaggtcgccgccttcctccaggccggcggcgagatccagaagatcgccaagggcgtcagcggccaggtctacggcccgtcgcggcagatcaccatcagcaagaagcgctga

SEQ ID NO: 318340 - DNA, 222 bp, Pseudomonas aeruginosa
atgcctggccatcccgatccactgcacggcgtcaccctggaaaaactgctcaccgaactggtcgcccaccacggctgggcggagcttggcaaacgggtcgacattcgttgtttcaggaacgacccgagcatcaagtccagcctcgccttcctgcgcaagacgccctgggcccgggaaaaggtcgaggcgctctacgtccagctcaaacgcaaccaaggctga

SEQ ID NO: 318341 - DNA, 1149 bp, Pseudomonas aeruginosa
atgccgggcctgtctttgaatgccatcctgctgagcgctgtcgcactgctcgccccgtcggccgaggcggtggacgccggtcgccacgacagcgagctgggcgccgtcgaggtcaccccggtggttggcggtctggcctatccctgggccgtcgccttcctgccggacaaccagggcatgttggtcaccgagcggcccggcagcttgcgtttcgtcagtcccgagggccagttgtcggcgccgctggaaggcgtacccagggtcttcgccagcggccaggggggcctgctcgacgtcgccttgtcgccggggttcgccgaggaccggctggtctacctgacctatgccgaggccggcgaggacggccgcgccggaacggcggcgggacgcggccggttatcggcggacaagcgacggctggagggcttccacgtgatcttccggcagttgccgaagctttccagcggccatcacttcggctcgcgcctggtcttcgacggcaagggccacctgttcatcgccctcggcgagaacaaccagcgcagcacctcgcaggacctggacaagttgcagggcaagatcgtccgcctgtatccggacggcggcgttcccaaggacaatcccttcgtcggccgtacagacgcgcggccggagatctggagctatggccaccgcaaccagcagggcgccgcgctgaatccctggaccggccagctctggacccacgagcacggcccgcgcggcggcgacgagatcaacataccccaggccggcgggaactacggctggccgctggcgacccatggaatcaactacaccctgctgccgatccccgaagccaggggcaaggccgtcgacggtaccgaggcgccgcaccatgtctgggagaagtcgccggcgatcagcggcatggcgttctacgatgcgcagcgcttcccggcctggcagcacaacctgttcatcggcgcgctggcgacgcaggaactgatccgcctgcaactggatggcgaccgggtcgtccacgaagagcgcctgctgggcgatctcggggtgcgcatccgcgacgtgcggcagggcccggacggctatctctacctgctcaccgaccagaaggacgggcaattgctgcgcctggggttggcgcgctag

SEQ ID NO: 318342 - DNA, 624 bp, Pseudomonas aeruginosa
atgcagtcacgcctgatcgatggcctggaatgggacctggacgaggatggcagcggcggcctgtgcaacgtccatggcgacaaggtccatctgcgccagggcgacatggacggcgcctgcgggccctactgcctggtcatggcgatgctggtccgcggccaactgcgccggcgccaggccaagggcctggagcgggtcgacagtcgcagtcgctacgggcgcctgatgaaggcgctggaccagcacggcccgctgctgcgcgtcggcaccaccggcgtcgacctgctggagctgctggccgagatcaacgataccgagcatttcgccctcaagggcgaggggcgcaggttggtccggcacacccgcgaatacctggaggccggctttccggtagtgctcggtttccacggccgcaagggcagcgatatccgccactggggcctggccatcggcatgagcgagcgcgccttcctgctcctcgacccggcccacgacctgccgcgcgggcaggcctggaacgcggtgatcaccagcgaggcgcacggttcccggttcggctatcgctatatcaatgccaagggcacctgggcggtgaccctcaaggaaatggtcgccttgctttga

SEQ ID NO: 318343 - DNA, 711 bp, Pseudomonas aeruginosa
atgaccgacccgatccgcctgtccaaacgcctcgccgaactcaccgcctgctcgcgccgcgaagccgagctgtacatcgagggcggctgggtcagcgtcgacggcgaagtgatcgaggagccacagttcaaggtgctcgaccagcgcgtggagctgctgccgggcgcccgcgcggaaacgattgaaccggccaccctgctgttgcacaagccggccggctggcgccacgacgatttcgaaggcctgctcgctgcggggcggcgctggagcgatgaccccagtcccttgcgagcgctgaaaaaacacttcgcccgccagcgtcccacccttgcgctggacagcgaggcttcggggctggtggtgttcagccagcagcacggcgtactgcgcaagctggtggacgacggtgcacggctggagcaggaatacctggtcgaggtcgccggcgacctggccgccggcggcctcgagcgcctgcgccacggcctcgcctaccagggccgcaggctatcgccgtgcaaggtcagttggcagaacgaaagccacctgcgcttcgccctcaaagacgtgctgcccggccagttgcgcttcatgtgcgaaagcgaggggctggaagtgcggagcatccgccgcctgcgcatcggcgcgctgtcgctggccaggctaccgctcggcgaatggcgctacctcggcctccacgaacgcttctga

SEQ ID NO: 318344 - DNA, 780 bp, Pseudomonas aeruginosa
gtgccgcgctatccctacgaacgggtcgaggatcccgatctcgcccgctgcccggtggtcggcctcgaggtcgacagcaccggccaccgcagcgactggcattgccaccggcgcgcgcagttgctgtacatggcggccggtagcgtcacgctgtatttcgccgagcgcatttgccaattgacgccgctccaggccgcctggctgccggccggcgtgccgcatcgcacggtcctgcacgggcgcttcgcctaccgtagcctgtacttcgaaccctcggcgttcgccgagctgccggacagcgtccaggtcctcgaagtcgggccgctaatgcgcgaactgatcctgcgcatgaccggctgggcagccgacttgcaattggaagggccgcacctgacgctgttgcgcgcactgttcgatgaactggcgagcgcgccggcacacgccgcgagcctgccgatgccgcgcgatgcgcgggcgctgaaggtggccgaggcgctgctggcgcaacccgcgctggactggagcatcgaggcgtggggacgtgaggtcggcgccagcgggcggaccctggcgcgtctgttcaccgagcagaccggcctgggtttctcccgctggcgaacccaggcgcgcttgttcgaagcgcggaggcgcctggccgaaggccgctcggtgaccgaggtcgcccacgccctgggctacgccagcgacagcgcgttcatcgccatgtaccggcgggtctgcgggcagtcgccggggcgcgccctgcgtggcctcgaatga

SEQ ID NO: 318345 - DNA, 1158 bp, Pseudomonas aeruginosa
atgcctgaccgtcctcgccctcccctgctgctggtgctcgccctgctagccctgccgcaagtcgccgaaaccatcctttcccccgcgctgccggccctggccagccactggcgactggacgacgctaccagccagtggaccatggcgctgttcttcgtcggtttcgcccccggcatctggctctggggctggctggccgaccgcctcggccggcgcccggctctgctcggcgggctcggcctggcggccctggcgaccttcggtgcctgggccagtaccgactattcctacctgcttgcctgtcgcctggtccagggcctcggcctggcgacctgctcggtgacggtgcaggccagcctgcgcgatgtgctgcaaggcccggcgttgatgagctatttcgtcacgctcggcgcggtgctggcctggtcgccggcagtcggccccctcggcggccagtggctggccgacctcggcgggcacccggcggtgttcgccaccctggcggtgctgctcgcctcgctggcggcgctggtcgtcccggcctggccggaaacccgtccgctgctggcgggcacgcccgagcccgcgaccctggcgatcttccgacgggtcctggccgaccgcccgctacaaacgcgcgcactgctggtggcggtgctcaatgtgctggtgttctccttctacgccgccgggccgttcatggtcggcgacctgcccggcctgggcttcggctggattggcctggccatcgcccttgccgggagcctcggcgccttgctcaaccgacgcctgccgcgcacctggaacagcgctcgccgggtacgcctgggcctagcgctggcggccgccggcgcgacagcgcagacgctgttggccgccgtcggatacgccgaaggcctgtactgggcgctgccagccctgccgatcttcatcggcttcggcgtggcgattcccaacctgctgggtccggcgctgcacgcctacgacgattgccggggacgcgccggagccctgttcgggctcgcctactacctgctgatcggcctcggactgggcgcgtccaccctgctaccgttcgaccgtccctggccgctggccgcgtactggagcctgctgggcctggtcgcactgctgctggccaggcggctgccggaatga

SEQ ID NO: 318346 - DNA, 1197 bp, Pseudomonas aeruginosa
gtggccagaacgacgctcgaatcgatccagcacgccatcgaggtgaattcgtccctggcccttcccatcgccctggagaatctctcgcgtctgacccacctcgcgctgctgaccgtccccttcaacctgatccacatcctggtgttttccctcaaggacttccgcccggacctcggccatcagctctggcgccaggaaatcatgtacgcccatggcgccatggccctgctcttcggcggcatcggcctgctcgcgctatggctgcgccgccagccgcccaagctgtggcgcatgcgcctgctgatcctgctgggcggcgcagggatcataggcttcggcgtcgccatcgcctgcatcgaccagcgcatcaccagcaacatcacgccgctgctgctggcctgtttcgcctgcgccatgttcatcctgatccgcccggcctacgcggtgcccttctacggtctggcgatgctggccttcgaggtggcgatggaccacgcccaggccgacccgcaactgcgcctgtcgaaccaggccaacggcctcaccgcgttcggcctcggcctgctgctgtcgctgatcctctggcacggccacgtgcgcaacctgcgccagcaacgcaagctggagttgcagcggcaggagctggaggagaagaatcgccagttggagtacctggccggtcacgacccgctgaccggcctgttcaatcgtcgcgaattcgaccagctggtgctcatggaactcgcacgcatcgctcgccaaccgcagccgctgagcctgctgatggtcgacctggatcacttcaagtacatcaacgaccgctatgggcaccccttcggcgacgaggtcatccgccatgccgccaacctgctgcgcggcaatacccgtagcagcgacagcgtggcgcgcctgggcggggaagaattcctcctgctcctgcccgacaccgccgagcagcaggctcgcagccttgcggaaaaactccgcgaacgcctcgaaggtaccccgctggcgacgcaggacggcgtgctctgcctgaccgccagcttcggcgtggccagcctcgacggaggcggccaggccagctacgagcagctctacagcgccgccgaccaggctctctaccgggccaagagcagcggtcgcaaccgggtggaagtgattcgcctggccagcctcgcggaaagcctgcggtaa

SEQ ID NO: 318347 - DNA, 714 bp, Pseudomonas aeruginosa
atgctcaagcacctgctcgtgctcacctgtgccctgctcgccagttcctcggccctggcccaggtgatggcccgcgacctgggcgatttcgaactcaagctggccaccagtccgacccgcagcatggcccagggcctggtcaccccgggcagctccggcagtttccacggcggcctcgacctaagccacgaaagtggctggtacatcggcaactggacctccaacctcgaccccggcaagcccaccgagatcgactcctacgccggcttcaagcgcccgctgaacaaccggctgggctacgaaatgggcctgatccgctacagccgcccggagcagccggccaacgacgcagccgaactctacggcggcctgtcgatcttcggcagccggctcggagcggccctgagcagcgacccggggcgcaacgacaccaccctgttcgccgacctcggggtcaacccgccgttcggtttcgacgtcaccctgaagtacggcaaccatcgcctggacaacccggcgagcctcagcggcgggggctacgtgagcgtcttcaacgactggtcggtgaacctctcgcggccctggctgggcatcgacctgaacctgtcctacagcggcaccagcctgaccggcaacgattgcagcgcctactcgggacacaacagctactgcgacaccacgttcatgctgaaggcgtcgcgtccgttcttctga

SEQ ID NO: 318348 - DNA, 444 bp, Pseudomonas aeruginosa
atggagaagcgcgcggcgcggctggcgccggtggtggacatggccagcaaggccgagcgggatgccgcgacccagctgggcaggtgccagcagcaattgctcgcggcacagcagaagctggcggagctggaacgctaccgcaacgactaccagcagcaatggatcagccagggccagaagggcgtcagcggccagtggctgatgaactaccagcgcttcctctcgcaactggagaccgccgtcgcccagcaggccaacagcgtgacctggcaccgcgaggcggtggacaaggcgcggctcaactggcaggagagatacgcccgcctggaagggctgcgcaagctggtcgagcgctacctggaagaggcgcgccaggccgaggacaagcgcgagcagaaacagctcgacgaactcgcccagcgtacccgccgccaggacgactga

SEQ ID NO: 318349 - DNA, 1356 bp, Pseudomonas aeruginosa
atgcgccttgagcgaaccagtttcgccaggcgcctggagggctacaccgaggctgtctcgctgccggcgcagccggtggtcgagggccgcctgctgcgcatggtcggcctgaccctcgaagccgaaggcttgcaggccgcggtcggcagccgctgcaacgtgatcaacgaaagcggctaccacccggtgcaggtggaggccgaagtgatgggcttttccggtagcaaggtgtacctgatgccggtcggcagcctcgccggcatcgcgcccggcgcgcgggtcgtgccgctgccggacaccgggcgcctgccgatgggcatgtcgatgctcggccgggtgctcgatggcgccggccgcgccctcgacggcaagggcggaatgcgcgccgaagactgggtgccgatggacggcccgacgatcaacccgctcaagcgccacccgatcagcgaacctctcgacgtcggcatccgctcgatcaatggcctgctcacggtcggccgcggccagcgcctcggcctgttcgctggtaccggggtgggcaagtcggtgctgctggggatgatgacccgtttcaccagggccgacatcatcgtcgtcggtctgatcggcgagcggggtcgcgaggtgaaggagttcatcgacgagatcctcggcgaggaaggcctcaagcgctccgtggtggtcgcctcgccggccgatgacgcgccgctgatgcgcctgcgcgccgcgcaatactgcacgcggatcgccgagtacttccgcgacaagggcaagaacgtattgctgctgatggactcgctgacccgctacgcccaggcccagcgcgagatcgccctggccatcggcgagccgccggcgaccaaggggtatccgccatcggtgttcgccaagctgccgaagctggtggaacgcgccggcaatgccgaagccggtggcggctcgatcaccgcgttctacaccgtgctctccgagggcgacgaccagcaggacccgatcgccgacgccgctcgcggcgtgctcgacgggcacttcgtattgtcccggcggctggccgaggaaggccactatccggccatcgatatcgaagcttcgatcagccgggtgatgccgcaggtggtcgaggccgagcacctgcgcgacgcccagcgcttcaagcagctctggtcgcgctaccagcagagtcgcgacctgatcagcgtcggtgcctacgtggccggcggcgatcccgagaccgacctggccatcgcgcgcttcccggtcatgcgccagttcctgcgccagggcctcgacgaaagcgaaagcctggcggaaagccgtgcgcggctggcgagcctgctcgccggcgggcaggcctga

SEQ ID NO: 318350 - DNA, 807 bp, Pseudomonas aeruginosa
gtggtcccccacgacaaggacaaagacaatcccagcgaactgatccgcggcaaggacgtggcggccttcggcctctggtcgttgccgagcttcgacgagccgcgcgacgagccggccgttgccgcgccgcaggtgcccgcggtcgccgaacccgcgccggcgccgccggcggtggaagaggtcgagctggagaccgtcaagccgccgacgctggaggaaatcgaggcgatccgccaggacgcctacaacgaaggtttcgccaccggcgagcgcgacggtttccacgccggccagttgaaggcgcggcaggaagccgaggaggcgctgaaggagcgtctgcaaagtctcgagcgtctgatgacgcagcttctggaacccatcgccgagcaggacgccctgatcgagcagggcatggtcaacctggtcaaccacgttgcccgccaagtgatccagcgcgaactgcacatggactccagccatgtccgccaggtcctgcgcgaggctctgaagctgctgccgatgggcgcggcgaacatccgtatccatgtcaacccgcaggacttcgagcgggtcaaggcgctgcgcgagcgccacgaagagagctggcggattctcgaggacgattcgttgctgcccggcggctgccgcatcgagaccgagcacagtcgcatcgacgcgaccatcgagacgcgcctggcgcaggcagtgaagcaactgttcgagcaacagcgcgaacaggcgacccatccgctggccagcgacatccggatcgacctcgacgcccccggagacgtcgatgcgccttga

SEQ ID NO: 318351 - DNA, 1017 bp, Pseudomonas aeruginosa
atgagtgagaatcgtctcgccgccaaactgaccaaggtcgacaaggccgccatcctgctcctgtcgctcggcgagaccgacgcggcgcaggtgctgcggcacatgggaccgaaagaggtgcagcgggtcggcgtggccatggcgtcgatgcgcaacgtgcatcgcgaacaggtcgagcaggtgatgggcgagttcgtcgaagtggtcggcgaccagaccagcctcggcgtcggtgccgacggctacatccgcaagatgctcacccaggccctcggcgaggacaaggccaacaacctgatcgaccgcatcctcctcggcggcagcaccagcggcctggacagcctgaagtggatggagccgcgtgccgtggccgacgtgatccgttacgaacacccgcagatccaggccatcgtggtcgcctacctcgatcccgaccaggccgccgaggtgctcagccatttcgaccacaaggtgcgcctggatatcgtcctgcgcgtctcctcgctgaacaccgtgcagccctcggcgctgaaggaactcaacctgatcctggagaagcagttcgccggcaattccaacgccacccgcaccaccatgggcggggtcaagcgcgcggcggacatcatgaactacctcgacagctccatcgaaggccagctgatggattcgatccgcgaggtcgacgaagacctgtccggacagatcgaggacctgatgttcgtcttcgacaacctcgccgacgtcgacgaccgcggcatccaggcgctgctccgggaagtctcctcggacgtactggtgctggcgctcaagggctccgacgaggcgatccgcgagaaggtcttcaagaacatgtccaagcgtgccgccgagctgctgcgcgacgacctggaggccaaggggccggtacgggtcagcgaagtggaaggtgcgcagaaggaaatcctcaccattgcccggcgcatggccgagtccggcgatatcgtgctgggcggcaagggtggcgaggagatgatctga

SEQ ID NO: 318352 - DNA, 1797 bp, Pseudomonas aeruginosa
atggccgatgcactgatcgacagccaggttcccgccaagagcggcggtgccgggatgctgaagaaatccttcccgggactgtcgttcctcgacaacctttccgagatgaccatgctgcgccagatcggcctgctggtcggtctcgccgccagcgtggcgatcggcttcgccgtcgtgctctggtcccagcagccggactacaagccgctctatggcagcctcaacggggtcgacgcgaaccgtgtggtggaagcgctgaccgcggcggacattccctacaaggtcgaacccaactccggcgcgctgctggtcaaggccgacgacctcggccgggcacgcatgaaggtggcctccgccggcgtggcgccgaccgacaacaacgtcggtttcgagatcctcgacaaggaacaggcgctgggcaccagccagttcatggaagccaccaactaccgccgcggcctggaaggcgagctggcgcgcaccgtgtcgagcctgaacaacgtcaaggccgcccgcgtgcacctggcgatcccgaagagttcggtgttcgtccgcgacgaccgcaagcccagcgcctcggtgctggtcgagctgtatccgggtcgcagcctggagccgagccaggtgatggcgatcgtcaacctggtcgccaccagtgtgccggagctggacaagtcgcaggtcaccgtggtcgaccagaagggcaacctgctctccgaccagcaggaactctccgagctgaccatggccggcaagcagttcgactttacccggcgcatggaaggcctgctcacccagcgcgtgcacaatatcctgcaaccggtgctgggcaacggtcgctacaaggccgaggtgtccgccgacgttgacttcagcgcggtcgagtcgacctcggagatgtacaacccggaccagccggccctgcgcagcgagcaacgcaacaacgaggaacggcagaattcgtccggcccgcagggcgtgccgggggcgctgtcgaaccagccgccgggcccggccagcgcgccgcagcaggccaccgccagcgcgccggccgactacgtcgcgccgggccagccgctgaaggacgccaacggccagaccatcatcgatccgaagaccggcaagccggagctggcgccgtacccgaccgacaagcgcgaccagaccacccgcaactacgaactggaccgctcgatcagctacaccaagcagcagcaggggcgcttgcgccgactgtcggtggcggtggtgctggacgaccagatgaaggtcgacgcgaagaccggcgaggtcagccaccagccctggagcgccgacgaactggcgcgcttcacccgcctggtacaggattcggtgggctacgacgccagccgcggcgacagcgtcagcgtgatcaacgcgccgttcgccccggcccaggccgaagagatcgacagcattccgttctactcgcagccgtggttctgggacatcgtcaagcaggtgctcggcgtgctgttcatcctggtcctggtgttcggtgtgctgcgtccggtgctgagcaacatcaccggcggcggcaagggcaagtcgctggccggcggcggcggtcgcgacggcgacctggcgctgggcgagagtggcctggaaggctcgctggccgacgaccgggtgagcatcggcgggccgtcgagcatcctcctgccgagccccacggaggggtatgatgcgcaattgaacgcgatcaagaacctggtcgcacaggacccgggccgcgtcgcccaggtcgtgaaagagtggatcaacgccgatgagtaa

SEQ ID NO: 318353 - DNA, 330 bp, Pseudomonas aeruginosa
atgagtcagggtgtcgagttcaatcgtctgatgctggaaatgcgttccatgcaaatggaagccatggccaaggccaaaccggctcaggcgccggccgaagcgggggcgccgagcttttcggaaatgctctcccaggccgtggacaaggtgaacgagacccagcaggcctccaccgcgatggccaacgccttcgaggtcggccagagcggcgtcgacctgaccgacgtgatgatcgccagccagaaggccagcgtgtcgttccaggccatgacccaggtgcgcaacaagctggtccaggcctaccaagacatcatgcagatgccggtctga

SEQ ID NO: 318354 - DNA, 1422 bp, Pseudomonas aeruginosa
atggcagccaaagtcctgctggtcgaagacgaccgcgcactacgcgaagccctcagcgacaccctgctactgggcggtcacgagttcgtcgccgtggactcggcggaggcggcgctgccggtcctggcccgcgaagccttcagcctggtgatcagcgacgtgaacatgccgggcatggacggacaccagttgctcggcctgatccgtacacgctacccgcacctgccggtgttgctgatgaccgcctacggcgcggtcgatcgcgccgtcgaggcgatgcgccagggcgccgccgactacctggtcaagccgttcgaggcgcgggcgctgctcgacctggtggcacgccatgcgctgggccagttgccgggcagcgaggaggatggtccggtggccctggagccggccagccggcagttgctggaactggccgcgcgggtcgcgcgcagcgattccaccgtgctgatctccggcgagtccgggaccggcaaggaagtcctggccaactatatccaccagcaatcgccgcgtgccggcaagccgttcatcgcgatcaactgcgcggcgatcccggacaacatgctcgaggccaccctgttcggccacgagaaaggttccttcaccggcgccattgccgcccagcccggcaagttcgagctggccgacggcggcaccattcttctcgacgagatatcggaaatgcccctcggcctgcaggccaagttgctgcgcgtattgcaggagcgcgaggtggagcgggtcggtgcgcgcaagccgatcaacctggatatccgcgtgcttgccacgaccaaccgcgacctcgcggcggaagtcgcggcggggcgtttccgcgaggacctctactatcgcctgtcggtcttcccgctggcctggcggccgctgcgcgaacgccctgcggacatcctgccgctggccgagcgtctgctgcgcaagcacagccgcaagatgaacctcggcgcggtggcgctcggccccgaggccgcccagtgcctggtccggcatgcctggccgggcaacgtacgggaactcgacaacgccatccagcgtgcattgatcctgcaacagggcggcctgatccagcccgccgacctgtgcctcaccgcgccgatcggcatgccgctcgcggccccggtgccggtgcccatgccggcaatgccaccggccaccccgccgagcgtcgagattccgtcgccggccgcaggccaggacgctagcggcgcgctgggcgacgacctgcgccgccgcgaattccaggtgatcatcgataccctgcgcaccgagcgcggccgccgcaaggaggccgccgagcgccttggcatcagcccgcggaccctgcgctacaagctcgcccagatgcgcgacgccgggatggacgtggaggcctatctctacgccatctga

SEQ ID NO: 318355 - DNA, 1209 bp, Pseudomonas aeruginosa
atgcaaccagccctccacgccttccccgagcagccagccgatacggccgaggccaccagtcgcgccggcctcgagcaggccttcgcgctgttcaaccagatgtccagccagctcagcgagtcctatagcctgctggaggagcgcgttaccgagctgaaagggcaactggccctggtcagcgcgcagcgcatggaggagctggcggaaaaggagcgcctggcgaaccgcttgcagagcctgctcgacctgcttcccggcggcgtcatcgtcatcgatgcccatggcgtggtccgcgaggccaacccggcggccctgggcctgcttggcgagccgttggtgggcatgctctggcgtgaggtgatcgcccgctgcttcgctccgcgcgaggatgacggtcacgagatttccctgcgcgacggacgtcgcctgtccatcgccacccgctcgctgaacggcgaaccggggcaactgatcctgctcaacgacctcaccgatacccgccgtctccaggagcaactggcgcgccacgagcgcctgtcggcgctggggcggatggtcgcctcgctggcccaccagatccgcacgccgttgtcggcggcgttgctctatgccgggcacctcagcgagcaggcgctgccgaccgaccagcagcaacgcttcgccgggcgcctgaaggagcgcctgcacgaactggagcatcaggtacgcgacatgctggtgttcgcccgcggcgagctgccactgaccgaccgggtggcgccgaaggcgctgttcgacagcctgcgcgcggcggccgaagtccatgtccaggggctccaggtgcgttggcagtgcgaggcgcgcggcggcgagctgctgtgcaatcgcgacaccctggtgggcaccgtgctcaacctggtggagaacgcgatccaggcctgcgggcccgaactgcgcctgaaggtgcatctctatgcccgcgccgacagcctgcgcctcagcgtcagcgacaacggaccgggtatggacccggcgactctggcgcgcctgggcgaacccttcttcaccaccaagaccaccggtaccgggctcggcctggcggtggtcaaggccgtggcacgcgcccaccaggggcaattgcagttgcgctctcggcccgggcgcggcacctgcgccaccttgatcctgccgctgattccggcggcgcctctttctgcgattcaggagtaa

SEQ ID NO: 318356 - DNA, 1473 bp, Pseudomonas aeruginosa
atgtggcgcgaaaccaaactcttgctgattgacgacaatctcgatcgcagtcgcgacctggcagtcattctcaacttcctcggcgaagatcagctgacctgcaacagcgaggattggcgagaggtagcggcgggcctgagcaacagtcgcgaagccctgtgcgtgctgctcggcagcgtcgagtcgaagggcggggcggtagagctgctgaagcagctggccagttgggacgagtacctgccgatcctgctgatcggcgagccggccccggccgactggccggaagagctgcgccgccgggtgctcgccagcctggagatgccgcccagctacaacaagctgctcgactccctgcatcgcgcccaggtctaccgcgagatgtacgaccaggcccgcgagcgcggccgctcccgcgagccgaacctgttccgcagcctggtcggcaccagccgggcgatccagcaggtgcggcagatgatgcagcaggtcgccgataccgatgccagcgtgctgatcctcggcgagtccggcaccggcaaggaagtggtggcgcgcaacctgcattaccattccaagcgccgcgaggggcccttcgtcccggtgaactgcggggcgatcccggcggaactgctggaaagcgaattgttcggccacgagaagggcgccttcaccggtgccatcaccagtcgtgccggacgtttcgagctggccaacggcggcaccctgttcctcgacgagatcggcgacatgccgctgccgatgcaggtcaagctgctgcgcgtgctgcaggagcgcaccttcgaaagggtcggcagcaacaagacgcagaacgtcgacgtgcggatcatcgccgcgacccacaagaacctcgagaagatgatcgaggacggcactttccgcgaagacctctactaccgcctcaacgtattccccatcgagatggcgccgctgcgcgagcgggtggaagacatcgccctgctgctcaacgaactgatctcgcggatggagcatgagaagcgcgggtcgatccgcttcaactcggcagcgatcatgtcgctctgccgccacgactggccgggcaacgtccgcgaactggcgaacctggtggagcgcctggcgatcatgcatccctacggggtgatcggggtcggcgaactgccgaagaaattccgccatgtcgacgacgaggacgagcaactcgccagcagcctgcgtgaagagctggaagagcgcgcggcgatcaacgccgggctgccgggaatggacgcgccggcgatgctgccggccgaaggcctggacctcaaggactacctggccaacctcgagcagggcctgatccagcaggccctcgacgacgccggcggagtggtcgcgcgggccgccgaacgcctgcgcatccgtcgcaccacgctggtggagaagatgcgcaagtacggcatgagccggcgcgacgacgacctgtcggatgattga

SEQ ID NO: 318357 - DNA, 294 bp, Pseudomonas aeruginosa
atgagtgcagctgtacagatccttgaagaaaccggtagcgccctgcgcgttgccctggccagccagaactgggaggccatcggtgaactcgaccagcgttgccgccaggccgtcgacgaggcgatgctcgatgtacgggacgaagccaccttgcgggcgcggatggaagagctgttggcgctgtatcgcgagctgatcgatgtctgccagggcgagcagcgcaagctggccaccgatctgatccagctgaaccagtcgaagcaaggcgccaaggtctaccagatgttcggataa

SEQ ID NO: 318358 - DNA, 381 bp, Pseudomonas aeruginosa
atgaacgcaatggcagccatgcggcaataccagaatgtcagtacccaggctcaggctatcgatgccagcccgcatcgcctgatccagatgctgatggaaggcggcctgacccggatggcgcaggcccgcggagccttggagcgcggcgaagtggcgctgaagggcgagctgatcggcaaggccatcgccatcgtcggtggcctgcgcgaagggctcgacttcgaggcgggcggcgagctggcagccaacctcgaccgcctttacgcctacatgtcgatgcgcctgacggaagccaacttgaagaacgacgcgggcaagctcgaggaagtttccgagctgttgcgcaacatcaaatccggttgggatgcgattgccccctga

SEQ ID NO: 318359 - DNA, 399 bp, Pseudomonas aeruginosa
atgtcgcgtcctatcgatacctaccggcaggtaggcagcgcacaggacgtcccgccctaccaggtggtcaagctgctgctggacggcgcgctcgaacgcatcgccctggcccggcgcgcggtgctggagcgcaacccggcgctgcgcggcgaagcggtaggcaccacgttgtcgatcatcggcgccttgcaggctggcctcgatcaccagcagggcggcgagatagccggcaatctggatgcgttgtacgactacatgacccgccgcctggctggtgtcgcgctggacgacacaccgcgtccgctggacgaggtcgaggcgctgctgggccagatcaagcaggcctgggatgccattggcagcgccgaagcgcagggcgaagacagcgaacggcgctaa

SEQ ID NO: 318360 - DNA, 1437 bp, Pseudomonas aeruginosa
atggcgaacagtacgacgatcaacggctacaactcgggccttgatatcaagaacatcgtttccaccctggtggcggccgagaaggcgccgaaggaggcgcagctcaagcgtctggaaagcgacaccaccgccaagttcaccggcatcggccagctcaagagcgcgatctccgacctgcagaccatcctcaaggaactgaacaagcccgagctgttccagaagcgctcggcgagtaccagcgacgagaagttcgccaccgccaccgcgaccaaggacgccctgccgggtatctacaagctcgaagtgacccagctggccagcgtcagcaaggtggccaccgcgtcgtttgccgatggctacaagaccacttccggcggaaccctgaccatcaagcagggtgccgacgatgccggtgtcacggtaaacgtcgcggcgggcgcgaccctcgccgaagtgcgcgactcgctcaacgcgcagctgaaggacaagggcatcagcgccaacatcgtcaacaaccctggagacggaacctcgcgactggtcttcaccggcaaggattccggcgccggcaaggacgtgttcgtccagggcagttccggcctggagaacttcaacatcggcagcgtcggcgccgatggcaagctgaccctgtcccagttggacggtagctcctccagcagcagcggctatatcacccaggcgaagaatgccaagttcagcatcgacggcctgaccctggaaagtccgaccaatacggtcgacaaggtcatcaacggcgtcaccttcgagctgaagacggtcaccgacaccaacaagccgatcaccatctcggtcgagcaggaccgtggcggcgtcaaggacaacatcaagaagttcgtcgaggcctacaacaagctggtcggcgtgacttcggaactgaccggcgtgaccaaggtgggcgacgacaaggctcccgtggtcggtgccttggtcggtgacagcagcgtgcgcaacctgctcaccaccatgcgcaacgagatggtccagccggggcaaggtaccgatgttcgcatgctcgccgacatgggtatcaccaccaagaaagacggcaccctggaaatcgacgacaagaaactcgacaaggttctgaaggacaagttcgagtcggtttccgctctgttcaccggcgatacgggcctgatgaagcgtctcgacgacaagctcacgccttacacccagaccggcggtgtgctccagcagcgcctggatggattgcaggacaccatcaagtcggtggatacccagcgcgaagcgctcaatcgccgggtcgagcagttgcaggatcgtttgctcaagcagttcaccgccatggaccagttgatcggccagctcaaccagaccagcggacgcatggcccaggctcttagcagcctgcctggccttgtgaagaaaagctga

SEQ ID NO: 318361 - DNA, 387 bp, Pseudomonas aeruginosa
atggacgtcagcaatgtcaacaattcgacggctgctccggtaatccggctgttcggctcggcgtcttcttccgatggcgcacgcccggccggccagcccggcgaggcggccgccagcgcaagcgcgcaacggacgggcgacgtcaggatgggcgacaaggagcaacgcgctgcggtcgaggaggcggtttcctccatcgagaagttcacccagagcatccgtcgtgatctgagtttcagcctggacgactccacggggcgggtagtggtcaaggtgaccgattcgacttccggagaagtcatccggcaaatcccttccgaagaggctctgcgcctggcagagcgactggacgaagcgcgcagcctgctgttcaaggcggaagcctga

SEQ ID NO: 318362 - DNA, 1185 bp, Pseudomonas aeruginosa
atggccttgaccgtcaacaccaacatcgcttcgctgaacactcagcggaacctgaacaactcttccgcgtcgctgaacacttcgctgcagcgtctgtccaccggttcgcgcatcaacagcgccaaggacgacgccgccggcctgcagatcgccaaccgtctgaccagccaggtcaacggcctgaacgtggctaccaagaacgccaacgacggtatctccctggcgcagaccgctgaaggcgccctgcagcagtcgaccaacatcctgcagcgtatgcgtgacctgtccctgcagtcggccaacggctccaacagcgactccgagcgtaccgctctgaacggcgaagtgaagcaactgcagaaagaactggatcgtatcagcaacaccaccaccttcggtggccgcaagctgctcgacggttccttcggcgtcgccagcttccaggtgggttcggccgccaacgaaatcatcagcgtcggcatcgacgagatgagcgcagagtcgctgaacggcacctacttcaaggctgacggcggcggcgcggtcactgctgcaaccgcttcgggcaccgtcgacatcgcgatcggcatcaccggcggcagcgccgtgaacgtcaaggtcgacatgaagggcaacgaaaccgccgagcaggcggctgccaagatcgccgcagcggtcaacgacgccaacgtcggcatcggtgccttcagcgacggcgataccatcagctatgtttccaaagctggcaaggatggctccggtgcgatcactagcgcggtttccggcgttgtcatcgctgacaccggcagcaccggcgtaggcaccgcggctggcgtagccccttccgctaccgctttcgccaagaccaacgacaccgtcgccaagatcgacatctccaccgcgaagggcgctcagtccgccgtgctggtgatcgacgaggcgatcaagcagatcgacgcccagcgtgccgacctcggtgcggtgcagaaccgcttcgacaacaccatcaacaacctgaagaacatcggtgagaacgtatcggctgctcgcggccggatcgaagacaccgacttcgcagccgaaaccgccaacctgaccaagaaccaagtgctgcaacaagccggcaccgcgatcctggcccaggccaaccagctgccgcagtcggttctgagcctgctgcgctaa

SEQ ID NO: 318363 - DNA, 3513 bp, Pseudomonas aeruginosa
atgaatatgggtgaacaggctctcgtcagcatcgtcatgccgacctacaagctggagtacttcgaggacgccctcgacagcgtgctcgggcagacctatccggccctggagctgatcatctgcgacgacagcagcgacgagcggatcgccacgctggtcgagcagaagcgcgcctccgcggcgttcccgatccgctacttccgtaacgagacgcgcctcggcgagctgggcagcacggcgaaaggcatccgcctggcggagggcgagtacgtcaagtttctccacgacgacgacgtgttgcttcccgaatgcgtcgaggcgttggtgggagcgatggagcgcgagccgaacgtggtcctggcctcgtcgcggcggttgcgtatcgacgaggaagggcagccgctgccggacatcctggcgacctgcttcccgttcgccggcgacgtcctgatcgacggtcgcgagctggtctcgttcctcgccgaccacaccatcaacttcatcggcgaacccagttgcctgatggcccggcgcgatgcgctgctgcagatctgcgagcgcctgatgatgctcaacggccgggccatcgactggatcggcgacctggccatgtgtgcgcagttgctacagcgtggcgacctggcgttcctgtcgcggccgctgacccgtttccgcgtctcccgccagcagttcagccagatcgggcgcgaccagcccggtatcggcgagcagggccatgccgacttccgcctggctatccgcgaactgggttggtatcgccaggccggcgacaaccgcttcgtccgggtggcaccgatcacccgcctggacgcccgtgtcttcaagccggtcaacctgctcgccgcgctgaggcgggcggcgggcttcggtagcgtcacgctgtcgacctggctggaggcgcggcggccggatgcggtgcagaaggtgctgatcgatcgattcctgcaggagcagggtggtgggccgcgcttcgcggtgctggtgctcgatgcccacggcgataccgaggccgtggagcgtaccctgcagagcctggagcacgtcaattcgtatccacgtgtcgagagccacctgttcgcgccgctgggcacgagtccgcggaacggagcgatgctcttcgatccagaggtggggccggtgccgacgatcaaccaggcgcttgcccggcttgataccgactggttgctcctggtcgaagcgggtgtcgaattcactgtcagcggcctgctggtggcggcgctggacctgctggcggcaccggagagctgccaggcggtgtacgccgacgaactcatgcgcctggatgacggcgagctgggcgcggcgttgcgcccggacctgaatctcgaccttctgctcagtttccccgccgggctgtcccggcactggttgttccgccgcgagccgctgcttgccacgggcggattcgacgagaccgccggcgaggctttcgagctggcctaccagttgcgtctcgtcgagcagcggggcctgggctgtatcggacacatcagcgagccactgctgtctggcccagcgctgcgcctgcaggacagcaccgccgagcgtgcggcgatcgaaggccacctgcgtgcccgtggctacgcgcaggcgacagtcggaagccggctgccggggcgctacgagctggactacggccacgccgggcaaccgccggtcagcatcctggtgctggccggggagcgcctggcgcagctccagcgttgcgtagaaaccgtgctggagaataccgcctatcccaactacgagatccttctgctggaacagggtggcgaagcggccgacgttcgcgaatggctgctcgccgtcgaaggcatgggtgtcgagcaggtgcgggtgctgcgaggcgatgggcagttgtcccgtggggctctgcgcaacctggcggcgtcccgggcgcgcggcgaattcctgctctggctcgatgccggcagcggcatcctcgacaaggactggctgcagcagttactcaaccatggccagcgtccggaagtcggcgcggtaggcgccaagctcctggcggcggacggacgggtctgccacgccggctggctgctcggtttgtgcggaccggccgggcgggccttcgaagggcgttcgcacgaggacgccggttacctgcagcgcctgcaggtggaccagaactactcggcggtggctggcgaatgcctgttgatgcgccgcgagttgttcctcgaattgggcggtttcgacgaggcgctgacgcgctgggacgatgtcgacatctgcctgcgggcggtccaggcgggctacctgaacgtatggacgccgcgtgcgcggctgttgctcgatgcgcctgccacgacggcggcgagcgtcgaggaagaagatgcgctgtacgcgcgctggctaccgttgttggcacgcgatcccgcctataacccgggcttttcgttgcaggccgaaggcggtttcaagctggccgacccgcagctggcctggcgcccgttgcaggggtggcggcccttgcccactgtcctggcgcaccccgccgacctgttcggctgcggccattaccgggtgatccagccgttcagcgcgttgcgcgagtcggcatccatcgatggcgcgctgtcgatcggcctgatgcacgtggccgatctggagcgctacgacccggacgtactggtgctgcagcgccaggtcggcgaggagcgtctcgaggccatgcggcggatgcaggcgttctcgcgagccttcaaggtctacgaactggacgactatctgcccaacgtgcccctcaagagcgcccatcgccagcacctgccgaaggacatcctgcgcacgttgcgtcgcgggctgggttacgtcgaccgcttcgtggtgtcgacgccggccctggcagaggccttcgccggtctccacccggatatccgggtgatcgagaaccgcctgccggtggggtggtggcaggggctgcgggcgcagcggcggcgcggcgagcggccacgtgtcggttgggcgggcggctcgagccataccggcgatctggaactgatcgccgatgtggtccgggaactggccgacgaagtcgactgggtgttcttcggcatgtgcccgccgtccatccgtcccttcgtcagggaagtgcatgcgggggtgcctatcgaacgctatccgcgggcattggcggctctcgatctcgacctggcgctggcgccggtggagcagaacctgttcaacgagtgcaagagcaatctgcgcctgctggaatacggcgcctgcggtttcccggtggtctgcagcgacgtgcgctgctaccaggacgatctgccggtgacgcgggtgaagaaccgtttccgcgactgggtggacgcgatccgcatgcatacccgcgacctggatgccgcggccagggcaggggatcacctgcgcgaacgggtgctggcggattggatgctcgacggcgagcgtttgcgcgcctggtatcgtgcctggatgccggactga

SEQ ID NO: 318364 - DNA, 1617 bp, Pseudomonas aeruginosa
atggtccagccattgtcggcgatcaccagcaaggtgctcgactgtaccctccgtgatggtggctactacaccgcctgggacttccccaccacgatcatcgagcgttatctcgatgcgatgcgtgcggcgcgggtcgacgtcgtggagctgggtttccggtttctgcgcaacgaagggttcaagggagcctgtgcctacaccaccgaccacttcatccgcagccttgccattcccgaagggttggccctggcggtgatgctcaacggcgccgaccttttgggcgagatgggcctggaggcagcgttgcaacaactggttccagagagcgcggaaaccagcgcgctgaagatggtgcgcatcgcctgccacttccacgagttcgagcgtgtattgcccgcgtgcgactggctgaagcgccgaggctatgccgttggcttcaacctgatgcaaatggccggccatacccgtgaggaggtgagtcgccttgcgtcatcggccagtgactggcccgtcgacgtgctgtacttcgccgatagcacgggcagcatgaagcccgcggatgtctgcgagaccgtggcctggctgcgggaaggctggtcgggggcgctgggttttcatgcgcacgacaacatgggcctggcgttacagaacaccctgaccgcgcggaccgagggcgtcgaatggttggatgccaccatcaccggaatgggacgcggccccggcaatgtgcgcatcgaggaactgttgatcgagcttgccgagccgcgggccaacctggtccccttgctggccctgatcggagaatacttcgcccctttgaaggtgcggcatggctgggggaccaacgcgttctactacctttccgggaagcatgccatccacccgacctatgtccaggaaatgctgggcgacccgcgctatggcgaagaggacgtgcttgccgctatcgactatctacgtcggcaaggtggacagagcttccgtcgcgacatgctcgtcagtgcccgtcatctctatgatgaaacgccgaaagggatttggtccccatgcgactggctggaaggcagggaagtattgctgctgggggctggcgcaggcgtggtcaggcaccgccaggccctcgagtcctatatccggcgtacccggccagtggtagtcgcgttgaatacccagtcggatctcgacgccagcctgattgatctccgcgtagcctgccatccagtacgcctgcttgcggattgcgaaacccatgcgcgcctgccgcagcctctcataacccctgtctcgagcctgcctaccgaattactgatgtcgttgcacgataagcaacttctggatttcgggttgggagtgaggtccggcaggttcgaagtgttccctcagggctgcgtcgctccgaactcactggtcatcggttatgccttggcggtggccgccagcggcagagcgcgacgaattctcctggccggtttcgatggctatccgccgggagactcgcgcaaccaggatatgcaggaactgttcaatctgttctgtgcgcggcaaagcgtgcccggcatggtttccgtcacggagacggcttatgacattccttgcacgagtatttacggcatgtag

SEQ ID NO: 318365 - DNA, 1104 bp, Pseudomonas aeruginosa
atgagcgaatctccttacgtccactcggctgcagagggggtagttgaaagcagcatggggctctattccgtgcccgcctatgtcagcttcctgcagcagaaccggacccgggaacaggcgttggcgatctatgagcagcgtatcgccgatgcgttggcgatttacacggagttttctcatgcattcgtggaaaggtgttgtccttgttgcggagcgcaggagcgcgccgacctcgaacctttccagggtatctatcgtgtcgccaaatgcatgcgctgcaccaccgcgtatgtaacgccttgcccgccgccggcggtacttggtcattattacagccagtgccgctgcaacggcatgctcggcgacctgttgaaggcgcgtcagcgctcaggcgaccggataatttccgatcgggtgcgctttctcctcactctgatcgatgagtatctgctgggccgggcgcggatacgcatccttgaggtcggctgcaattcgggcggcttgttatccgagttgaaggctgcccttcacgccagcgatctcctgcaccgatgcgaattgaccggcattgatatcgacgcttcggccatcgctaggaacgaagaccgcgacctcacgctccatgctgccagtgccgaggagtttgctgccggtagtggcggggtcttcgacctgatcatccatttcgagctgatcgagcatctgttcgatcctcacggttttatggtcgccacgaagaagctcatgagcgatggagggctccatcatttccatacacctaacgcgctcggtatggacaaccaggcactgggttacaacagctttcgtgcgctggcccatggtatttttccgccgatgcatttgcaggctttcactccgcaaaatatcgggcatttcgccatgcgttcgggctacagcatcgttcagatggacactcctggaaatttcgatgtcgacatggttgccaactggttgccgaaggacgccatggactctccttttatacacatccaccagttgcccagggagcacctggctatattccaacaatggctgaaagtgctaggtgcgagcagccacatgcgttgcacgctcaggagctga

SEQ ID NO: 318366 - DNA, 501 bp, Pseudomonas aeruginosa
atgccccgtgacgactcggcggcctactcgtctcgctgcggtactttcgagtggtgcgatgccgactatgctcggacctatttgcctcggcgcttctgtgagcaattggcgtcctcgattgctccgaccatacttggcatcgacgcacagcctggcgagtcgttgtggttttccaagcttgttgacctggggtgcagactggattctctcgagtcaggtctcgatagcgttgaggattgcgagtgtctgcgtaacgcccacatcgacatgcacggctacgagtgccaggagatggaggctgtctcccctgggcaagtcgattacatagccatcgaagcgtctctcttcggtttctgcggcaggagtgatatctccgcgaaggccttccagcagatggatgatatcggcttcgcgttgtgggatatcgccaatctatcgaaaagtcccaagaggctgcctaccgattgggacgagttggtctataggcggagcgactcatga

SEQ ID NO: 318367 - DNA, 768 bp, Pseudomonas aeruginosa
atgaagtacgccgttgtcattcccgcacgccatgcgtcgacacgcttgccaggcaagcccttgctcgacttatgcggcgtgccgatgatcgtcaggacctacaggcaatgcatccaggcggtggacgccgagcatgtgctggttgccaccgacgacgaacgcatccgcgcagtctgcgaaggcgaggggattcgcacgttcatgacctcgagccgttgcctgaccggaaccgaccgggtcgccgaagtggccggacgggtctcagcggaaatcttcatcaatgttcagggcgatgagccgctgttcaatcctgacgatctgcgcaagctgatcgatgcagcccaggcgagcccggaagcgattatcaatggctactgtggcatcgctgacgaaacgacgtttcgcaacccatcggtccctaaggtggtctttcgtccggatggacgcttgctctacatgtcgcgggcagccattccgacgaccaaacaaggcgagtttagtcgggcctggcgtcaggtgtgtgcctacgcctttccgcgtgaggcgctgcgagcgttcgcagccaggccgacgaaaacttcactggaggaggtcgaggacatcgagattctgcgctttctcgaattgggttgggaagtcaagatgatcgaaatgagcgaccagtccatctcagtggataacctcgaggatgtggagcgggtgttggacgcaatcctccagcgcaagccgcgaaccgctagcgttggaggtgaccagcatgccccgtga

SEQ ID NO: 318368 - DNA, 1275 bp, Pseudomonas aeruginosa
atgtctatcgttaccggaaccttgctgcgtgcacgcctcaagtaccctgacctggacctctccaaggttcgcctagtcggatggggggcggggcagtttttccaggatttctacccgtgtgtgagcgagtacctgaacctgcaatacactatctgtccctatcccgaaaatcaggggaagcgcatccacggcgtggaagttcgggcgccgtctgcactcgaacaggaatcgctggagcacaccgtgatcgtggtcatggccaaccacttccccgaagtgatgaaccagatcagtcagtttcatggcaggttccgcacggtacgcgctatcgatttcgatccgggcaacgtggcgctgctcgatgaaatgcaggacgtcgccgagctgctcccaagtctgacgatgaggcgcgatctgccttccagtcggatgggtattttcgtccagggcctggcgttcgacttcacgccgctggtgctggcctggaaccgctcgcatttcccgtccgcctaccagtgcatggtgacctgggaccatcagtccagcgaattgctcgagcgctgccgcccctggctggatgagttgatattggttccacagccggagaatctcggcttgatgaaccgcaatgtgatcctgcgttcggcacgcttgggtgtacagcgcctggcggacaagggggtcgagttcgctgttcgttgccgcagcgacaacattcttcatggttcgcttcaccaggcgctcaacggactcttctcgcatggccgcaatgccgggaagatcgcggtttcgctgggtgcttcctggcagtacatgccgttccacttctcggagaaagcgatgattgcaagaaccgaggatatgctggcgctctggtccctgcccgaggatccgcgtccggcagactgggccgccgacgagctgtccgatcggctggaactgtcgccggagcggcattaccaggagctgtctcagtacaccttcgaatctgcgctctggcgagattatgcccggcgtctgggctttcctgtggagtccctggccgactcttaccgttttgcacaggcgcgcctcctggcccttgagccgtatatgagctggtactcgttgaagttcaccgcgctgttcaacctggagcgtgacacgttctattcgttttccgctgaaagctggaaccgcctgttttccgatagcgatggagctctgctgcgggcggaggccgccagccgacttgccatgaactcgcgggatttctggcggggtagggtcggttaa

SEQ ID NO: 318369 - DNA, 1140 bp, Pseudomonas aeruginosa
atggtggatggtggcagcattgcacaagcggattttctagcgcgttgcgaacagagtggatatctcatgttgctggtgcctagctcctatctcgggcgtatctatcgaccccatatcgcgtccggcctggccaggcgcctgcctgatgtgcgcctggtcgccgtcgatgatgtgctcttcagggaaggcactactgtcgatggcttcgacgaagtgatccccactgctcacctgagcgatccccgtcatgccgggaggccggcggtgaactgcgcctattcgctgtctgcatggctgacgctggaccgtctctcaagcgccgcgaaatgcgccaccctcgacttacctgaactcctctatctgctggatattccgctggtctaccagaccggtgcgctgactcgcgagctggccgtgaaatatcatgccgagttcgtctcgctgcgcgagcgtctggccgacgagccaagccgcaagaccctggatgccatcatgcgcttgcgcctggatggaaaccgttccgctctgctggatgtcgtgtgtccgggagagcaggaatacttttccctataccgcggcgccggacatccgatcgacctgcgaaccgacgagcactacgtggatatcggcgccttcgacggtgatacggtgaagaaattcatgctggcagcccgtcatcgatacgcctcgatccacgccttcgagcccgacccagcgaactaccagcgcatgcacgcggccctaaacggacatgccaggctgaagctgcacaacctggccgtgtccgacgatgagggctatcttgcgttcgctgcgcacggcaccatgggcagtcgggtccaggcggatggtgcggttcaagtgcgttgtgtgcgcctggacgacgtcctggaccgtatgagcctgctcaaaatggatgtggagggccacgaagcgcgggtcctccgcggcgcagcgcgcctgatcggcgaatgccggccgcgcatggccattacctgttatcaccacgtggcggacctgctggagattgtcgctgcgatcgatgagatcgccccgggggctcggttgcggctacggcactattcgatgtttttctacgacaccattctgtatgtcgactggccggagtattccgcatga

SEQ ID NO: 318370 - DNA, 621 bp, Pseudomonas aeruginosa
atgaagcaagcgatcatcgtcggggaagggcgcgcgctcgaacgggcggacagtaccgcgcgggaacggggactggaacaccgggtcctggagctgaatgctgcggatcgacacaacttcgatattgcgcctctgctcgaacgctaccccgctgcggaaagcgaagtattcgtggcgctggacgagcgggcggtgaactacgcccgccacaagctcatcgcggacatccgcctggcgggctaccggctattcgatatcgtctcgcctcaggccatcgtcggcgaaggcgtgcgactgctgggcaacgtgttcgtcggcgccggttgcgtgctcgccggtcgtgcccgcatcggcactggcagttggctggagctgcaggtcctggtggaggaggactgccgggtcggaacctgtagcacgctgctcgctggcgtgcagttgggacggcgagtggagatcggccagggcagcacgctgggtgcgggcagcgtcgcgctcgccgacacccgggtggggcgacactgcgaatggttgttgccgggcaggcttccccgggagctgcccaattactccttttacgatgaactcatgcccgatggggcgcgcatcctgaacaattga

SEQ ID NO: 318371 - DNA, 1131 bp, Pseudomonas aeruginosa
atgactcgccatgcgctggacgcagcgcactacaccgagccgcagacgctcgcgctggagcgcgaaaggctgttcggcaggctctggatcttcgtcggcttcagttcgatggtgcgcgagcgcaaccagttcttcacccgcaagatcgccggcgtgccggtcgtggtgcagcgtaccgagtccggcattcgggcctttctcaaccagtgtccgcatcgtctgtcggcgatccagaccgaatgcaccggccagcgaccgctggtctgcccgtaccatgcctggtcgttcggtgccgaggggcagctacagggcattccgaactccagcctgtaccagttcagcgccgaggagcgggcgcggatcggcttgcgcaagctgcacctggaagaggtggggcaactgctgttcgtcaacctggcggacgacccgttgccgctgcgcgagcagttcgatgatggattcctggaaaccttgcgggaggtctcctcgcacctggatacgcggctgatctacagctgccacaaggtgcgctacaactggaagctgaacatggagaacgtgaaagactacaaccacgttcctttcgtccatccgaagaccttcctcccggtgatgaccgctccggtgcgcggtttggcacgcgaggctgcggtgccgtccgaggtgctgcgcctgctgcaggaaggcgaaacgccggagctgcgttcgctgagcttccccaccaaggcgccgatccagccctacaagagctggttctccgacctctgcgagggctacggcgacgagcacgcctactacaactggttcatctacccgaacgtgaacttctgcagcgtccgtggcgagcacttcctgctccagcagtacgatccggtggcacccggcgagaccgactaccacctgtggatgatgactgcccggcgcaaggatccgaagaccgatttcagcgctttgctgagcaccctgattcgcggcgagcgtaacgtgatcggcgaggacaccctggtcctggaacgcctccaggagggactgggtgcacattcgccgccgttcatgcacggcgactacgaggtgcagttggtgcgccagcatctgtggtatcgcgcgcaggtactgggggagagggcatga

SEQ ID NO: 318372 - DNA, 633 bp, Pseudomonas aeruginosa
atgaagaggatcatcatcctcggcgccggtgggttggggcgtcaggtgttggcccagctgcaggtcgactacggtcacggcatcgactgggtgatcggcgggtttctcgacgagcgcggccccgaagcggtcgcggagtcgctctactatccgtggctcgggtatccggagagcttcgtcgccgagcctgaccaactgttcgtcgccgcggtcggcgatccgctcagtcgccagaagcaggtcgcatgcctgctggcgaagggcgccgagttcgtcgctatccgcacccgctgcacccttggcgtgcggaccagctacggcccgaccttcttcggctacgacgtgagcagcggcgtggactgccgtatcggcgcctacggtttcatcgaccagcaaaccatgctcggccacgacgtggtcatcggcgactatgtacacatcggcccgcgctgcctgctggctggctacgtgaaggtgggcgatcgcgcggtgatcaactccggggcgatgatcgcccgcgacgtcagtatcggcgaagacgccgtggtgggcatgggcgcggtggtgttcaaggacgtggcggccggacagaccgtggtcggcaatccggcccgggttattttcagcaagtga

SEQ ID NO: 318373 - DNA, 768 bp, Pseudomonas aeruginosa
gtgaacgacgagacttccttcaatcccttcagcctgtcgggcaggcgcatcctggtcaccggcgccagttccggcctgggcctggccatcgcgcagagctgcgcgcggatgggcgccgaattgatcgtcagcggtcgcgacccacagcgcctgggcgccagcctggaagcgttgcaggcgatttccgatttgtcgcaccaggcgatccaggtcgatctcacggtcgccgagcagcgtgccgccttggtcgcggcgctcgatggcgaaatccatggggtagtgcatagcgcggggatctcccgtctatgtccggtccgtatgatgagcgaagcgcacctgcgcgaggttcagtcgatcaatgtcgactcgccgatgctgcttacccaggcgctgctgaagcgcaacctgatcgcggccggcggctcgatcctgttcatcgcttccatcgccgcccacatcggggttgccggagtgggcgcatactcgggaaccaaggccgctctgatcgccatgtcccgctgcctggccatggaagtggtgaaacggcggatccgggtcaattgcctgtcgccggcgctggtggaaacaccgctgctggaagctacggcccaggtcgtgggttccatggacaccgagcgcaacaattatccgctgggcttcggcaagcccgaggatatcgccaacgccgctatcttcatgctttccgatgccagccgctgggtgaccggcacgaccctggtgatggacggcggcctgaccatcagttga

SEQ ID NO: 318374 - DNA, 1041 bp, Pseudomonas aeruginosa
atggccacctccacgctgaagaacgtccgtttcgccgggatggcgacctgcgtccccaagcgcgttatctccaacctgaccgactgcaagccgcagttgcgcgccgagcgcgaacgcctggtgcgcaacatcggcatcgagacgcggcgcatggcgcaggagtggcagtgcttctccgacctggccttcgacgccgccgagcgcctgctggaaagcctggagtggaagcgcgaggaggtcgatgcgctgatcgtcgtgacccagtctcccgactacctggcgccggctaccgcgatcatcctccaggaccgcctggggctgccgcattccaccgtggccttcgacgtcaacctgggttgctcggcctatccgttcgccctcaacctgctgggttcgctgattgccgccggcggggtgaagaagggccttgtgctggtcggcgaccgcggcgccagtgtcaacgatccgatcttctccgacgcgggcaccgcgacggcgctggagttctgcgaaggcgcgccgccgatgcacttcgacctgaacagcgacggcagcggctacaaggccatcatcctgccggtgggcggccatcgcgaaccggtcggcgtgcagcacctgatgccgttccgcgaggacgagaacgaccattggcaccgtgccatcgacctgcagctcgacggcaccgccgtactcagcttctccacccagcgcgtaccgccggcggtggaaaagctgctcgactatgccggtgcgagcaaggacgaagtggactacttcgttttccaccaggccaaccggatgatcaacgagaccatccgcaagaagctcggcctgccggtagagaaggtgccttcgaccctgcgcgacttcggcaacaccagcggcgcctcgctgccggtgaccatgaccgcgcggatcaaccgggaactcgaggccggccgcaatcgcgtgttgctctgcggcttcggtatcggcctgtcctggggtacctgcctggtggatatcgaaggggcgaagttccccgatctgatcgaatcctga

SEQ ID NO: 318375 - DNA, 225 bp, Pseudomonas aeruginosa
atgagccaagcaaaattcatcgaagacttcctttccgccaccgatttccagaatcccgtcgaggtcagcatggacacccagctcgaagacctgccggaatgggactcgctggccgcgctcggggtcatcgtcatgttcgacatggaatacggcaagaccatcaccggtgaagacctgatcaaggctcgcacggtgggcgacctctaccagatgctcggactctga

SEQ ID NO: 318376 - DNA, 1137 bp, Pseudomonas aeruginosa
atgaacaacaagacgatcccggtcaccagcccgctgctgccgcccctggaagagttcatcccctacctggaaaagatctgggagagccgcttcctgaccaacgggggcgacatgcaccatgcgttggaagaggccctgtgcgaatacctgggggtgaagcacatcgtgctcttcgccaacgccaccctggcgctcatcaccgcgctgcaggcattgcgggtgaccggcgaggtgatcaccacgccgtactccttcgtcgccaccagccacgcgctgctgtggaacgggctcaagccgatcttcgtggacatcgatcaggactccatgaatctcgacccgtcgcggatcgaggcggcgatcaccccgcagaccaccgcgatcctgccggtgcattgctacggcaacccctgcgatgtcgaggcgatccagcggatcgccgatatccaccacctgaaggtcatctacgatgccgcgcatgccttcgccgtgcgcgacgccggcggcagcgtgctgcgccacggcgacctgagcatcctcagcttccatgccaccaaggtgttcaacaccttcgagggcggtgcgatcatctgctcggacgaaaacacccggcaacgcctcaaccaccttaagaatttcggcttcgtcgacgaggtcacggtggtcatgcccggcatcaacggcaagctcaacgaggtcggcgctgccttcgggctgctgcaactcaagcacgtcgaccaggccctggagcagcgcagggagatcgccgagcgctatcggcgcctgctggccggcgtccctggcatccagtgcctccggcctggtacccagaccttcgccaacaacgcctatttcccgatcctggtggaagacgattttccgctttcgcgcgacgagctgtaccagcgcctgcgcgacagggatgtgctggtgcggcgctacttctacccactcatcagcgacttccccatgtaccattcgctgccctcggcggcgcccgccaatcttccggtggcgcggtcgatttcctcgcgggtgctgtgcctgccgatctatcccgggctggccgccgcagacgtcgagttcgtcgccggcctgatcgcttccgccgccatgccgcggcggcgagcatcaagttga

SEQ ID NO: 318377 - DNA, 1302 bp, Pseudomonas aeruginosa
atgcgcatttccaccatccaggccttcaacaactcggtcaacgggatttcccgcaactacgcggacctgaaccgtaccttcgagcagatcagcaccggcaagcgcatcctgaccccggcggacgacccggtcggttcggtacgcctgttgcgcctggaccaggaacagggattgaacgagcagtacaagaccggcatgaccgaggcgaagaacagcctgagccaggaggaaaccatcctccgttcggtcggcaacgtcctccagcgcatccgcgagatcgccggccaggccggcgacggcgcactggactccaacgacaagaagtcgctggccagcgagttgcgccagcgcgaggacgagttgctgaacctgctcaacagccgcgacgcgagtggcaaatacctgttttccgggtcccagggctcggtgcagccgttcgtgcgcaacgaggacggcacctacagctacatgggcgacgagagccagcgcgaggtgcagatcgccagcagcacgcggattccggtcagcgacagcggcaaggtgctgttcgaggacatcgtcaatgccgctcgtctcgataccaaggcggcggctggcaataccggcgacggtcgcatctcggtcggcctggtcgaggacgagctggccttcgacagccagttcccggcgagcaatccgcctgcggcaaccgacggcttcaacatccacttcgtcagcgacaaggagtatgtggtctacgatccgaagagcctgcctccgggctatgactggaccacctacgatccgaattcgccgccggcctggcaattgtccaagggcgccatcgacgacgacccgaagaccatcgacaaggtgctctacgccggtgtcagcgtgacgatcgacggcacgccgaaggcgggcgacgagttcaacgtcaactacaagccgggcagcgagaagcgcagcctgctgaacgtggtgtcggacctgcgcaaggccctggaaagctccaccgacaaccaggccggcaacgacgccatccgcgatgcgacggcggtggccctgaccaacctctccgccgtggctgccgccgtggatggcggccaggggaagatcggcgcgcgcctgaataccgtggaaagcaccgagaccttcatcgacgatgtgaagctggtgaatgcgtcggtgatgtcgcagatccaggacctggactacgccgaggcgttgtcgcggctgtcgttgcagtccaccatcatggatgccgcgcagcagagctacgtgaagatccaggggttgagcctgttcaactacctgaagtga

SEQ ID NO: 318378 - DNA, 2049 bp, Pseudomonas aeruginosa
atgtccgacctactctcgataggcctgtccggcctcggcaccagccagacctggctgaccatcaccgggcacaacatcaccaacgtcaagacgccgggctacagtcgccaggatgccatccagcagacccaggtcccgcagttcagcggtgccggctacatgggctcgggcagccagatcgtcgacgtgcgccgcctggccagcgacttcctcaccggccagttgcgcaacgccaccagccagaacagcgagttgagcgcattccgtagccagatcgagcagctcgacggcctgttgtccaacaccaccaccggcgtcagcccggccatgcagcgcttcttcgccgcactgcaggccgccgccaacaatccctcctcgaccgaagcgcgcgaggcagtgcttgcccaggccgaggggctgggcaagaccttcaataccctctacgaccagttggacaagcagaacagcctgatcaaccagcaactgggcgcgctggcttcgcaggtcaaccatctgtcgcagagcgtggccagctacaacgatgccatcgccaaggccaagtcggcgggcgcggtgcccaacgacctgatggatgcgcgcgacgaagccgtgcgcaagctgtccgagatgatcggggtgaccgcggtcacccaggacgacaacagcgtcagcctgttcatcggtagcggccagccgctggtggtgggcaataccgtgtcgaccctgagcgtggtgcccgggctggatgaccctacccgctaccaggtgcaactgagcaacggcaactccatacagaacgtcaccggcctggtgtccggcggcgagatgggtggcttgctggcctaccgcaacagcgccctggacagcagctacaacaagctcgggcagttggcgatcaccctcgccgataccatcaacaagcagctggggcagggcctcgacctggccggcaaggccggcgccaacctgttcggcgacatcaacgatccggacatcaccgcgctgcgggtcctggcgaagaatggcaacaccggtaatgtccacgccaacctgaacatcaccgataccagcaagctgaattccagcgatttccgcctggacttcgacggcaccagttttaccgcgcggcgcctgggcgacgacgcaagcatgcaggtcacggtcagcggtaccggtccctacaccctctcgttcaaggatgccaacggcgtcgaccagggcttcaacctgaccctcgaccagctcccggctgccggcgaccgcttcaccctgcagccgacccggcgtggcgcggcggatatcgaggcgacgctgaagaatgcctcgcaactggcgttcgccggtaccgcgcgtaccgagtcgaccaccgaaaaccgcggcaccggcaagatcggcgcgccgaccctcaccagcggtccgtcgccggtggacccggcggtgctacagggcgcgttcgggcccaacgggatcagcctgggcgcgacgctcagcgccgacggcaagacctataccctgtcctcgccgttgccggccggctggaactacgtcgacaaggacggtaacgccctgagcggcagcccgacgctgaccagcggcaataccaataccgtgcgcatggcgttcaccgacccgagcgggcagaaatacagctacgaattcgagctcagcggcgtaccgcagaactccgacagcttcaagctgggcttcaacgacaagggcatttccgacaaccgcaacgctctcaacctgctggccctgcagaccaagccgaccgtcggcggcaccgacaacaccggttccacctacaacgaggcctatggtggcctggtcgagcgggtcggcaccctgaccgcccaggtgcgtgccagcagcgaggccagcgccacggtgctgaagcaggcccaggacagccgcgattcgttgtccggggtgagcctcgacgaagaggcggccaacctgatccagttccagcagtactacggtgcctcggcccaggtgattcaagttgcccgcactttgttcgataccctgattggagcgttccgttga

SEQ ID NO: 318379 - DNA, 1203 bp, Pseudomonas aeruginosa
atggattcccgtttgctcagcggtatcggcgcaggccccgacagcggctcctataccgatctcaaccgcctcaaccagctcaaggtcggcaaggaccgcgacggcgaggcgaacatccgcaaggtcgcccaggaattcgaatcgctgttcctcaacgagatgctcaaatccatgcgttcggccaacgaagcgctgggcgacggcaatttcatgaacagccagaccaccaaacagtaccaggacatgtacgaccagcaactgtcggtgagcctgtcgaagaatgccggcggcatcggcctggccgacgtgctggtgcgccagttgtcgaagatgaagcaaggctccaggggcaacggcgaaaacccgttcgcccgggtcgccgagaacggcgccggtcgctggccgagcaaccccagcgcgcaggccggcaaggccctgccgatgccggaagccggccgcgacgactcgaagctgctcaaccagaggcgcctggcgctgccgggcaagctgaccgagcgcatgctcgccggcatcgttccctccgcctcgccggccgccagccagatgcagagcctgggccaggacagctacctgccggcgcagagctacccggcggcgagccgccgcggtttctccaccgatggcgtcgacagccagggcagccggcgcatcgcccagccgccgctggccaggggcaagtcgatgttcgcctcggccgacgagttcatcgccaccatgctgccgatggcccagaaggccgccgagcggatcggcgtcgatgcccgctacctggtggcccaggccgcgctggagaccggctggggcaaatcgatcatccgccagcaggatggcggcagcagccacaacctgttcggcatcaagaccggcagccgctgggatggtgcctcggcgcgcgctctcaccaccgaatacgaaggcggcaaggcggtcaaggaagtcgcggcgttccgctcctactcgtcgttcgagcagagcttccacgactacgtcagcttcctccagggcaacgaccgctaccagaacgccctggacagcgccgccaaccccgagcgcttcatgcaggaactgcagcgcgccggctacgccaccgatccgcagtacgcccgcaaggtggcgcagatcgccagacagatgcagacctaccaggccgtcgccgccgccggcacgccgcctctgggttga

SEQ ID NO: 318380 - DNA, 1110 bp, Pseudomonas aeruginosa
atgaccaagttcaagcacctgctggccctcgccgcgctgctcctggccgccggcgcggcccaggccgagcggttgaaggatatcgccagcatccagggcgtgcggaccaaccagttgatcggctatggcctggtggttggcctgagcggcagcggcgaccagaccacgcagacgccgttcaccctgcagaccttcaacaacatgctggcgcagttcggcatcaaggtgccggccaacgtcggcaacgtgcagttgaagaacgtcgccgcggtatcggtgcatgccgacctgccgccgttcgccaagccgggccagccgatcgacgtcaccgtgtcgtccatcggcaacgccaagagcctgcgcggcggcagcctgctgatgactccgctgaaaggtatcgacggccaggtctacgcggtcgcccagggcaacctggtggtcggcggcttcgacgccgaaggccgcgacggctcgaagatcaccgtcaacgtaccgtccgccggacgtatcccggccggcgccaccgtcgaacgcgcggtgccgagcggcttcgaccagggcaacagcctgacgctgaacctcaaccgcccggacttcaccactgccaagcgcatcgtcgaccgcatcaacgaactgctcggtccgggcgtcgcccatgcggtggacggcggctcggtgcgggtcagcgcgccgctcgatccgaaccagcgggtcgactacctgtcgatcctggagaacctcgacgtgcagccgggcgaggcggtggccaaggtcatcatcaattcgcgcaccggcaccatcgtcatcggccagaacgtcaaggtatcgccggccgccgtcacccacggcagcctgaccgtgagcatcaccgaggacccgatcgtcagccagcccggtgccttctccaacggccagaccgcggtggtgccgcgctcgcgggtgaacgccgaggaggagaccaagccgatgttcaagttcggtcccggcaccaccctggacgacatcgtccgcgcggtgaaccaggtcggcgccgcgccgagcgacctgatggcgatcctcgaagccctgaagcaggccggcgcgttgcaggccgacttgatcgtgatctga

SEQ ID NO: 318381 - DNA, 696 bp, Pseudomonas aeruginosa
atgaaccggctgatgatcgtctccctgcttggcatcgccaccgccctgggtggttgcgtcaatccaccgccgaagccgaacgatccgtactacgcgccggtgctgccgcgcaccccgctgcccgccgcgcagaacaacggcgcgatctaccaggccggtttcgagcagaacctctacgacgaccgcaaggccttccgcgtgggcgacatcatcaccatcaccctcaacgagaagacccaggcgagcaagaaagccaactccgatatccagaaggacagcaagaccaagatggggctgacctcgctgttcggcagcggcatgaccaccaacaacccgatcggcggcggcgacctcagcctcagcgccgaatacggcggctcgcgcgacgccaagggcgatagccaggcggggcagagcaacagcctgaccggctcgatcaccgtgaccgtggccgaggtgctgcccaacggcatcctctccgtgcgcggcgagaagtggatgaccctgaacaccggcaacgagctggtgcgcatcgccggcctggtccgcgccgacgatatcgccaccgacaacaccgtgtcctcgacccgcgtggccgacgcccggatcacctattccggcaccggcgccttcgccgatgccagtcagccgggctggctggaccgcttcttcctcagcccgctgtggccgttctga

SEQ ID NO: 318382 - DNA, 786 bp, Pseudomonas aeruginosa
atgttatcggcactgtgggtcagcaagaccggtctgtccgcccaggacatgaacctgaccaccatttccaacaacctggccaacgtatccaccaccggcttcaagcgcgaccgcgcggagttccaggacctgctgtaccagatccggcgccagccgggcggccagtcgacccaggacagcgagctgccttcgggcctgcaactgggtaccggtgtgcgcgtcgtcggcacccagaagatcttcaccccgggcagcctgcagaccaccgagcagccgctggacatggcggtcaacgggcgcggcttcttccaggtcctgctgccggacggcaccgtgtcctacacccgcgacggcagcttccacctgaactccgacgggcagatcgtcacctccaacggcttcgccctggagccagcgatcgtggtgcccaacgagacccagaccttcaccgtcggccaggacggcaccgtctcggtgaccaccaccggcaacgcccagccgcaggtgatcggcaacatccagaccgccgacttcatcaacccggccggcctgcaggccatcggcaacaacctgttcctggaaaccggctccagcggcgcgccgcaggtcggtacgccgggtctcaacggcctcggcacggttgcccagaacaccctggaaaactccaacgtcaacgtggtcgaggaactggtgaacatgatcaccacccagcgcgcctacgagatgaactccaaggtcatctccaccgccgaccagatgttgtccttcgtcacccagaatctttga

SEQ ID NO: 318383 - DNA, 750 bp, Pseudomonas aeruginosa
atggacaagatgctgtacgtctccatgagcggggccagccagaacaccctggcgatgcgtgctcatgccaacaacctggcgaacatctcgaccagcggctttcgtcgcgacttcgagcaggcgcgttcgatgcaggtgttcggcgacagcttcccggcgcgggtattcgccatgagcgagcggcccggtaccgatttcagccatggcagcctccaggaaaccggcaacgagctggacatcgccatcgacggcgacggcttcgtcgcggtccaggcgccggatggcagcgaggcctacgtgcgtaccgccggcatgcatatcgacgccctcggcatgctgcgcaccggcgacggcttgccggtgctcggcaacggtgggccgatcgccgtgccgccggaggaaaaggtggagatcggccaggacggcaccatcagcatccgcgcccttggcgagaaccccaacgtggtcgccgtggtggaccggatcaaactggtcaacccgaacctgaagcagatggagaagggtaccgacggcctgctgcactacaagccgcagccgggcgagcaggcgccgctggccgacgccaacgtgaaggtggtctccggtttcctggaaagcagcaacgtgaacgcggtggaagagatgaccgcgatcctctcgctgtcccgtcaattcgagctgcacgtgaagatgatgcgcaccgccgaggacgattcggcggccatggcgcgggttttgcaaatcagctaa

SEQ ID NO: 318384 - DNA, 1389 bp, Pseudomonas aeruginosa
atgagtttcaacatcggcctgagcggcatccaggcggcctctagcggcctgaacgtcaccggcaacaacatcgccaacgccggcaccgtaggcttcaagcaatcccgcgcggagttcgccgacgtctacgccgcctcggtgctgggttcgggcagcaacccgcagggcagcggcgtgctgctctcggacgtctcgcagatgttcaagcagggcaacatcgactcgaccaacagcgtgctggacctggccatcaacggcaacggcttcttcgtcaccagcaacaacggggcgatcagctacacccgcgccggctacttcaataccgacaagcaggatttcatcgtcgacaacaacggctaccgcctgcagggctatgccgtcgggccgaacggccagttgcagaacggcgtggtcaccgacctcaaggtcgagcgcgccaatcaggcgccgcaggccacctcgagcatccagcagtcgtacaacctcaactcgacgctgaagccgccgaccgtgacgccgttcgatccgtccgacgccgctacctacaactcgtcctcttcgctgggcatctatgacagccagggcaactcccacaccatgagccagttcttcatcaagaacgagccggacccgaatgcgaccccgccgattccggagaacagctggaccatgaaagtgctgatcgacggcgtcaatccgctcgatccgtcgaacaagacgccgatgagcttcaacgtcaccttcgacgccagcggccagatgacctcggttcgggcgccggacggcagcaccagcgggccgggcttcagcatcgacgcgaccaccaacgtgatccagttcagtccggccactggcaatccgccgactcccggcaccggctggattccggcggcctcggacggcaagaccccgccgacctacgcctggaacggcgcgaccggtgccgccagcggcatctccttcgacatgcgcaagaccacccagtactccaccgcgttcgcccagagcaacccgatccaggacggctacaccaccggtcagttggcaggcctggaaatcgacgacaccggggtgatcttcgcccgctacaccaacggccagtccaaggtgcagggccaggtggtgctggccaacttcgccaacatccagggcctgacgccgatcggcaagacctcctgggtgcagtcctcggagtccggcgagccggcggtcggcgcgccgcgctcgggcaccctgggggcgttgcaatccggcgcgctggaagcgtccaacgtggacatctccaacgaactggtgaacctcatcgtccaccagcgcaactaccaggccaatgccaagaccatccagaccgaggatgcggtgacccagaccatcatcaacctgcgctga

SEQ ID NO: 318385 - DNA, 714 bp, Pseudomonas aeruginosa
atgagcatcgataacgtcagcggcaccagcagcaacaccggcaacgtcaacggcagcaagcgcaccgccggcagcggcgccaccgagaccgggcagagcgtcaagggcagcagcaaccttggcaaggacgaattcctcaagctgctggtggcccagttgaagaaccaggacccgatgtcgccgcagcagaacggcgagttcatcgcccaactggcccagttcagcaccgtggaaggcgtgcagtcgctgaacaagagcatggagagcattctctccaactaccagtcgtcgcaggccctgcaagcctcgtcgctggtggggcgcaaggtcatcgtggcgaccgacaagtcggtggtggacaccaaggacaccttcaaggcgtccctcaacctgccggtctccagcagcaacgtatgggtcaacgtctacgacgacaagggcaccgtggtcaatcgcatcaacctcggccagcaggctgccggcagcgtcagcttcatgtgggacggcaaggacagcagcggcaacatcatgccgccgggcacctacaagttcgaggcgcagacctcgatcgacggcaagacctacgggctccagacctacctgccggccaacgtcgacagcgtcaccctggggcagaacggcggcgagctgatgctcaacctcgcaggcctgggcagcatcgcgctgtccaaagtacagatcatcggccagtaa

SEQ ID NO: 318386 - DNA, 441 bp, Pseudomonas aeruginosa
atgtccctcgccagtgtcttcaacattgccggtagcggcatgagcgcccagagcacccgcctgaacaccgtggccagcaacatcgccaacgccgagacggtttcctccagcgtcgacaagacctaccgcgcccgccatccggtgttctccaccatgttccagcaggcccagggcgacagcggctcgctgttcgccgaccaggacagctccggcgccggcgtgcaggtgctgggcatcgtcgaggaccagagttcgctgatgccgcgctacgagccgaaccatccggccgcggatgccaacggctacgtgtattaccccaatgtgaacgtggtcgaggaaatggccgacatgatttccgccagccgtgccttccagaccaacgcggaaatgatgaataccgccaaacagatgatgcagaaggtcctgaccctgggtcagtga

SEQ ID NO: 318387 - DNA, 408 bp, Pseudomonas aeruginosa
atgagcatcagtttcgacagagcactcggtatccaccagcaggccctcagcttccgcgcccagcgcgccgaagtgctggccaacaacctggccaacgccgataccccgaactacaaggctcgcgacctggacttcgccgcggttctcgccgagcagaaggacaaggccgccaagggtaccttcgccacccgcaccaccaacgagcggcatatcgccgccgaaggtttcggcatgggcgagggcagcctgcagtaccgcatcccggtccagccgtcgatcgaccagaacactgtcgacgcccagatcgagcaggccaactacgccgagaacgccatgcacttccaggcgtccttcaccttcctcaacagcaaattcaaagggctggtcagcgccctgcgtggagagtaa

SEQ ID NO: 318388 - DNA, 363 bp, Pseudomonas aeruginosa
atgttcgaaccaggccacctccatctggtcagcctgcccggcctcgaccagcaggacatcaatatccatatccgctacgaggtgcggcagaacgccgaatccggcgcctatgtgcacttcgacatggacggcgagatcgacggcaagccgttcagcgactccttcgagctgccgcgcgataccgccttcaacttcgccagcgatgccacgcgggtcgcccagaagcacggcctgcacccgaagttcggcgcgatcacccgggtgcacaaggaatacgatgcgatgttcgaggacattcgcgccaagctgcatgcccatcccggcgaaccagtggatctcgagcggatcattcgccacgagtga

SEQ ID NO: 318389 - DNA, 318 bp, Pseudomonas aeruginosa
atgacagaacaaactagcaccctctatgccaagctgctcggcgagaccgcggtcatttcctgggccgagctgcaaccgtttttcgcccgtggcgccttgctccaggtcgatgccgcgctggacctggtggaagtcgccgaggccctggccggggacgaccgcgagaaggtcgccgcctggctttccggcggcggcctgagcaaggtcggggaggatgcggccaaggacttcctcgaacgcgacccgaccctctgggcggtggtggtggcgccctgggtggtcattcaggaacgcgcggaaaaagcgacgttgcactga

SEQ ID NO: 318390 - DNA, 1122 bp, Pseudomonas aeruginosa
atgaagaagggtactcagcgtctatcccgcctgttcgccgcgatggccattgccgggttcgccagctactccatggccgccgacaccatcaagatcgccctggctggcccggtcaccggtccggtagcccagtacggcgacatgcagcgcgccggtgcgctgatggcaatcgaacagatcaacaaggcaggcggcgtgaacggcgcgcaactcgaaggcgtgatctacgacgacgcctgcgatcccaagcaggccgtggcggtcgccaacaaggtggtcaacgacggcgtcaagttcgtggtcggtcatgtctgctccagctccacccaacccgccaccgacatctacgaagacgaaggcgtgctgatgatcaccccgtcggccaccgccccggaaatcacctcgcgcggctacaagctgatcttccgcaccatcggcctggacaacatgcagggcccggtggccggcaagttcatcgccgaacgctacaaggacaagaccatcgcggtactgcacgacaagcagcagtacggcgaaggcatcgccaccgaggtgaagaagaccgtggaagacgccggcatcaaggttgccgtcttcgaaggcctgaacgccggcgacaaggacttcaacgcgctgatcagcaagctgaagaaagccggcgtgcagttcgtctacttcggcggctaccacccagaaatgggcctgctgctgcgccaggccaagcaggccgggctggacgcgcgcttcatgggcccggaaggggtcggcaacagcgaaatcaccgcgatcgccggcgacgcttcggaaggcatgctggcgaccctgccgcgcgccttcgagcaggatccgaagaacaaggccctgatcgacgccttcaaggcgaagaaccaggatccgagcggcatcttcgtcctgcccgcctactccgcggtcacagtgatcgccaagggcatcgagaaagccggcgaggccgatccggagaaggtcgccgaggccctgcgcgccaacaccttcgagactcccaccgggaacctcgggttcgacgagaagggcgacctgaagaacttcgacttcaccgtctacgagtggcacaaggacgccacccggaccgaggtcaagtaa

SEQ ID NO: 318391 - DNA, 924 bp, Pseudomonas aeruginosa
atgcccgagatttatcattacctacaacaattggttaacggcctgaccgtcggcagcacctatgcgctgatcgcgatcggctacaccatggtctacggcatcatcggcatgatcaacttcgcccacggcgaggtgtacatgatcggctcgtacatcgccttcatcgccatcaccctgctggcgatgatggggctggacagcgttccgctgatgatgctcgccgcattcgccgccagcatcatcgtcaccagtgccttcggctacagcatcgagcgggtcgcctaccgcccgttgcgcggcggcaaccgcctgatcccgctgatctccgcgatcggcatgtcgatcttcctgcagaacgccgtgatgctctcgcaggactccaaggaaaaggccatcccgaccctgctgcccggcaacttcgtgttcggcgaaagcagcatgaacggcgtggtgatctcctatatgcagatcctgatcttcgtcgtcaccttcctggtgatgttcggcctcaccctgttcatctcccgctcccgcctgggccgcgcctgccgcgcctgcgccgaggacctgaagatgaccaacctgctgggtatcaacagcaacaacatcatcgccctcaccttcgtcatcggcgccgccctggccgccgtcgccgcggtgctgctgggcatgcagtacggcgtgatcaaccccgggatcggcttcctcgccgggatcaaggcgttcaccgccgcggtgctcggcggcatcggcagcatccccggcgccatgcttggcggcctgctgctgggcgtcgccgaagccttcggcgccgacgtgttcggcgaccagtacaaggacgtggtggccttcggcctgctgatcctggtgctgctgttccgacctaccggcatcctcggtcgtccggaggtggaaaaagtatga

SEQ ID NO: 318392 - DNA, 1254 bp, Pseudomonas aeruginosa
atgagccagtccctcaagcgagcgctgttcagcgccctcctcgtgatcctggtgtcctatccgatcctaggcctgaagctgcgcaccgtcggcatcaagctcgaggtcctcggcgccgatgcgcagaccctctggaccatcgccgcggccgccctggccatgttcgtctggcagctgttccgcgaccgcatcccgctcaagctgggtcgcggcgtcggctacaaggtcaacggcagcggcctgaagaacttcctcagcctgccatcgacccagcgctgggcggtcctcgccctggtcgtggtggctttcgtctggccgttcttcgcctcgcgcggggcggtggacatcgccaccctgatcctgatctacgtgatgctcggcatcggcctgaacatcgtggtcggcctggccggcctgctcgatctcggctacgtcggcttctacgcggtaggtgcctacacctacgcgctgctcgccgagtacgccgggttcggcttctggaccgccctgccgatcgccgggatgatggccgcgctgttcggcttcctcctcggcttcccggtgctgcgcctgcgcggcgactacctggcgatcgtgaccctcggcttcggcgagatcatccgcatcctgctgcgcaacatgaccgagatcaccggcggtcccaacggcatcggctcgatccccaagccgaccctgttcggcctgaccttcgaacgccgcgcgccggaaggcatgcagaccttccacgagttcttcggcatcgcctacaacaccaactacaaggtcatcctgctctacgtggtggccctgctgctggtgctgctggccctgttcgtgatcaaccggctgatgcgcatgccgatcggtcgcgcctgggaagcgctgcgcgaggacgaagtggcctgccgcgctctcggtctcaacccgaccatcgtcaagctctccgccttcaccatcggcgccagcttcgccggtttcgccggcagcttcttcgccgcccgccagggcctggtgacgcctgagtccttcaccttcatcgagtcggcgatgatccttgcgatcgtcgtgctcggcggcatgggttcgcagctcggcgtgatcctcgccgcggtggtgatggtgctgctccaggaaatgcgcgggttcaacgaataccgcatgctgatcttcggcctgaccatgatcgtgatgatgatctggcgtccccagggactgctgccgatgcaacgcccacacctggagctgaagccatga

SEQ ID NO: 318393 - DNA, 768 bp, Pseudomonas aeruginosa
atgagccgaccgattctcgaagtgagcggcctgaccatgcgcttcggcggcctgctggccgtcaacggcgtcaacctgaaggtcgaggaaaagcaggtggtctcgatgatcggcccgaacggcgccggcaagaccaccgtgttcaactgcctgaccggcttctaccagcccaccggcggcctgatccgcctcgacggcgaggagatccagggcctgcccggtcacaagatcgctcgcaagggcgtggtgcggaccttccagaacgtccgcctgttcaaggaaatgaccgcggtggagaacctgctggtcgcccagcaccgccacctcaacaccaacttcctcgccggcctgttcaagaccccggcattccgccgcagcgagcgcgaggccatggagtacgccgcgcactggctggaggaagtcaaccttaccgagttcgccaaccgcagcgccggcaccctcgcctacggccagcagcgacgcctggagattgcccgctgcatgatgacccgcccgcggatcctcatgctcgacgagccggccgccggcctcaacccgaaggagaccgacgacctcaaggcgctgatcgccaagctgcgcagcgagcacaacgtgacggtattgctgatcgagcacgacatgaagctggtgatgagcatttccgaccatatcgtggtgatcaaccagggcgcccccctggccgacgggacgccggagcagatccgcgacaacccggacgtgatcaaggcttatctgggggaagcgtga

SEQ ID NO: 318394 - DNA, 702 bp, Pseudomonas aeruginosa
atgctgagtttcgacaaggtttccacctactacggcaagatccaggcgctgcacgacgtcagcgtggaagtgaagaagggcgagatcgtcaccctgatcggcgccaacggcgccggcaagtcgaccctgctgatgacgctctgcggctcgccgcaggcggccagcggcagcatccgctacgaaggcgaggaactggtcggcctgccctcctccaccatcatgcgcaagagcatcgcggtggtcccggaaggccgccgggtcttctcccgcctgacggtggaagaaaacctggcgatgggcggcttcttcaccgacaaggacgactaccaggtgcagatggacaaggtgctggaactcttcccgcgcctgaaggaacgctacgaacagcgcgccgggaccatgtccggcggcgaacagcagatgctcgccatcggccgcgcgctgatgagcaagccaaagctgttgctgttggacgaaccttcgctcggcctggcgccgatcatcatccagcagatcttcgagatcatcgagcagctgcgtcgcgaaggcgtcaccgtgttcctcgtcgagcagaacgccaaccaggcgttgaagctcgccgatcgcgcctacgtgctggagaacggccggatcgtcatgcacgacaccggcgccgccctgctgaccaacccgaaggtgcgcgacgcctacctcggcggctga

SEQ ID NO: 318395 - DNA, 2295 bp, Pseudomonas aeruginosa
atggatatctggaactgggtggagaagctccgcgccgacctgcgtgaggccggccaggagcagagtgcgcggctgatcgacgaactcaccgcgtacgtctgcgacctcgaggtggagcgcgccgaggcgctgttgccggaggtcaaggcgctgagccggacgttgaacaacccgtggctggaaatcttcgtccgccactgggaaatgcgtaaccgggtcggcaaccaactggagggtgagaccgccctggccgacgccgtttccctgttcgaactggccaaccgcgacgacacccaggcctgcccgcagtcggtctgcgtgacccaggacctggcgtcgtgctacgccaacgtcgacggcccgggctgggtggaggaacgcatcgaggtgtgcgacgagaccctggcgcggatcgacccgacctgggcctgcttccactgcctgagcaacgagaaggccgaggcgctgctcgacgacgggcgcggcgaagacgccctggccttcctggccgaacaggagaagaagatcctcgccgccggcgaggaggtattcgacagcctcctggagatgcgcgtggcgatcctgctgaacctggggcgcgcggaacaggcgctggccctgatcggcgagatggaggagaaggtcgagggcgcggagtggaacaacatcagccagccgcggcgtctgtacaaggcccacggcctggcgttgctggggcgcgacgaggaggccctggaggcgctgctgccgttctccgagattgccccgcgctatcgtacgatctggctgcgcgccgtctacctgctgctgcaacggacccctgagcgcaacacctgggacttcggcgggcgcctgcagcagatgctcgaacactactcgcagaagggcgcgcaccgggtggtcatcgatgttgccagccaggccatccgcctcgcgttgcaacgcggttcggtatggagcgccaggcgccacctggcgctggccgaacagcatgctcaacagttgcagcgcgatcggggcgccagccagttgctcgccgggttgagggaggagatcgatgccgcgccgcagcagcaggagctgccggtgccggctgcggagttgctcgactggctggctgcgcagggcagcgaagacgcgccgcgcaacccggagaaagaagtgcagtggctgctccaggcgctggccgagcggcccgacgacaccgccttgcgcgaagtggccgcctcggcgctacaggcctgctccgccgacgacgaggccatcgacctgctctgggagtacgtcgagcgccacactgacgaggagcagcaactggcctactacctgctcaatgccttgctggcccgcggcgagtacgaccaggtcaagcgcctcggccggctctacgccgacagcgtgccgctgatcgcgctgtggagcgaagtcaagctggccgagaaactcaacgactggccggagctggagcgcgcctgccaatcggtgctggaaatttctcccggctcgctgggagcccacagcctgctgggtaaggcgctgatggagcaggatcgcttcgccgaggcggcgctggcctaccagcgtctggccggcaagctggaggagccgcagtcggtgcagtgggaccagatgaccgccgccagcgccgcgcgcgactggacgatgctgcgcgaggtcgctgccggcatgggcatggagttcgccgccggcgacggaccgatcgaggaagactggggctgggtgatcgtccgctacatcgaggatggcgaagcgctcgactactacgcccggcgcaccggcccggtgaccgcgcgggtcctcgagaacgcgccgggcaaccgcagccagcgggtcggggactgggtggtgttcgacgccggcctgatctatccggctccggaagacgaggaggaacgcaagcgtttcgttcccacctatgcggtggtgcacgtcctcgagagcggtggttactcgccgagctggctggtggacggcgtctatccgggcgacgaggccttcgacgccttccgcgaaacgctcgacgcgcgcggctggaaggtctgggtgcacagcaaccgcgactaccaggtcaccgatgccagcagcggcgaggaactgcgggcgatctacttcaccgtcgcgacacccgcgcagcaggcgccgcgcgacctgcaccaggcgttgcaggaggccaccgggcaatggccgcaccgcatgtgctggctgcgcctggcggaagcggcggaggtcgacacccagccgcacctggacgctatcgagcgctacggcctgtag

SEQ ID NO: 318396 - DNA, 1842 bp, Pseudomonas aeruginosa
atgcaaagcagctttccgcaatcgaacactccccagatccgtcgcgctggagtcgacctcaacggcgtgatgtcggtgctcagcaagcacctctattccacgcccaccgtggcgttgcgcgagctggtgcagaacgcccacgactcgatcctccgtcgccgcctggagcagcccgactggcaagggccgtcgcgaatcgaggtgatcggcgacagtgccagcaacaccgtgcgcatcgtcgacaccggcgccgggctcaccgagcacgaaatccacgcctacctggccaccgtcggcgtcggctacacccgcggactgcgccagtccggccacgaggacagcgggctgatcggcatgttcggcctgggcttcctctccgctttcgtcctggcccgccgggtcagcgtgcggaccacgtcctaccagcagccggaactgggcttctgctacgtctccagcaacgccgagcaatacagcgtgacgccgatgccggcgcgcccggtgggtaccgagatcaccctcgaactgcaggacgaatacagtgcgctgacccaggccgcgcgcctgcgcgagatcctcgaacgctactgcgtgctgctgcgcgagccgatccacgtcggcggcgacgcccagtcgatcaacccggagccgccgccgtggcggctggccgccgacgccgcgctgcacccgctgcaacggcagcgccgcgacctggagttcgccgcgcgtttcgagcacgacttcgagccgatctgctgcctgccggtgcgcccggacgagcgggtcgacgtgcagggcctgctgtggatccaggacggcggcacctatggcaccagcgacaaccgcaatctctcggtattccttcgcggcatgctgctcgacgatgacgcccgcgacctgctgccgtcctgggccgggttcgtcggcggggtgatcgagtcgaaccgcctgacgcccaccgccagccgcgaggacctgcagcgtgacgaccattacgcggcgatccagcatgcgctggccgaggcgctgatcgccgggctcggcgaggtggcgcggcagcagccggaggcctggcggcgggtcctgctgcggcacaacgaggccctgctgggagcggcgttgtgcgacgagcgtctgttcgcgctgatgatggacagcctgcgcgtacccacctcccagggcgacctcccggcttccgaactcctttcgcgcggagcggtgcatgtgctgctggacaacgacagcggcttcgaggaaatgctgttccgtgccatgggcgtaccggtggcccatggcaatcgctatgcggtagtacccttcctccgtcgctgggcgcaggccaaggggatgcgcctggtggagctgggcaccgagcagggcaaccgccagttgttccgcctcgaccgactgcccgagcgcgagaccggctggctggccgaacacctgggcggcgccgaggagcaactggtgatcgcccgcttcagccccgaggaattgccgcttgtggtggtgcccgaccgcgacgccgaactcaagcggcgactggaggacgacgaggccgacaagcgtatttccaccgcggcgttgcgcctggctcggcagttcacccgcaagctcgacaatcgccagccgagccggctctacgtcaacctcgacaatccggcggtgcaggcgctgctcgcggccgtcggcgaggaacgcgacgaagcggcccatgcggcgttgctgctgcgctcgttcaaagtgatcatcgccggacagggacgcggccagcccgcgacctcgctgaaccaggccctggccggactcgccgattcggtgaagcgcctgctggggcaataa

SEQ ID NO: 318397 - DNA, 915 bp, Pseudomonas aeruginosa
gtgaaggacctggacgatctcgccgccttcgccgtactccacgacctgggcagtttcacccgcgccgccgagcgtctcggttgcagcaagggccaactgtcgaagcgcattggcgtcctcgagcagaagctcggcgtgaccctcttgcaccgcaccacccgccgtctttcgctgaccgccgccggcgccgcgctgctgcccgaggcgcaggccttgctggtgcaggccgagcgcgcgcggcaggcggtggcgcgcttgcaggagcgagcggaaggacgggtgcgggtgaccctcccggtctcgctgggcgagaccctgttcgatgcactgctggaggacttccaggaacgccatccgctgctgcgcgtcgagctggacctgtacaacggcctgcgcgacctggttggtgagggcttcgacctggcgattcgctctggggtcgagcaggacgcccggctggtggcgcggccgctgttcgtcctgcaggaaatcacctgcgccagtcccgcctacctggcgcgacacggcgagccgcaacgcccggccgagctggccgagcgcgagtgcctgctgaactcgcactacagcggccacgaggagtggctctatcaccgccaccatcggctggagcgggtacgggttgccggctttctcgccagcaaccactacagcctgttgaagaaggccgcgctggccggcaccggcatcgcccggctgccgtcatacatggtccacgacgaactgggcgacggccgcctggcctggttgctgcgcgactaccagacgcgcagcacgccgatgttcctcgtccatccgttccagggcggcctgccgcggcgcacccaggtactcgccgattacctgctcgactggttcgagcgcagccggcgacaattgatcggcctggagggttga

SEQ ID NO: 318398 - DNA, 600 bp, Pseudomonas aeruginosa
atgaaaatcatcctgatcggcgccagcggcacccttggcaagggtatcgacaaagaactcggcgagcgccacgagatcgtccgggtaggccacagcagcggcgatttccaggtcgacatcagcgactcagactccattcgcgccctgttcgagaaaaccggtcgcttcgacgcgctggtcgccgcggtcggcaaggtgcacttcggcgccctggaggaaatgggcgaggcgcaataccagctcggcctgcgcgacaagctgatgggccaggtcaacctggtactgctcggccgcgagtacgccaacgacgggggctccttcaccctcaccagcggcgtgctcgccgagcagccgatccgcttcggcagttcggcgagcatggtcaactgcgccgtcgagggcttcgtccgcggcgcagccctggagttgccgcgcggcctgcgcatcaacgccgtcagcccgaccgtggtcagcgaggcgctgcccggctacgcgccctacttccgtggcttcaagccggttccggcggcggacgccgcgctgggttacgcacgcagcgtggaaggcgcgcagaccggccaggtgtaccgcatctggtaa

SEQ ID NO: 318399 - DNA, 399 bp, Pseudomonas aeruginosa
atgatccaatgcaagcgtgtatacgaaccggcgtcgcccgccgatggccggcgcgtactggtggaccggctgtggccgcgcggcatccgcaaggaggccctggccatggacgactggctgaaggacgtggcgccctccaacgaggtgcgcaagcagttctgccacgatccggcactcttcgacagcttccgcgaacactaccgcgccgagttgcaggcgcacccggaacattggtggggcctgctcgacagcgctcgggagggcaccctgacgctgctctacggcgcccacgaccagcagcacaacaatgccgtggtgctggccgagttcctcgaggaggagctggaccgccagcagccgggcagttcgccgacctgctacgccgaccgcttctcctga

SEQ ID NO: 318400 - DNA, 666 bp, Pseudomonas aeruginosa
atgcgccctgcccgtctgctggtctacagcctgctccccttgttcgccgcctgccaggtgtggaagcccgaatcgccgagcaccagtgtagacacccgcttccagggcgaactggtgaagatcaacggcgcgctgcaattccgcccctgtaccgagaagcgcctgttcagcatcgaggacgtggccaataccggcctgcgccgcgaagccgacagcctgttcgacgacggcgcccagggcctgttcgtcgacctgcgcggcaccatgggaccggccaaggtccgcggtaccgacggcaagctggaggtcagccgactgtaccgcgtgcagaacgagggccccggctgcgacgacccgaacttcaagctgctgaccttcgccgccaacggcaacgaacccttctggagcgccagggtgaacaaccagggcctgcgcctggaccgcccggaacacgagaccctggccttgccttacgtcgccgaggaactgccgaacggcagcaccagctattccagcgaggcgaacggcaagaaggtcgaattgtggatcgccccgtcgtcctgcaccgacagcatgagcggcgccttcagcagctactccgccgaactgcgcatcgatggcgagacgctgcgcggctgcgcctatccgggcgcactgggcaagtga

SEQ ID NO: 318401 - DNA, 252 bp, Pseudomonas aeruginosa
atgagtttcatccgcctcaaggtgcgcgccgccttcatggtccacggctacgacgcggacaaccgggaaatcgtcgagcagatcggcgaggaacgcttcgtcgagaaactgctgcgcatcgaacggatccagtcgatcagcgagaaatacctgctggtcagcgcctcccacgggcgcgtcgcctactgggaatacgagggcggcctgacggcgctgcggcggcgcctggagcaggccggactgctcttgtag

SEQ ID NO: 318402 - DNA, 522 bp, Pseudomonas aeruginosa
atgcaccgtttgcgagctgccgaaaccggcgatatcgaggccatgaccgacctgttgctgcgccacgggccgaatccctggaaccatttgccggaggagggggtgcgtgcgcatctgcgagccatcgccgacggcgaggtacgtgccgtcctggccgagcgcgacgatcggctgctggggttcgccagcttccgtcgcaccgaggatttcgcccattaccagccgcagcgtgccgatgcgccgcgggcctacatctgcgaggcggtagtgcatccggcggcggccggccaggggctcggcagcgcgttgctggaggcggtgctggcccaactggccgacgaaggcatcgaggacgtctatatcgatcgtcacgaagagaacctggcgtcggcgggaatgatgcgcaaggccggcttcgtcgagctggaaacctacgccgatccggcgcggcgaccgaacggctcggggcgctcgacagtgtgccatcgcaatctttccctccagcgcagagccgtgcgatga

SEQ ID NO: 318403 - DNA, 1098 bp, Pseudomonas aeruginosa
atgaccgtcgaccaacgccaatgggcccgcgaggcgatccgcatcatcgaagcggatttccagcgcagcgccgatacccatttgatccccctggagactcccggcctgcctggcgtcgaactgtacttcaaggacgagtccagccaccccaccggcagcctcaagcatcgcctggcgcgctcgctgttcctctatgcgctgtgcaacggctggctcaggccggccgcgccggtgatcgaggcatcgagcggttccacggcgatttccgaagcctatttcgcacgcctgctgggcctgcccttcatcgccgtgatgccggccagcacctcgaaggaaaagatcgcccagatcgccttctacggcggccagagccacctggtggaggaccccacccagatctacgccgagtccgaacgcctggcgcgggagagcggtggccatttcatggaccagttcacctatgccgagcgcgccaccgactggcgggcgaacaacaacatcgccgaatcaatcttccagcagatgcgccacgagccgtacccgaccccgacctggctgatctccagccccggtaccggcggcaccctggcgaccctcggccgctacgtgcgctatcgccagcactgcacccgggtactctgcgccgacgccgagcgttcggtgttcttcgacgcctatgtcagcggcgaccgtggcctgaccctggattgcggttcgcggatcgagggcatcggccggccgcgggtcgaggcgtccttcctgccggaagtgatcgacgcgatggtcaaggtgccggacgcctggtcgctggcggccatgcattacctggcccgacgcctggggcggcgggtcggcggctccagcggaaccaacctgatcggcgccctggtggccgcacggcaaatggtcgcggccggcgagaagggttcgctggtggcgattctctgcgacggcggcgaacgctatgcgaccacctattacgatccggtctggctggccaggcagggctatgcgctggagcccctggtcgaggcgctggctgcctgcatcgagcggggcgtggcgttgcccgacgggctgctggtggctggactttga

SEQ ID NO: 318404 - DNA, 906 bp, Pseudomonas aeruginosa
ttgactcggacgcgctggttcgccctggcctgcctgatcctggcgatggcgctgtggggcagttcgtacgtggtgctgaaggtcgctttccgcgaactgccgccgctctgggtgatcttcggccgcatggccctcggcagcctggtgttcctcgttgcctggcgctggcgcggacgcatcgactaccgctcgggcgactggaagtacctgctcggcctggccgtctgcgaaccctgcctgtacttcctctgcgaatccttcgccctgcaatacaccagcgcggcccaggccgggatgatcaccgcgctgctgccgttgctggtggcggtgggggcctggttgctgctgcacgaacggatcggtcggatgacctggatcggcttcggcctggcggtgctcggttcgatctggctgagcctcgccggcgagcccgacctgcacgcgccgcagccgctgctgggcaacttcttcgaacttctcgcgatgatctgcgccaccggctataccctgttgctgaagcacctgtcggcgcgctactcggcattcgccctgaccgccatgcaggccttcgtcggcacgttgttcttcctgccgctggcgctggccagcgccgacctgccgagccagcccagcgcgctggggatccaggcggtggtgtatctcggcgtggtggtcacggtgggcgcctacggcctgtacaacttcggcgtcggtcgactgccggccagccaggcctcgggattcatcaacctgatcccggtcttcaccctggtattcgccgcgctgttcctcggcgaaaccctcaacggcccgcagatgctcgctgccggcatggtcttcatcggcgtcgccatcagccagtggcgcagcgctccgccgccgcctcctgccggcgtcctgaactga

SEQ ID NO: 318405 - DNA, 348 bp, Pseudomonas aeruginosa
atgactggcgaacccctgagcctgtggctggaaatcatcgtctcggcgttcctcctgctgggcagcgccttcgtcctgatcggcgcgatcggcctgtaccgcctgccggacttcttcatgcgcctgcacgggccgaccaaggccaccaccctgggggtcggcggggtgatcgtcgcctcgctgatctatttctccaaccgccaggcgggcatcagcctgcacgaattgctgatcagcctgttcctcttcatcagcgccccggtcagtgcctacatgctggccaaggccgctgtgctgcagcagttgccgctagagaagaagactcgcggcaagccctgggagcagtga

SEQ ID NO: 318406 - DNA, 270 bp, Pseudomonas aeruginosa
atgctcgcttacgtgatcccgctgtgcctggcgctgctcggcctggccctgttgctgaccctggcgcgcctggtcaaggggccgtgcctgccggaccgggcgctggcgctggacaccctctacgtgaacgccatcgccctgctggtgctgtacggcatctggcgcgacagcgacctgttcttcgaggcggcgctgctgatcgcggtgctcggcttcgtcggtacggtggcggtggccaaatacatgctgcgcggagacatcatcgaatga

SEQ ID NO: 318407 - DNA, 525 bp, Pseudomonas aeruginosa
atgatcagccgctcgttgccgcgtccgcttcttcgcgtactgcctcatcccgtgcttagtgtcctgctgttgctggtctggttgctgctggtggattccttcgccattggccactggctgctcggcgccttcctcggcgtgtgcattccgctgctgaccaaccgcctgctggtcgggcgcagccaggagtggcatccgttgctgctgctgaagctgctggcgctggtgatgtgggacatcctcgtcgccaacatccaggttgcccgcctgaccctcggaccgatcgagcgcttgcgtccggccttcgtcgaggtgccgatcgagctggagaacgacctcgccatcagcgtgctggtgagcatcgtctcgctgaccccggggtcggtgtcgtcggacctcagcgacgaccgcaagaccttgctggtgcacggcctcgacgtgccggacaaggcggcgctgatcgccgagatcaagcaacgctacgaagcgccgctgaaggagatcttcccatgctcgcttacgtga

SEQ ID NO: 318408 - DNA, 1500 bp, Pseudomonas aeruginosa
atgagccattggctgatcctgccgatcctgctccccctgtttgccggcagcctgctgctgttgccgctggccgagcgctggcagcgcggcctgtcgttgctcgcggcgctggcactgatccccctgagcctactgctgatacgtacggccgccagcggcgacctgagcgtctatgccctgggcaactgggccgcgccgttcggcatcgtgctcatgctcgatcgtctcgccgccctgatgctgctggccaccgcggtgctcggcagcgccgcgctgatctacgcgctgcgtggcgaggaccgcctgggcaagcatttccacgcgttgttccagttccagctgctcggtatcaacggcgccttcctgaccggcgacctgttcaacctgttcgtgttcttcgagatactcctgatcgcctcctacgcgttgctcctgcatggcggcggcgcggagcgggtgcgctcgggcttgcactacgtgatcctaaacctggtcggctcggcgttcttcctgatcgccgtgggtaccctgtatggcctcaccggcaccctgaacatggccgacatggcgcagaagatcgccatggcagatgccgagcgcgcgccgctgctggcggcagccgggctcctgctgctggtggtgttcgccctgaaggcggcgctgttgccgctgtacttctggctgccgcgcgcctatgccgcggccagcgcgccggtggcggcgctgttcgcgatcatgaccaaggtcggcatctactcgatcctgcgggtctacacgctggtcttcggcgatgccgccggcgagctggccaacctggcgcaggcctggctctggccgctggccctggcgaccctcggcctgggcgcgatcggtgccttggcggcgcggaccctgcaaggcctgctggcctacctggtggtggtctccgccggaaccctcctggctggcgtggcgttgggcagcgagcgggcgctggcggcgtcgctgtactacctgctgcacagtacctggatcgccggtggcctgttcctgctcgccgacctggtcgcccgccagcgcggcgacaaggccggcgacctggtccagggcccggcgttgcagaatcctcggttgctcggcggggctttcttcatcggcgccatcgccgttgccggtctgccgccattgtcggggttcttcggcaaggtcatgcttttgcagtcggtcgctcccggcagccaggcgctggccctatggagcgtggtactgggcagcggcctggtggcgctggtggcgttgagccgggccggcagcacgctgttctggcgcaccgggcataccgtgctcggtagcgccgaactggaccacggccgcttgttcgcctgcatcctgttgctctccgccggcccgttgctggtgttcgccgcgaagccgctgctggcctacgtccaggccaccgcggcgcagttgcacgacctcgacctgtatcgccagatcatcacccgcggaggtgccgcatga

SEQ ID NO: 318409 - DNA, 339 bp, Pseudomonas aeruginosa
atggaagccctgttcgccatcaccctcggcctgctcaccgccagcggcgtctacctgctgctgcgggcgaggactttcccggtggtgctcggtctcacgctgatctcctacgcggtcaacctgttcctgttcgccatgggccggctcggcggcagcgtcgcggtgatcggcactcccggggagtatggtgatccgttgccgcaggcgctggtgctgaccgccatcgtcatcggcttcgccatgaccgcctttgtcgtggtcctggccctgcgtggcctcggtgacctcggcagcgaccacgtagatggacgcccggacgaggaggagccgcgcccatga

SEQ ID NO: 318410 - DNA, 2802 bp, Pseudomonas aeruginosa
atgattctggcgctgatcatcgcgctgccgttcatgggggcgttgttgcccctgcttgccgagcgtggcggccgcaccttgtgcgcggcgtccgccggcgtggcgccgctgatcggcctgatcctgttgctcgggcagcgcggcacggtgttcgccgggcagaccctgaccgccagctattcctggctgccggaaatcggcatcaacctcagcctgcgcctggacggcctcggtttcctcttcgccctgctgatcctcggcatcggcctgctggtgattctctacgcccgctactacctctccgaacaggagccgatggggcgtttcttcgctttcctgctgctgttcatgggctccatgctcggcgtggtgctcgcggaaaatctcttgctgatgatgctcttctgggagctgaccagcctgtcctcgttcctgctcatcggcttctggggcagccgttccgacgcccgcaagggtgcgaggatggccctgaccgttaccggagggggcggcctggcgctgctggccggggtgctgctgctcggccacatcgccggcagcttcgaactcaccgaggtcctcgcggctggcgagctgatccgcgcccacgccctgtatccgctggtgctgatactgatcctgctcggcgtgttcaccaagtcggcgcagtttcccttccatttctggctgccccacgcgatggcggcgccgaccccggtttccgcgtacctgcactcggcgaccatggtcaaggccggcgtattcctgctggcccggctgtatccggcgctggccggcaccgagtggttcttctacctggtcagcctgagcggcctggtgacgctgttgctgggggccggcatggcactgttccagcatgacctgaaggggctgctggcctactcgacgatcagccacctgggcctgatcaccctgctgttcggcctcgactccccgctgtcgaacgtcgccgcggtgttccacatcatcaaccacgcgaccttcaaggcctcgctgttcatggccgccgggatcatcgaccacgagaccggcagccgcgacatgcgcctgatcaacgggatgtggaagtacctgccgcataccgcggtgctggccatcgtcgcctccctggcgatggccggggtgccgctgctgaacggcttcctcagcaaggagatgttcttcggcgaaaccctcagccagaacctgctgggcagcttcaactggctggtgccggcggtggcgaccctggccggcgtgttctcggtggcctattcgctgcgtttcatccacgacgtgttcttcaacggcgagccggcccggttgccgaagttcccgccccacgagccgccgcgctacatgaaggtaccggtggagatcctggtgttcctctgcctgttggtcggcatgctgccggcctacaccgtggcgccgctgctggccgccgccgccagtgccagccttggcgggcaactgccggaatacagcctggcgatctggcacggtttcaacctgccattgctgatgagcgtggtggcgctggttggcggtgtgctggtctatgtcctgcgcaagccgctgttcaactggtacgccgggttaccggaggtggacgccaagctggtcttcgagcagcaggtgcaacgtgtggtggccctggccgcgcgcctgaccgcctggctggagaacgggtcgctgcagcgctacctggcctggctgctgggcgcggcgctggtcgtggtggcggtcgagctggcaccgctggcgaggctgaccggctcgcgcgggctgaccccgctggacggtatcaccgccctgggcatgctggtgctggccttcagcggcctggccacggcgctgttccatcgcatgcgcctggtcgcgctattgatcctcagcgtcgccggcctgctggtagccctggccttcgctcgcttctcggccccggacctggcgctgacccagttgtcggtggaagtggtgaccatggtcctgctgatgctagcgctgtatttcctgccctcgcgcactccggcggagtcctccagcctgcgcggcttgcgcgacgtggcgctggccggcggggtcggcatgctggtggcgctgctggcctacgcggtgctgacccggccctacgagagcatcgccggattcttcgtcgagaacagcgtctccgggggcggcggctacaacgtggtcaacgtcatcctggtggacttccgtggtttcgataccctcggcgagatcagcgtgctggcgatcgccggcgtcggcatctacgcgatgctcgccggtttcgccctgcacaagccgacctgcgacccgcagggtcgcaactgggcccacgccaagcacccgctgatcctggaaaccctgtcgcgggtgctgctgccgctggcgttgctgatctcggtgttcatcttcctgcgcggccacaacctgccgggcggaggtttcatcgccggcctggtgactgccatcgccctggtgctgcaatacatcgccagcggctcgcagtgggtcgagcagcgcctgccgctgaactatgcggccatggctggcgccggagtgctgatcgccgggctcaccgggctcggcagctggctgttcggctatccgttcctgacttccgcgttcggccacttcgagttgccgctgatcggcgagatcgagctggccacggcgatgctgttcgacctcggcgtgtacctcaccgtggtcggtgccgcgctgctgatcctgtcctacctcggcaagctcagcctgatgcctgaacccgtcgcacaagaggaggcgctctga

SEQ ID NO: 318411 - DNA, 465 bp, Pseudomonas aeruginosa
atgcgcaagtctgccttgatcgttgcttccttcaccgccatggccctggctcttggcggctgccaatccagcctcaccggcgatacctacagccgtgaggaagcccgtaccgtgcagactgtacgcatgggcaccatccaggccttgcgcccggtcaagatcgaaggcaccaagaccccgatcggttccatcgccggtgccggcgtcggcggtgtcgccggcagcgcggtgggcggcggcaagggcagctacgtcgcggccatcatcggcgcggtcgctggcggcctgctgggcgcggctaccgaagaaggcctgacgcgcacccagggcgtcgagatcaccgtgcgcgaagacgacggcagcacccgcgcctatgtccagcaggtcgaccagggccagatcttccgcgtcggcgagcgcgtgcgcatcctgaccgtcaacggcaccagccgcgtcgcccactga

SEQ ID NO: 318412 - DNA, 243 bp, Pseudomonas aeruginosa
atggactatttcatcatcgtcgtcaccaccgccgccggcctgtatttccactggtggatctactggcgcatccgccgctggatggaccgcgacctggcgctgtcattcgccggcgacgacccgcaaaagcgtgactatctgttacagcgactggccgaggccaaggccagcaaggtgaagcggcgcgacctgccggcctggctggagcgcgccgccgccgactacccttcccgcgaagcctga

SEQ ID NO: 318413 - DNA, 1146 bp, Pseudomonas aeruginosa
atgaaaatcgtgattgctcctgattcgttcaaggaaagcctgtccgcgcccgacgtcgccgaggctatcgcccgcggctggcggcgagtcttcccgcaggccgaggtgttgctgcggccactggcggacggcggcgaaggcacggtcgatgcggtactcgccgccaccgccggcgaacgtcgcgaatgccgtgtcgaaggcccgctcggtgagccgaccctggcgcactggggccggctggacgacgccaccgcagtgatcgaaatggcttccgccagcggcttgcacctggtcccgcgcgaccgccgcgacgccacgcgcagcagcagccgtggcactggcgagctgatccgtgcggcgctggacgccggggcgcggaagattatcctcggcctcggcggcagcgctaccaacgatgccggcgccggcctgctgggtgcgctcggcgtgcgtttcctggctgccgacggcgaggaactggcgcccggcggcgccgcgctggctggcctgcacagtctcgacctgggcgggctggatccgcgcctggtggatgtcgcggtggaagtcgccgcagacgtcgacaacccgctatgcgggccgcgcggcgcgtcggcggtgttcggtccgcagaagggcgccagcgccgaacaggtggcgcaactggatgccgccctggcgcacttcgccaaggtggtcgcggcgacccttggcgaggacttcagccgggtgccgggcgtcggcgccgccggcggcctgggtttcgccgcgagggcattcctccgcgcgcgtttccgcccaggcatcgaactggtggcggagctggccgggctggccgatgcgctggtcggtgccgacctggtgctgaccggcgagggccgtctggatgcgcagagcctgcacggcaagaccccggtgggcgtggcgcggatcgcgcgccaggccggcgttcccgtggtagccctggccggcagcctgggcgacggctaccagcgcctgcacgacgccggcatcgatgcggcgttcagcctggcgccgggaccgatcagcctggagcaggcctgtgccggagcggcggcggaactggaggcgcgcgccgagcagatcgcccggctctggcgcctggctcaggcttcgcgggaagggtag

SEQ ID NO: 318414 - DNA, 1359 bp, Pseudomonas aeruginosa
atgaccctggtcctgatcctgctggcgttgatcgcctttatcgtcctgtccaccacgcgactcaagctgcacccgttcctcgccctgctggcggccgcgctgatcgccggcttcgcctaccaggtacccacggcggaaatcgtcaagaccgttaccggcggcttcggcagcatcctcggctacatcggcatcgtcatcgtgctcggcaccatcatcggggtgatcctcgagcgcagcggtgcggcgatcaccatggcggaaagcgtgatccgcctgctcggcgaacgcttcccgaccctgaccatgtcgatcatcggctacctggtgtcgatcccggtgttctgcgattccggcttcgtcatcctcaactcgctgaagaacgccctggcggcgcggatgaagatatccaccatcgccatgagcgtggccctggccaccggtctctacgccacccacaccttcgtgccgccgaccccgggaccgatcgccgcggccggcaacctcggcctggacgccagccttggcctggtgatcgtggtcggtctggtggtcgccttcgtcaccgcgatggccggcatgtggtgggccaatcgcttcgtcggcaaggacattcccctggtcgacgacggccaggtcgtccagaccgaagaggacttcagcgagctgcgtgcccgctacggcaagctgcccagcgccacccaggcgttcgcgccgatcttcgtaccgatcctgttgatctgccttggctcggtcgcggtattcccgagcaagccgctgggcgagggcgtactgttcgcctgcctgaacttcctcggtcaaccggtgatcgccctgctggtcggcctggcgctggcctgcaccctgctcaagggccagagcaagcgcgaggaattccatgagcgcgtggtggaaggcatccagtcggccgcgccgatcctgctgatcaccggcgccggcggcgccttcggtgcgatgctgaagatcactccgctcggcgactacctgggcagcaccctgtcagcgttgggcatcggcctgttcatgccgttcgtggtggcggccgcgctgaagaccgcacagggctcgaccaccgtggcgctggtcaccacctcggcgctggtcgctccgctgctgccgcagctcggcctggacagcgagatgggccgggtgctgacggtcatggcgatcggtgccggagcgatgacggtgtcccacgccaatgacagcttcttctgggtggtcacacagttcagccgcatgaccgtatccactgcctatcgcgcccagaccctggcgaccctggtccagggtatcgccggtatgctcgcggtatggctgctcagccttgtgctgctctga

SEQ ID NO: 318415 - DNA, 1113 bp, Pseudomonas aeruginosa
atgttcgaactggattcgacgctggcgcagcacatcgtcgatcgggcgatggcgatcctgccgcacaacatcaatgtgatggatgcccagggcatgatcatcggcagcggcgatccatcgcgcctgcatacccgccacgaaggggcgcaactggtgctggccaaccggcgggtggtggaaatcgacgagcaggccgccgcctgcctgcgcggggtgcggccaggggtgaacctgccgttgctgcacgccgagcggctggtcggcgtgctcggcatcaccggcgcgccggaggtggtccggccctatgccgagctggtgcggatggcagcggaaatgctcatggaacagcgccagatgcaggacgagcgacactggcaacgccagcgtcacgaagcctggctgcgccagttgctcgatcccggccacggcctcggggcgctggcggccgatgccgaacacctggggctggccatgcactggccgcgccaggcggtcttcctggagctgcccgagcatgccgatccgctgccttgccaggctcgcctgctggcggcactcggcggccgggcggagcactggagcgcggcgctgggcgagcgcctggtgttctggtgccggccggtagcccacgcagatacgctcgagcactggctggagcgcgccgacgcgcgcggctggggcgtggcgcgcctgtgtgccggcgacccggcgcatgacctggccgagctgcgcgcctcggcctgcgccgcgcgcgacctgctggactatgcgcgcagccggttgcccggtcggcgggtcgtgaccctggacggacaccgcctcgccagcctgctgttcagccagcgcgacagttggcaggtgcggcagctgctggcgcccttgcagcggttgctcgaccacgatccgcaaggttcgctggccgctaccctggagtcctggtgcgcccatgacgggcacgcccaggcctgtgcccaggcgctggggatccatcgcaacagcctgcgctaccgactggagcgcatcgcttcgatcagcgggctcgatctcgctcgcctggagcaccgccagcaattgttgctggggctgcaattgctcgttccgcgccgcgggtaa

SEQ ID NO: 318416 - DNA, 648 bp, Pseudomonas aeruginosa
atgacccagtccctggccgatatgcgccgcgagtacacccgcgatggcctcagcgaggccaacgcccctagcgatcccttcagcctgttccgccagtggttcgacgacgcggtgaagaccgagcgcctgccggtcgaacccaacgccatgaccctggccaccgtcgacgccgacggctatccgcattgccgtatcctcctgctcaagggcctcgacgagcgcggcttcaccttcttcaccaactacgaaagcgccaagggccggcaactggcggccaatccgcgggcggccatgaccttcttctggccggcgctggagcgccaggtgcgcatcgaaggcagcgtcgagaaggtcactcccgaggaatccgacgcctactaccaggtgcgtccgctgggcagtcgcctgggcgcctgggcctcgccgcagagccgggtcatcgccgatcgcgccgagctggaacggctgctcgcggacaccgagcggcgtttcgccgaccagccgccgagctgtcccgagcactggggcggctaccgtctcctgccgcagcgcatcgagttctggcaggggcggccgagccgcctgcacgaccgtctcgactatcgacgccaggacggcggctggcggcgcgaacgcctggcgccctga

SEQ ID NO: 318417 - DNA, 882 bp, Pseudomonas aeruginosa
atgaaactgcttaagacctcgacgcttcttctctgcatgaccgcctccggctgcagctatttccagacccaggacgcttcctcgcagccagccaaggctccggccgagcaggcttccagccattcatggtggccgttcggcaaggacgacggacagaccgtcgccaagcaggccacggaacagaaggccgaagccgagcatgtcggctccagccactggtggtggccgttcggcaaggacgaaggcggtcgggacgtagccgccaaggctgcggagcagaaggccgagatcgccgcggcgaagaaagaagtcgccgccgcagccgagccgaaggccgccaacccctggtggtggccgttcggcgccagctcggcgagcaaggcgtcgggcaagccggcactggtccagcagaaggtcaccaaggagtggctggatgcccatgagaaagccctgcgcgaagcgatcgccggtagcgagtttaccctcgaacgccgcgacaacgcattgatcgtcatcgcccccgccgactactcgttcaatcccaagcgccacaccatgctgatgccgatcaccctcaacccgctgggcaaggtcgccaagatggcccaggccgatccgcagagcggtatcctggtactcggccataccgacagcaccggcagcaaggcggtcaacgacaagctgagcttcgagcgtgcccagtcggtggcggcgatcttccgcctcagcggcctgaaaggcgaccaattgcgcctgaagggggtcggttccgacatgccgcgcgcggacaacgccagcgccgccggccgcgcccagaaccgtcgcgtcgaagtgctctatacccagcgcgccagcctgctgtccctggcccagggcaactga

SEQ ID NO: 318418 - DNA, 1146 bp, Pseudomonas aeruginosa
atgacgccccaaggccactgtgacagccgtttcgccccgcttgccgaggccttcgcccggcttttcgacaatccgcaggagcgcggcgcggcgttgtgcctggaggtcggtggcgagacggtggtcgacctctggggcggcgtcgcggacaaggacggcgagcagccctggcagcgcgacaccatcctcaatctgttctcctgcaccaagaccttcaccgccgttgccgtgctgcaactggtggccgagggcaagctcgaactggacgcgccggtggcacactactggcccgagttcgccgcggccggcaaggcagcgatcagcgtgcgccagttgctctgccatcgcgccggcctgccggcgctgcgcgagcagatgccgcccgaggcactctacgactggcaggcgatgaccacggcactggccgccgaggagccctggtggacgcctggcgaagcgcacggctatgcaccgattacctatggctggctgctcggcgaggtgatccgccgggtcgacggccgcgagccgggcgaggccatcgtggcgcgcaccgcggcaccgctgggcctggatttccatgtcggcctggacgacagccagttcggccgcgtcgcccacatggcacggagcaagggcagcctcggcgacgctgccgcccagcgcatgctgaagaccatgatgagcgagccattggcgctgaccacccgtgccttcaccaatccgccgtcgatcctcaccagcaccaacaagccggaatggcgacgcatgcagcagccggccgccaatggccatggcaacgcgcgcgcgctcgccggcttctatagcggcctgttgcagggacgtttgctggaagatgaactgctgggccagttggcccacgaacacgcggtaggcgaggatcggaccttgctgacccggacccgcttcggcctcggcaccatgctcgaccaaccgggcgtggccaatgcgacctacggactcggccccaaggccttcggccaccctggggcgggtggctcgatcggcttcgccgatcccgagcgcgacctggctttttcctttgtcagcaacgccttggggccgtatgtgctgatggatccgcgggcgcagcagctggcgcgtgtcgcgggggagtgtctgtaa

SEQ ID NO: 318419 - DNA, 2250 bp, Pseudomonas aeruginosa
atgatccgttcgcgttggcatcttcccctgcttctcggcctgctcgcggtggccgcgccgctggcggcgaacgacacccagcaggtgctgttcaacttcgtcaagccgatggccgtggtcggcatcaccctggaggatgccgacctgcccagcgtgacggcggaggccaccccggagggcgacattctccgtcgcgtcaccttcagcccggcgcaacggcccaccttgcgcatgagtccggcgcagggccgttgggactggtccgcagcggactacgtgagcctgcgcatccagaacgccatgagctgggacatgaccctggaggtcgcgatcgagggcgagcagggtgcgccggggttgcaggcatccatcgagcttccggcaggcccgccgcagaccctgctggtgccgttgcgggcggtttcgccagaggctctgggcatgcgtgcggggccgccgatgccgcagatggtcgaaggccagcgggtgctgctggcgccacgcgtggagggctcgctggaccgtgccagggtcggggcgctgagcctgtccctgcgctcgtcgcaagctccccagagcatcctgctcggacgtttcggcatacgcgcagggagagcggtggagcggagcatcctgaccggcctgatcgatcgctatggccagtacagccgcgccgactggccggaaaagattcgttccgacgaacagttgcgcagcgcctatgcggccgaggccgcacagctccgcgactgggaacggcagacaccggcgcgcgaccgtttcggcggcctgctgggtgggccggtgttcgaagccagcggtttcttccgcacggaaaaacgtggcgggcgctggtggctggttactccggaaggacatccgttctggtcgctgggcgttaatgcggtgaccgccgacggcagccggacctacgtcgagggacgcgagccgatgttcgccgaactgccggcggagggtgagccgctggccgcattcttcggtgagggcgacgaccgccgcggcgtcgccgcgcaggccgggcggcgcttcgggcatggccgctggttcgatttcctcggtgccaatcgccagcgcatcgctccccaggcgagcgccgaccagctcgccggcgaatggcgccagcgcaccctggagcgcctctcggcatggggtttcaacagcctcggcaactggagcgatccggcgctcgccgcacaggcgcggatgccctacagcctgccgctgtcgatcgccggcgactacgccacggtcagcagcggtttcgactggtggggagccatgcccgatcccttcgacccgcgcttcgccatggccgccgagcgcgtcatcgccatcgctgctcgcgaccaccgcgacgatccctggctgctcggctactacgccgacaacgaactggcctgggccgggcgcgacggctcggcccagacgcgctacggcctcgctttcggagccttgacgctgtccatggacagtccggcgaagcgcgccttcgtcaagcaattgaaagccaagtacctgggccatgaggcattggccgaggcctggggcatcgagctggccgcctgggaggccctggaggcgccgggctacgcggctccgctgccgggcgaggggcatccggccatcgccgaggactacagcgccttcctccggctgtatgccgacgcttacttcaagaccctgcgcgacgccctgcaatggcacgcaccgaaccacctcctgctcggcggccgcttcgccgtcagcactcccgaggcgatcacctcctgcgcccggtattgcgacctgctcagtttcaacctctatacgccgttgcccgggcagggcctggacgactccctgctggcgcggctggacaagccggtgctgaccagcgagttccacttcggctcgcgggatcgcggtccgttctggggtggtgtcagcgaggcggccaatgagcgggcgcgcggcgactcctaccgaacgttcctggaggcggcgctgaagagtccgtatatcgtcggcgcccactggttccagtacctcgaccaaccggccagcgggcgtctgctggacggcgagaacggccatatcggcctggtcgggatcatgggcttgccgttcgccggcttcgtcgacacggtgcgccgaagcaaccttgccgccctgtcgcgactgtcggcgatggccaggtccatgcctgccgtcgagcctctgccgccgcgcgaggattcagccggttcatga

SEQ ID NO: 318420 - DNA, 2145 bp, Pseudomonas aeruginosa
atgctcagcgccgaactcaagtcccagatccagggtgcctacacccgctttctcgaagccaaggagctgaagcctcgctatggccagcgcctgatgatcgccgaagtggccaaggccctcggcgcgatcaaggaggacgaggaggggcaccgcgagggcgagccggcggtggtcgcggtggaggccggaaccggtaccggcaagaccgtggcctacagcctggcggcgatcgcctgcgccaaggccagtggcaagcgcctggtgatagccaccgcgaccgtcgccctgcaggagcagatcgtccacaaggatcttcccgacctgctgcgcaacagcgggctggccttcagcttcgccctggccaagggccgcgggcgctacctgtgcctgtccaagctcgacgtgctgctgcaggaaggccaggcgcagagcgcgacggcgcaactgttcgccgacgacggtttctacatcgatgtcgacgagaccagcagcaagctgttcaaccagatgatcgaacgcctggccggcaaccgctgggacggcgaccgcgacagctggccggaggcgatcgacgacgcgcattgggcgcagctcaccaccgatcacagccagtgcaccaaccgacattgcccgaacttccagcagtgcgccttctacaaggcgcgcgaagggatgaccaaggtcgacgtgatcgtcaccaaccacgacctggtcctggctgacctggccctgggcggcggcgccatcctgcccgatccgcgcgagaccctctacgtgttcgacgagggccatcacctgccggacaaggcgattggccatttcgcccatttcacccgcctgcgcgctaccgccgactggctggagcagatcgccaagaacctcaccaagctgctcgcccagcacccgctgccgggcgacctcggccgcctgatcgaacaggtgccggagctggcccgggagatcaagacccagcagcagttcatgttcaccgcctgcgaagagatcggcgatttccgcgccggcgaggacatggaaggtcgcgagcggccgcgtcaccgtttcgtcggcggggtggtccccgagcatatccgcgagatgggcatcgagctgaagaaaggcttctccaagctgaccgacctgttcacccgcctcaccgatatcctcaaggaggcgatggacggcgaaggcgccggcggcatcgccagccaccaggcggaggagtggtacccgctgttcggtagtcttttggcgcgcgcccagggcaactgggaactgtggaccgccttcacctgcgaggacccgcaggacagcccgccgatggcgcgctggctgaccctcgccgagagcggcagcttctacgacatcgaagccaacgccagcccgatcctcgccgccgagaccctgcgccgcaacctgtggaacgtcgcctatggcgtgctggtgacctcggcgaccctgaccgcgttgggcaccttcgaccgctaccgcatgcgcgcgggcctgccgcgcaacgcggtcaccgcggtggtgccgagccccttccaccatgccgaggccggggtattgcgggttcccgacctcaaggcggatccgcgcaacgccgccgagcacaccgcggcgatcattcgcgagctgccggaactggtgaagggcgcgcgcggcagcctggtgctgttctcctcgcgcaagcagatgcaggaagtcttcgacggtctcgaccgcgactggcgcaagcgggtgttcatccagggcaacctgtccaagcaggaaaccctgaacaagcacaagtcgcgagtcgacgacggcgaggacagcgtgctcttcggcctcgccagtttcgccgaaggcgtggacctgccgggggcctattgcgaacacgtggtgatcgccaagattcccttcgcggtacccgacgacccggtggaggcggcgctggccgagtggatcgaggcgcgcggcggcaatccgttcatggagatcgccgtgccagacgcctcgctgcggttggtccaggcctgcgggcggctgctgcgcaccgagcaggaccgcggcaccatcaccctgctggatcgccgcgtggtcacccagcgctacggcaaggctatcctcaatgcattgccgccgttccggcgggaaatcgcctga

SEQ ID NO: 318421 - DNA, 465 bp, Pseudomonas aeruginosa
atgaccccctacgccctcgtctacgccctgcatgtcctggccgccctggtctgggtcggaggcatgttcttcgcctggacgattcttcgtccggcggccgtcgccgcgctggaggccccagcccgcctgggcctgtggctggaggtgttccgccgtttcttccattgggtctgggctgcggtgatcctgctgccgatcagcggcgtcggcatgctgcacctgagcttcaacggtttcgccggcgcgccgcgctacgtacaggtaatgatggggctctacgtcgccatgctggcactgttcctgcgggtgcaggcgctgcaagtgccggaactgcgccgcgcggtgcaggcccaggactggccggcaggcgggcaggcgctggggaagatccgccgcaccgtcggcttcaacctgctcctcggcctgttgctgatagccctggtagcggcacgcccgagcctctga

SEQ ID NO: 318422 - DNA, 810 bp, Pseudomonas aeruginosa
atgcgtaaggccatgctcggattgttcctggtcgttcccctggcctgggctggcgccgcgttttcggccgaggcgccgacggcacgccagcagggtatcggcggaaccgtgaaggttcaggcgaactcggtgatgcgcctgcccaagcgggcccaggagctgcgcctgcgcagagtggagatcggcgaggatgccgccctgctgattccgctggaggtcagcgtcttgcgcatcgaggaactgcacatggcgaagaacgcccggatcggcgtggcgccgggcgaagagcgaatcagcatcgaagtcgtcagcggccgcctggccgatggcagcatcatttccgcgcccggcgcgaccggcaccttccggcaaagcgccggtaacggccgcgacctgaccttgcgcctgcaggcggtggaggtggaaagcctgctgctggacgcccgcggtggcgtcggcgcgccaggctacgatggcctggacggggcttccggcaaggcctccggctgcctctggggcagcgcgctgaaaggtggcgacggccaatccggaagcgacggcggtccgggcggggcgggcggtcggattcgtctggaagtgccgggcgattttcctctggagcgcttgcaaacccgtctgcaaggcggcgtcggcggcgccggaggcaaggccggcaaaccgggtgcggcggataacgacaccggttgctggatctactcggtggatgccggtcgtgcggggcgcagcggagaggacggcgcgaacggcaccaacggcagcgacggcagcctggacgtcgtgcgcttctga

SEQ ID NO: 318423 - DNA, 300 bp, Pseudomonas aeruginosa
atgaaagcgtttctcgggctgggcaagctcgtgaccctggtgttctggggcgcggtgctggtcaatctgctgcatccgttcgcctatccgctgaactggctgttgtcgatagccggcggcctgatcctgttgatccacctgatcgagattctcgtcctcggacgacgcctgaaagcgcgtgcgcatccctggctggaccgtctccaggtcttgctgttcggggtcttccacatgcttgcgttgccggcgctgagcccggccagcgagttgccgcaggacaaggaggacgatcatgcgtaa

SEQ ID NO: 318424 - DNA, 633 bp, Pseudomonas aeruginosa
atgagcatcacgaggaccgctttacccctgattctggtcagcggcttgctgaccggttgcgcagggttgcagaaaagcgactggccgacctgtgcggcggtcggtggtgttaccggcgccggcctgggcgcgatcgaaagcagcagctgggccggctggggcgccctgatcggcggtggcgtcggtgccgcctattgctgggtgcacggtgccggcgaacaggtcgcgccgccgcctccgcagccggtcgaggaagtcgcgccgccgcctcctgtcgtcaaggaagaaaccattgtcgtgcgcgacctgcacttcgccttcgattcgtcgaaggtggacgccgccgacagcgagaagctcaacggcatcgccgaacgcctgaaaggcgaggcggccagtacgcgcctgagtatcaccgggcataccgacagcgtcggttccgatgcctacaaccagaagctgtcggaacggcgcgcgaatgccgtggcgaactatctgatcgatgccggggtgccttcgagcatcatcgtcggcgtgcagggattgggcgaaagccagccggtcgccgacaacaagactcgcgaagggcgggccgagaatcgccgggtggaaatcctcatcaagcgcgaatga

SEQ ID NO: 318425 - DNA, 498 bp, Pseudomonas aeruginosa
atgagcgaaccgatttctccccgcaccccgcagcaggccctggccgcgttgctcgcccgctacgcgccgaagcgcttgctgctggtcggcgccagccggctgccggcggtggaggccttcatccacaaccatccccagtgccaactggcgcacagcccggcggcggcattgcccgccgaactggccggccagcgcttcgacctggcgctgttcgtcgattgcctggaacacctgccgcagcgcaccggtctgcagttgctcgcgggcgtgcgcaacctgaacgccagccgggtcgccgtactggtcgacctcgaggccagcgactggcaggaaaccgacttcttcgccctcgccatgcagaacagcgaacgcttccagcgcgaaggccagacgctgaccctgtacacctacgacctgtatgaatacaagcaggtccccgattggctgaacgccaagttctgggccaacccggaaaacttcggcaagtactggtggtaa

SEQ ID NO: 318426 - DNA, 474 bp, Pseudomonas aeruginosa
atgacccaaccctcctgcccctgcggcagcggcgacccgctcgacgattgctgcggccgctatcaccagggacatcccgcgcccaccgcggaagccctgatgcgctcgcgctacagcgcctatgctctcggactggtggactacctgcgcgacaccacgctgccggcgcaacaggccggcctcgatctcgacggcatccgcgcctggagccacggcagcacctggctcggcctggaggtggaaaaccacgaggtgctcggcggccagccggagcatgcgcgagtcaccttcgtcgcgcgctggcacgacgccgagggggaacatgcccatcgcgaatgttccggcttcgtccagcgcaacggtcgctggtacttcctcgatccgaccgtggccctgaaactcggccgcaacgacccctgcccctgcggcgccggcggcaagctgaagaaatgctgcggtccatggatcacctga

SEQ ID NO: 318427 - DNA, 318 bp, Pseudomonas aeruginosa
atgcattcgctcgccagctatatccgcgccatccatgccctgccctcgccagtctcgataagcgatgcgcaggtcgaagagcaacagcgctgcgaggacggcgtcgagatccacagctgcgaagcgctctaccgtttcgacaacggcgtgcgcctgcgccagcactgcgagcgcgacctcctgccaagcagcggggcctgcgaggaatgctggatcggctacgaagtgctggattccgccgggcgggaaatcagcccacgctacaagcacttcgtcaacgcctgccaggaacgcttctggttgcgcatgcacgcctga

SEQ ID NO: 318428 - DNA, 621 bp, Pseudomonas aeruginosa
atgctgctgaccgtgctctacatcatcgccatcaccgccgaagccatgaccggcgcgctgtcggccggccggcgcagcatggacctgttcggcgtggtgctgatcgcctgcgtcaccgccctgggcggcggctcggtacgcgacatgctgctgggccattacccgctgacctgggtccgtcacccggaatacctggcgctgaccgcagtcgccgcgctggtcacggtgttcatcgcgccgctgatgcgccacctgcgctcgctgttcctggtactcgacgcggtcggcctggtggccttcaccctgatcggctgccaggtcagcctggaaatgggccacagcctgctgatcgcggcgatcagcggggtgatcaccggggtgttcggcggcattctccgcgacatcctgtgcaacgacgtacccttgatcttccgccgcgaactctatgccagcgtgtccttcgccagcgcctggtgctacctgatctgcgtggagctggaactgccctccgagcaggcgatgctgatcaccctgttcagcggcttcctgttccgcctgctggccatccgcttccactgggaaatgcccaagttcgtctaccaggacgatttcgaccactga

SEQ ID NO: 318429 - DNA, 561 bp, Pseudomonas aeruginosa
atgagccgctttgaaatcgccttttccggccagttggtcgccggcgcccggcccgaggtggtcaaggccaacctggccaagctgttccaggccgacgcgcagcgtatcgagctgctgttctccggccgccgggtggtgatcaagaacaacctcgatgccgcctccgcggaaaaataccgcagcgtgctggagcgagcgggagcgatcgccgtggtcgccgagatggagatcgaggaagtggtcatggcgccgccgcctgcgcagcaggccgccgtggaagccccacaggcccgcgtcgctgcgcgggacagcgcgccctccgggcgtttgcaggtagcgccgcgggacggctacatggcggcgttcgccgaggtcgatgcgccggatttcggcctggctccggtaggcgccgacctacaggacgccaaggccgaagccgaggcgccgaaactcgacctgagccgcttcagcgtcgccccggtcggtagcgacatgggccaggcacgctccgagccagcggctccggctccggacaccagccacctgcgcctgcaggactga

SEQ ID NO: 318430 - DNA, 495 bp, Pseudomonas aeruginosa
atgaattaccaggcgcaaatgataagaattatcagcctaataatggcgtggggagttctctccaatctctcgggctgcagctggatgaccggcagcttcgaagaccccgacgtcaagctgctgaaggtggaagtggtcaaggcacgcttgctggaacaggagttcgtgatgcgcttccgcatcgacaaccccaacgatttcagcctgccggtacgcggcctgcagtacgccgtgcaactgaacgacatccagctcgcagaaggcgagtccggccagtggttcacggttcccgcccacggccacgaggtattcgacgtaccggtgcgaaccaatctctggcgccacatgaaatacatcgtcaagctcctcgagcgtcccgaggagccgatccgctaccgcctgcagggcgaagtgaagaccggactgatgttcggccgcagcgtgcacctgagacgaaatggcgagataattcccggcgatttcatcccagaatag

SEQ ID NO: 318431 - DNA, 201 bp, Pseudomonas aeruginosa
atgagtcaggaaccccacgtacacggcccgaactgcaaccacgaccacgatcatcatcacgatcatggccatggtcatgtccatggtccgcactgcaaccacagccacgagccggtgcgcaatccgctcaaggccgtaggccgcaacgatccctgcccctgcggcagcgagaagaaattcaagaagtgccacggcgcctga

SEQ ID NO: 318432 - DNA, 642 bp, Pseudomonas aeruginosa
atgatcgacctgtactactggaccaccccgaacggccacaagattactcttttcctggaagaaaccggcctgccctacgccatccatccgatcaacatcagccagggcgaccagttccaggcggatttcctgaaggtgtcgccgaacaacaagattcccgccatcgtcgatcgccaaccggccgacggcggcgctcccctgtcgctgttcgagtccggcgccatcctgctctatctcgcggaaaagaccggacgcttcctcgccaaggacctgcgcgcgcgccaggaaaccctgcagtggctgttctggcagatgggcgggctggggccgatggccgggcagaaccaccatttcaaccgcttcgccccggagaagattccctacgccatcgaccggtacgtcaaggaaaccgcgcgcctgtacggcgttctcgaccagcgcctggcggaccgcgccttcgtcgccggcgacgactacagcatcgccgacatggccatctatccgtggatcgtcccgcaccagtggcaggagcaggatctcgccgacttcccgcacctacagcgctggttcgagagcattcgccagcgtccggcgacgcaacgcgcctatgctttggtggagcgcatcaatccgccgaagtag

SEQ ID NO: 318433 - DNA, 2544 bp, Pseudomonas aeruginosa
atggcctcgccagccttcatgcgttttcttccccgttgcggcgccgccgcggccttcggcaccctcctgggcctggccggttgccagtcctggctcgacgatcgctacgccgacagcctgccgccgacctccggcgtacaaccgatcaagggcctggcgcaaaacgtatcgatccggcgcaacgcgctgggcatgccactgatcgaaaccggcaccttccatgacgctctgttcgccctgggctacgtacacgcctccgaccgcttgagccagatggtcagcctgcgcctgctggcccagggacggctggccgagatggtcggccccggcgcgctggagatcgaccgtttcatgcgtaccgtgaacctgcgccaggctgcggagatccagtacaggaacgcctcgccgcgcctgcaacgcttcttcgaggtctacgcgcgcggggtcaacgcctacctgtatcgctatcgcgacaagctgccgatggacctggcccagtccggctaccgtccggaatactggaagcccgaggactcggcgctggtcttcgccctgctcaacttcggcctggcggtgaacctgcaggaagaaatcgcctcgctgacgctcgcgcagaaggtcggcagcgacaagctggcctggctgacgccgacctatcccgacgaaaacctgccgttcgacgaggcggaaaagctcaagggcctgcgcctggacgggcaggttcccggcctcgcgggcgtcgagggcgcggcgcggcaggtcgcagcgctgagcatgctcggggtcgccgcctcgaacaactgggctatcgcgccgcaacgcagccgcagcggcaagagcctgatggccaacgacacccacctgccgctgagcatgccgtcggtgtggaactacgtgcagatccgctcgcccaagtaccaggccgcgggcgtttccatcgccggtctgccgggcgtggtggcgggcttcaacggcaagctggcctggggcatgaccatggtcctgggcgacaaccaggatctctacctggaacagctgcgacgccagggcaaccggctctattacctggccgacggcaagtggcagccaacccgcgaacgccaggaaaccttcttcatcaagggccagcggccgatccgcgaggtcatccacgaaacccgccatggcccgctgctcaacagcgccctgggcgagcgcaagaacatcctccagccgctgccgctgaagagcggctacggactggcctaccggagcatccagcaggaagccgacaagaccctggacggcttcttcgacctgtcgcgggcgaagaccatcgagcaggccttcgacgccacccgcgagattcgcgcgatgccgctgaacatcgtgttcgccgacgaaaagcacatcggctggcaggtcaccggacgctatccgaaccgcaaggaaggtcgtggcctgctgccctcccctggctgggacggccgctacgactgggatggctatgccgacccgatcctccacccgtccgaccaggacccgcagcagggctggctgggtaccgccaaccaccgcaccgtgcagcccggctacggcgcccagttgtccaactcctggtactacccggagcgcgccgagcgcatcgcccagctcgccggtgccagcaagagccacgacacccagagcatgatccgcatgcagtacgaccagacctcgctgttcgtcgccaagctgcaagccatgttcgacaatcccggcatgtcgctgccgctgcgccaggccatcgacgccttgccggaggcgcaacgcagccgggcgcgggaggcctacgaccggcttatggcattcgacggcaagctgacagccagctccagcgacgccgcgctgtacggcgccttcctccacgagagcgccaggcagatattcctcgacgagctaggaccggaggacggccctgcctggaaagccttcgtcgagaccgccaacctctcctactcggcgcaagccgaccacctgctcgggcgcgacgacagtccgttctgggacgatacccgcactccgcagaaggaggacaagccggcaatcctcgcgcgcagcctcgccgccgccgtggagttctgcgaacagcgactggggagcgagcgcaaggcctggcaatggggcaagctgcacacctacgaatggcagagcgacagctcgaaaatggccccctacctgggcgccggcgagcgcgccggactcggcgcgatcaagggctatctcgatcgcgggccctatccggccggcggcgaccacaccacgctggacgtatcggcctacggctggggccaggacttcgacacttggctgatcccggcgatgcggctgatcgtcgacttcggccagagcgaaccgatgatcggcgtgaacagcagcggccaatccggcaatccggccagcccgcactacgccgacggtatcgacgcctggctcaaggggcgctacgtcagcttcccgttccagccacagaacctcgatcgcgtttacggcaacaagcggctgacgctcactcccgctcgctga

SEQ ID NO: 318434 - DNA, 1476 bp, Pseudomonas aeruginosa
atgcccgtcgatctaccgaacctgttgcttggcctgctggctgccgcgattcccctggccggcctggcatggcagctacagagaagggccagcctggcggagcgcgagatggcgttgctcggcgagcgactggcgaccgcgcaactggcccaggacgggctgaatgcgcagttggagaccagtagggaggcttaccagcaactcggcgagcgccatgccaggctctccggcgaggtcgccgcgctgcgtcgggaagccgagttgatgggggaggagcggcaacgggcgtcccaggcggaggcacgttgggccagcgagcgccagggctgggaagaggaagtgcgtcgcctggcttccgaacgggctgcgctggctgcggaacttcgcgagcagcaggaaagccaccagcagcgcctgaccgacctgcagtcggcccgcgacgagttgcgggcacagttcgccgaactggcgggaaagatcttcgacgagcgcgaacagcgtttcgccgagaccagccagcagcgcctggggcagatgctcgatccactgaaggagcgcatccaggcgttcgagaagcgggtggaggaaagctaccagcaggaagcgcgcgagcgtttctccctgagcaaggaactggagcgtctgcagcagctcaacctgcgcctgggtgaggaagcgaccaacctgacccgcgcgctcaagggccagaagacccagggcaactggggcgaactggtgctggagcgggtgctcgagcatgcaggcctggaaaaaggccgggaatacgagacccaggtcagcctgaagggcgccgagggcgaacgcttccagccggacgtgctgatccgcctgcccggcgacaagcaggtggtggtggatgccaaggtcagtctcacggcctaccagcagtacatcgccgctgacgacgatctgctgcgccagcaggcgctgaagcagcacgtaacgtcgttgcgcaaccatgtgaaaggcctctccggcaaggactatcgacgcctggaaggattgcacagcctcgacttcgtcctgctgttcatgccgatcgaggcggctttctcgacggccctgcaggccgagccgaacctgttccaggacgccttcgcgcagaatatcgtgatcgtcagcccgaccaccctgctggccaccctgcgggtaatcgacagcctctggcgccaggagcggcagaaccagaatgcgcgggaaatcgccgaacgtgccggttcgctgtatgacaagttcgtgctcttcgtccaggacctcgatgaggttggttcgcgcctgcagcaactggacaaggcctatgccgcggcgcgcaacaagctcaccgagggacgtggcaacctgatcagtcgcagcgagcaactcaagctgctcggtgcccgcgccagcaagaacctgccgacggactggctggaccgggcgctggtggcgcccgtggaagagaccggagatgagtga

SEQ ID NO: 318435 - DNA, 756 bp, Pseudomonas aeruginosa
gtgagcgagatctggcgacagtgcaagggtgagcggcatatccgaccgctccaggggcgcctggtgcggttggtggagagccaggagcaggtggcgaccctgcaattggtcgacaccctggaagagcaggcgttgctcgaggaactgctcgagtcgagcaagccgccggtgccggcggatgccgagccattgcattacctgttgaagaccccgttccgttatccgcccttgcgctgggggtcgcggtttggccgtcgccacgagccaagcctgttctacgccgcgttgaagctggaaacggccatggccgaaagcgcgtattaccgttgcgtcctgtggagtggcatggcggtgccgccaccgagcgggaggattctgtccgagcacgcttcgttcgaggcgggctggaaggtggagcggggaatccgtctgcaggcgccgcctttctccgatcacgaggctgcgctgaccgacatcgccgactaccgcgctccccaggaactgggaagtgccatgcgcagcgccggggtgcaggcattcgaataccgttcggcgcgttgcccggagcgcggctgcaatgtcgccctgttcacgcccgcggccttcaccgaaaagcgtcctcgcaacctgacgccctggctgtgcgaaaccacggccggttacgtggccttcaagccggcgcatgtgccggggtcgccgaaaatcttctcctgggagctgttcctggtggacggaaagttgccgcatccggcgtga

SEQ ID NO: 318436 - DNA, 369 bp, Pseudomonas aeruginosa
atgagcgctctcatcaaggaacgtcccagcgccgatgccgtcctggccaaggccgtcctggccgcgcgcgagcaattggggctgacgcagctcgaactggccggcatcgtcggcgtcgatcgcagcgccatcagccgctggaagacccagggcctgcgggtggacagcaagaccggcgagctggctctgctgctggtgcgagtctatcgcgcactgtatgccctgttcggcgggcagcaggaggacatgcgccacttcctgcgcactcccaaccatcacctggcgggcgagccgctggcactgatgggacaggtgcagggcctggttcatgtgctggaatacctcgatgcgatccgcggcaaggtctga

SEQ ID NO: 318437 - DNA, 1287 bp, Pseudomonas aeruginosa
atgggcggtttgcagcaacggtgtctgtgggaagtggttacgcctcgcctgtccggagcggcgagcctgaacggcgagcagcgcgccgacgtatgtgtgatcggcgccggtttcaccgggctttcggcggcgctccacctgctggaggccggccgttcggtgtgcgtgctggaagcgtacgaggtcggccacggcgggtcgggacgtaatgtcggattgatcaacgccggcacctggattcccccggacgaggtggtcgccaccctcggcgccgagcagggagaaaagctcaacgccgtgctggggcgggcgccggcgctggtgatggagaccatcgaacgcctcggcatcgattgccagttgcgccgcgagggcaccctgcacatgtcgcacaacgccagcggcgtggccgatctgcaacgccgtcacgcgcagtggacgcgccgcggcgctccgctggagttgctgaccggcgcggcttgccacgaggcctgcggcacccggcgaatcagcgcggcgttgctcgaccgacgcgccggcactctcaatcccatggcctattcgcgtggactggctaccgccgtcgtacagctgggtgggcaactgtaccagcgctcgccggtgctcgccctggagcggcagggcgcgctgtgggcggtgcgcagcgccgcgggggcggtactggcggaacaggtggtgatcgcctccaacgcctataccgagggcgagtggaccaacctgaggcggcacttctttcccggctactactaccaggtggcttcggcgccgctgcacggcgccgcggccgagcgcatcctgcctcacggccagggttcctgggataccaggacggtgctcagcagcattcgtcgcgatgcccagggtcgcctgttgctgggaagcctcggcaatggcgcgaacaagcccgcctggttcctgcggcaatgggccgatcgaatccagagccattactttcccgacctgggccaggtcaactgggagtacagctggacgggttgcatcgccttcacccccgatcatctgatgcgcctgttcgagcctgcggaaggcttgctggcggtgaccggctacaacggacgcggcgtgaccaccggtacggtagtgggcaaggcgttcgccgactacttgctgagcggcgagcgagcgacattgccgttgccgttcagtgacatgaagcccgtccccgcggccaggctgcgcagttgcgcctacgagatgggtttttctctctatcacgccggtcaatgcttgcgcgtggttctctag

SEQ ID NO: 318438 - DNA, 318 bp, Pseudomonas aeruginosa
gtggtcggctaccgcgatttcgacgaggccctgcgcctgaacaacgaggttccccagggactgtcgtcgtgcatcttcaccaccgacctgcgcgaggcggaactgttccagggcgcggcgggcagtgactgcgggatcgccaacgtcaacatcggcaccagcggggcggaaatcggcggggcgttcggcggcgagaaagagaccggcggcggccgcgagtccggctcggacgcctggaaggcctacatgcgacggcagaccaacaccgtcaactattcccgcgagctgccgctggcacagggcatcaccttcgattga

SEQ ID NO: 318439 - DNA, 1215 bp, Pseudomonas aeruginosa
atgatcgacggattgctgcgcagtctcggcctcgaccccaatgcctttcgcgatggcgagcttgccgtgcatacccccatcgacggcagtcgcctggctgcggtgcgactggaggggcgcgccgccgttgccgccaaggtcgagcgcgccgaacaggcgttccgcgcctggcgccaggtgccggcgccgcgccgtggtgaactggtgcggctgttcggcgaggaattgcgtcggcacaaggccgaactcggcgaactggtgtcctgggaggcgggcaagatcacccaggaaggcctcggcgaagtccaggaaatgatcgatatctgcgacttcgcggtgggcctctcgcgccagttgtacggtcttaccatcgcatccgagcgtcccggccaccacatgcgcgagacctggcacccgctgggcgtggtaggcgtgatcagcgcgttcaacttcccagtcgcggtgtggtcgtggaataccgcgctggcgctggtctgcggtaattccgtggtctggaagccttcggagaagacccccctcaccgcgctggcctgccaggcactgttcgagcgtgccgcgcgggccttcggcggcgatgcgccggcgcacctgagccaattgctgatcggcgaccgcgaggccggcgaagcgctggtggacgaccgtcgcgtcgccctggtcagcgccaccggcagcactcgcatggggcgcgaagtggcgccgcgggtggcggcgcgtttcgctcgctgcatcctcgaactgggcggcaacaacgcgatgatcctggcgccaagcgccgacctcgacctggcggtgcgcggcatcctgttcggcgcggtgggcaccgccgggcagcgctgcaccaccttgcgccggttgattgcccatgagtcggtgaaggacgagatagtcgagcgcctcaaggcagcctattccagggtccgtatcggtcatccgctggagggcaacctagtcgggccgctgatcgacgaacgcagctacctggccatgcaggacgccctggcgcgagcccgcgagcaggggggcgggtgttcggcggcgagcggcaattgcaggagcgctatccggatgcctactacgtgtcgcctgccatcgtcgagatgccgggacagaccgaagtggtgcgcacggagaccttcgcaccgatcctgtacgtggtcggctaccgcgatttcgacgaggccctgcgcctga

SEQ ID NO: 318440 - DNA, 477 bp, Pseudomonas aeruginosa
atggacaagaaaaagctgttgcgcctgatcacggaaaagctcgccgcggacctggaagtcgccgtccgcgccgcgcagaccgcccatgagacggcaacccacgaagagaacgtcgccgagaacaagtacgacaccctcggcctggaagcggcctacctggccgccgggcagtcgcgccgggtcgaggagatccgccaggcgctgggcctgtaccgcaacctggtgctgcgcgatttcgacgaggaacagggcatccagctcaccgcgctggtcaccctgctgaacgccgacggcagccggcgaacagtgttcctcggccccgaggcggccgggctgaagatcgattgcgaaggtcgcgaggtgttggtcatcacgcctcgctcgccactgggccagagcctggtcggcaggcacccgggcgacgagaccggggcgaaggactccccccttgcggtggaaatcctcgccgtcgactga

SEQ ID NO: 318441 - DNA, 1251 bp, Pseudomonas aeruginosa
atgaaaattcttcccgttccgatgctggccgcggggctggcgttgctgccgtcgttcgcccaggcggagtttttcgccgacggcaaggccggcctcgaactgcgcaatttctatttcaatcgcgactatcgccagcccggcgccagccagtcctattcggaggagtgggcgcagggtttcctgttgcgctacgagtccggctacaccgaggggctcttcggcctgggcgtcgatgcgctgggcctgctgggcgtcaggctggactcctcgccagagcgatccggtagtggtctgttgccgtattcgacgagcgaccggcgcgccgcccacgactattccagcctgggcctgaccgccaagctacgggtctcgcacagtacgctgaagatcggcagcctgatgcccaggctgccggtggtgcagttcaacgacacgcgcctgcacccgcaaaccttccagggtggactgctggaagtgaacgagatcgacgggctggcgctgcagtttggccagttgcgccaggtcaagcagcgcgactcgaccaacgccgaagacctcggcatcacccgcggcaacaagcgcaacgtactggcgggccggcaccccggcagcgaccgcttcgacttcgccggcggtacctaccgctggagcgagcgactgagcagcagctaccactacgccaacctggaggatttctaccgccagcattatctcggcgtgcagcacctcttgccgctcaccgatgaccagtcgctgaagtccgacatccgctgggcgcgttccaccgacgagggcggcagccgcgtcgacaatcgcgcgctgaatgcgctgttcacctatcgcctgggtggccacgccttcggcctcggctaccagcgcatgtccggcgacagcggcttcgcctacctggccgggaccgatccgtatctggtcaacttcgtgcagatcggcgatttcgccaacaaggacgagcgctcctggcagttgcgctacgactacgacttcgccgccatcggcctgcccggcctgacattcatgagccgctacctgcgtggcgaacacatcgaccttctggacggcggtgggcgcggcaaggaatgggagcgggacaccgatatcgcctacctggtgcaatcggggccgctgaagaacctggggatcaagttgcgcaacggcaccttccgcagcgatttcggcaacgacatcgacgagacccggctgatcgtcagctacgcgttgccgctgtggtga

SEQ ID NO: 318442 - DNA, 987 bp, Pseudomonas aeruginosa
atgggcgtgttcaggacccgtttcaccgagaccttcggcgtcgaacacccgatcatgcagggcggcatgcagtgggtcggccgtgccgagatggctgcggcggtggccaacgccggtggcctggcgacgctgtcggcgttgacccagccgagcccggaggcactggctgcggagattgcccgctgccgcgagctgaccgatcggccgttcggggtcaacctgaccttgctgccgacgcagaagccggtgccctatgccgaatatcgcgcagccatcatcgagacgggaatccgcgtcgtcgaaaccgccggcaacgaccccggcgagcacatcgccgaattccgtcgacacggcgtcaaggtgatccacaagtgcaccgccgtgcgccatgcgctcaaggccgagcgactgggcgtggacgccgtctccatcgacggcttcgagtgtgccggccacccgggcgaggacgacatccccggcctggtgttgctgccggccgcggccaaccggctacgcgtgccgatcatcgcctccggcggtttcgccgatggacgtggcctggtcgcggcgctggcgctgggcgccgacgcgatcaacatgggcacgcgcttcctggccactcgcgaatgtccgatacaccctgcggtgaaggcggcgatccgtgcggccgacgagcgttccaccgacctgatcatgcgttccctgcgcaataccgcgcgggtggcgcgcaacgcgatcagccaggaagtactggcgatcgaggcacgcggcggcgccggctacgccgatatcgccgcgctggtcagcggccagcgcggtcgccaggtgtaccagcagggcgatgccgacctggggatctggtcggccggcatggtccagggcctgatcgacgacgaaccggcctgcgccgagttgctcagggacatcgtcgagcaggcgcgccaactggtgcgtcaacgcctggagggcatgctcgccggggtctga

SEQ ID NO: 318443 - DNA, 918 bp, Pseudomonas aeruginosa
atgagcagcagactcaatgaaggcaaggtcgcgatcgttaccggcgcgggcggcggcatcggccgcgagatcgccctggccctggccgattccggggcacgggtggtgatcaacgatatcggcgtatcgctacagggcgagggcgggtcggcctcgccggccgaagagacccttggcctgatccgccagcgaggcggcgaaggtctgatcaacaccgacagcgtcgccgactgggacagcgcgcggcgtatcgtcgaatgcgccatggacggtttcgggcgtctggatatcgtggtgaacaacgctggcatcctgcgcgatgcgatcttccacaagatgagcgccgacgactggctgtcggtgatcaatgtccatctcaacggcagcttcttcgtcagccgggccgccgccgaacgcttccgtacccagcaggccggcgccttcgtacacatgaccagcacttccgggctgatcggcaacttcggccaggccaattattccgcggccaagctgggcatcgtcgccttgagcaaatccatcgccctcgacatgcagcgctacaacgtgcgttcgaattgcatcgcgccgttcgcctggagccggatgaccgactcgatcccggccgcaaccccggagcagaaggcccgcgtcgacaagctgcagcgcatgacccccgagaagaacgcgccgctggccgtctacctggcgtccgacgccgcccgcgaggtcaccggccaggtgttcgccgcgcgtcaccacgaactcttcctgatgagccagagccggccgctgcgcagtgtgcatagcgagcacggctggaccccgcagagcatcgccgagcacggcatgccggcgttgcgcggcagcttcatggacctggcgcgcagcccggacgtgttctcctgggacccgatctga

SEQ ID NO: 318444 - DNA, 1146 bp, Pseudomonas aeruginosa
atgagcgactacgacagtctcgatgacaacgcctttcgcctgatggtccgtgagtggatcgccgccaactatccgcagcgcatccgcaatccgccccgtcgcctggggcgcgaggaaacccgcgagtggtacctgctgttgtcgcgccagggctggctgtgtcccggctggcccagggagtacggcggcatggggctgagcgccggcaagcaactgatcatgatggaggaaatggaggagtacggctgcgcgcgcctgcccgacagcggcgtgaccatgctcggcccattgttgatccgctatggcgacgaggcgcaacgggcgcgcttcctgccgcgcattctcagcggcgaagacatctggtgccagggctacagcgagcccaacgccggctccgacctggccagcctgcgcaccgaggcgcgcctggaaaacggcgagtgggtgatcaacggacagaagacctggaccaccatgggctcggaggccaactggatcttcctgctggtccgcaccgagcgcagcgccaaggcgcagcacggcatcagcttcctgctggtgccgatggacagcccgggcatcgaggtgcggccgatcctcaacctggagctgcacggcgagttctgcgaagtgtttttcaacgacgtgcgggtgccctacgacagcctggtcggcggaatcaaccagggttggagcatggccaaggcgctgcttggtttcgagcggatcttcctcggttcgcccaagcagtccaccttcgctctccagcgcctggagcgcctggcccggcacctgggactgtggcacgaccctctgttcgtgcgccgcttcgccgcgctgagcatggacctggacagccacaaggcgctctacgagcgtttcgccgaacgcctgcggcgtggggagagcctcggcccggaggtatccatgctgaagatcttccagtccgaactgttccagcgcatcagcgagctgggcctggaggtcgccggggaggattcggccctgctgcagcccttcgccgaagaccccgagttgcatccggcggggatcttcatccagtcgcggccgaccaccatctacggcggcagcaacgaaatccagcgcaacatcctggccaagagcgtcctcggcctgccgggctga

SEQ ID NO: 318445 - DNA, 762 bp, Pseudomonas aeruginosa
atgagcggtttgttgcaggaaacgcgcggcacggtgcgcctgttgcgcttcgacaacccggcccggcgcaacgcactgtcgccggcgctgcgcatggaattgctgcgggccctggaggcggccgaatgcgacccatcgatccgcagcgtgctgctgaccggtggcgaagaggtgttctgcgccggcggcgacctgggcgacatgcgggtgaccgagttggccgccggcagggctcgaatgcaggacaacgcgcggctggtgcggcagatggtgcgcatgggcaagccgctgatcgccgcggtcgagggctgggcggtgggggccgggctgtccgtggcgctggcctgcgacagcatcgtttgcggcgccggcgcccgcttcgccgccggcttcggcaaggtcgggctgctcgccgacctcggccagttgcataccttgccggcgcgcatcggttgggggcgggcacggcagatcctgatgttcggccaggtggtagaggccgaggaggcactgcgcatcggcctggccgaccgcctctgcgccgctggcggcgccttggcgatggcgctggagctggccgggcgggtggagcagcaggcgccgttgcccctggcgatgaccaaggcgttgctcgccgagggccttgacctattgctggagcgggagggcgagttgcagagccagttgtttctcagcgccgaccacgccgagggcaaggcggcctttctcgccaagcgtccccccgtattcagaggaaactga

SEQ ID NO: 318446 - DNA, 1065 bp, Pseudomonas aeruginosa
atgagtgagcaagacgagtgggccggcgagcgcgagcagcgtctgcggatgatccgcgacagcgcggcttcgctggtgccacgcgacggcgacctgacccgcgtgcgccgcggtcgtttcaccggtagcggggtggaccgccaggcctggcgcgaggtctgcgccatgggctggccggcgctgcgcctggatgaagcgttgggcggcagcggcctgggcatgagcgaatacgcggcgttgctggaggcgctggggcgcggcctgctgcccgagccgctgatcgaggccgggctggtggcgccgctgctgccggaagacgagcgcgttgcgttgctggccgctgagcggctggtcctgccggcgggcatcgcctaccgcgatgggcggcgacgccctcgtatgcagcaagggcggttgcacggcgaagtcgctcacgtacatctggctggtgccgccgatgcctggctggtggcctgcgagcagggcctggcgctggtcgagcgcgatgccgatggcgtggaactgctctgcgaggcgacccaggatggcgctcacctggcgcgcctgcgtttccgcgatgcgccggcacggtggttgtccggcgaggtaacggaacaggttctggacgaggcagcgctggcctgcgcggcctatctggtcggactgatggatggcgccttcgagcgaaccctggagtacctcaaggtacgtcgccagttcggccgcgagatcggtagtttccaggcgctgcagcaccgcatggtcgacctgaggatccagatcgaactgtcgcgcgccatggtcgagcaggccgccgccgcgatcgatgccggggcgtcggaaagcgagcgccagcggcaggtttccagcgcacgggtacgggcctcggaagcggctctgctggtgacccgccaggccatccagttgcacggcggcatcggctacaccgacgaggcggacatcggcctgttcctgcgccgcgccatggtactgctcaatgcccacggctcgctggcgttccacaaggcgcgctacgccgcgctgctacagcgggaggtggcctga

SEQ ID NO: 318447 - DNA, 408 bp, Pseudomonas aeruginosa
atgagttcttttccacgacagccagcggcggagcagcggcccgccagcttccaggagttcatcggcctcgagcgctggaccgatgccgacggggtggcgcgggtgcgcctggggcatcgcccggaactgatgaactacctgcaacagttccacggcggggtgttgatgtcggtgctggacgccgccatggcccaggcgatccgtgcctgcctgccggactgctcgatggtgaccatcgacatggctacccacttcatgggtagcgcccgcggcgagcttcgtgcggttggcagggtggtgcgacggacccgcacgatctgcttctgcacggcggaaatctgcaacgaggacggcgaggtcatcgccatggcctcgggcagcttcaggtaccgcgcggctaagccgtag

SEQ ID NO: 318448 - DNA, 1356 bp, Pseudomonas aeruginosa
atgaatgcaaccgcgctttccccgaacccggcgccggccatctcccggcgcaccatgctgatcgccttcgtcttctgcttcctcggcctgctcgccgacggcgtcgacctgatgttcctggcctacagcctcaacagcctgaaggccgaattcggcctgaacaacttcgaagccggctccctcggcagcctgactctcgccggcatggccgtcggcggtatctatggcggctggtgctgcgaccgcttcggccgggtgcgagtggtgacctggaccatcgtgctgttctccatcggtaccgcgttgctggggctgacccagaactactggcagttcgcgctgatccgcttcgtcgcctcgctcggcctcggctcgctgttcgtcgcctgcaacatcctgatgtccgagtgcgtcggaaccaggtaccgcaccaccatcctcgccgccatgcaggccggctggaccgtgggctacctggtggcgaccctgctggcggggcagatcatccccgagttcggctggcgcgccttgttcttcaccgccgtggcgccggcgctggtctgcctggccctgcggccctgggtgccggagtcgccgtcctggctcgcggcccaggccgggcgccagcgtcccggcgcggctccgcagagccacgccgaggctggcggcgccggcccgctgggacggatgctgggcgatccggaaacgcgcggcatgttcctgctctggagcctcacctcctgcttcctgctgttcggctactacggcaccaacaactggatgccgtcctacctggagagcgagttggggatgaacttcaagtcgatgaccggctacatggtcggcacctacagtgcgatgatcctcggcaaggtcgccgccggcgtctgcgccgatctcttcggccggcgcctgaccttcgccgccggggccatcggcagcgccgccttcatgccgttgatcgtgttctaccactcgccttccaacatcctctggatcctcatcaccttcggcttcatctatggcgttccggtcggggtgctggccacctacatgaccgagagcttctccacccgcgtccgcggctcggcggtgggcaccgcctacaacctgggtcgtatcggcgcggcggtggcgcccgccggcatcggcctgctggccacccacgtgtcgatcggcgcgggtttcctggtgatgggcatcacctacgtgctcaccgggttgatcccggcgctgttcattgcggaccggctctacgacccgaaccgcgagtcccgcgatgccgagagcgcttcccgacggcaagcgccgggcagtgccggggataccgccgagcggcgcgcggccaaggcctga

SEQ ID NO: 318449 - DNA, 867 bp, Pseudomonas aeruginosa
atggcgctcgatcctgaggtgctcctgaactacccgatccccgaagtacgccagcgctacagccggcgcgacagcgccttctacgcattgagcctcggtctgggcggcgacccgctggacgagcgccaactggcctacgtcgatccgtgccgcgatctccaggcattgccgtgcatggccctggtgctcggtcatccgggcttctggctgggcaatccggcgactggcgtggacgcgctgcgcctggttcacggcgagcagcgcctggagtggcggcggccgttgccggcggaaggcgaggtgatcggccggacccgggtcaccggtctggtagacaagggcgccgacaagggcgcgctgctctacagcgagaaggtgctcagcgacgcgctcagcggcgaggtgctggctgtcgcccgcagcaccaccttccttcgcggcgacggcggcttcggtggttcccggcaggtgccggaaacgccgcatcgcttgcctgaacggacacccgacctgcgactcgacctgccgacccgtccggagcaggccctgtactaccgcctcaacggcgacgacaacccgctccacgcggagcccgcggcagcgctgcgggccggcttcccgcggccgatcctgcatggcctgtgcaccctcggcgtggcattccacgcggtgttgcgcgggctcgccgactaccgcgcggggcaactgggacatctgcaggtgcgtttctcggctccggtgtttcccggcgagaccttgcgtaccgagatgtggagcgacggctcgttccgcactcgcgtcgtcgagcgcgatgtggtggtgctggacaacggctgggtaggtccgccgccagagcggccggactga

SEQ ID NO: 318450 - DNA, 1773 bp, Pseudomonas aeruginosa
atgcaggatgcggtggtagccgctgcccgcgagtacggtatgcgtctgctcggtccgaatgcgctgggcgcgttcaacagtaacctaggttactacgcgttcttctccaccagcctggaacgtggcgtaccgctgcccggccgggtaggcatcgccacccagtccggtgcctacggcgcgcacctgctcggcatggcgcgccagcggcgcctgggaacccctatctgcgtggccaccggtaacgaggccgacgtcaccctgggcgacagcatcggttggctggtggagtcgccggagatcgacgtggtgatggcctacgccgaatccatccgcaacgtcgacagcttcctcgccgccctggaggcagcgcatcgcgccggcaagccggtgatcctgcacaaggtcgggcgcagcgccctgggtagccgcgcggcgctgtcccacaccgcttcgctggccggcgacgacgaggtgctggacgccgtgctgggcgactatgcggtgatccgcgccaggaccaccgaggaactgatggacatcgcctacctcgccacccggcgtatctatccggtgggcaacagcctcggaatgatcaccgtcagcggcggcgccgggatcatcgtcagcgatgccgccgaggaggtcggcctgccgatgccgccgatgccggacatggcccaggagcggctgaaggcacggctgtccttcgcgtcgccgatcaacccggtggactgcaccgcgcaggccctgaacgacctgacgctggtgcgcgactttaccgagtcgatggtggtcgacggtggctaccgttcgctgctcgccttcttcacccaggccggcaccgccgcctccatcggcgcgcgtctggccgagcagttccggcggatcaaggaggctcatcccgagcgtctgttcgtggtctcggtgatgggcgagggggaggagctggcaccctacgaggaggccggcttcgcactgttcgaagaccccacccgggcggtagtggcgatccaggccatggggcggctcggcgaagccttcgcccggccgttgcgcctgcgccggcctgccggcgggctacagttgcccgcctccacgcccggcgaagccgaggccaagcgcctgctggcgcgcgccggtatcgagtccgccgccgaggcggtgctgggcagtgccgaagaggcggttgccttcgccgagggcatcggatacccggtggtgctgaagctcgcctcggcggacatccagcacaagtcggaaatcggcggcgtgctgcttggcgtaagcgatgcggacgcggtacgcgccggtttccaactgcttctgcgccgggccgccgagaaggcgccgcaggcgcgtctcgatggcgtcctggtggcgcgccaactgcagggcggggtggagtgcttcatggggatccagcgcgatccgctgttcggcccggtggcgttgttcggcctgggcgggatcttcgtcgaagtgctgcaggacgtggtgttccgccgctgcccgttcgaggtcgacgaagccgaggcgatgatccgtagcatcagaggcgcgccgctcctgttcggcgcgcgtggccggccgcgggccgacgtcgcggcgctggcacggctgctgtcgaatctctcgcggttcgcctgggaggcgggagagcgcttgcgctcggtggacctcaacccggtcatcgccttgccggagggccagggcgcctgggcggtggatgcggtgttggaagtcgaggaggtggccgatggcgctcgatcctga

SEQ ID NO: 318451 - DNA, 1152 bp, Pseudomonas aeruginosa
atgagcgcagccatccgtggcaagaccgccatcgtcggcatcggtagcgccggcgtcggcgaggcgccgggctacagcgccatcgaactgctcggccaggcgtcgctcaaggccattgccgatgccggcctgaagctttccgacatcgacgcgatcttcgccgccaccagctcccatgcctttcccaccttgtcggtcgccgaatacctcggcatccgcccgaaattcgtggatggcaccaatattggcggctccagtttcgagctgcacctgctgcaggccactttggcactggaggccggtctctgcgacgctgcgctgatctgctacggctccaaccagcgaaccgccggcggccgcctggtatcgatgagcgagccacaatggcacgagacgccctacaagccgcgccacccgatcaccgcctatgccctggcggccagccggcacatgcaccagtacggcaccacacgcgagcagctcgccgaggtggcggtctctgcccggcaatgggccaacctgaatcccgaggcgttcgcccgcggaccgttgagcgtcgatgacgtccttgccgcgcggatggtcagcgacccgctgagcgccgccgactgctgcctggtcaccgacggcggcggcgcctgcgtggtagtgcgcgccgagcgcgcccgcgacttgcccaatgcgccggtgtacttccttggcgcggccggagcacagtggcatcgctcgatcgtgtcgatgcccgacctcaccgtgacggcggcctcggaaagcgctccgcgagccatgcagatggccggtgtgcggcacgccgacatcgacctggtgatgctctacgacgcctttaccatcaacaccctgctgttcctcgaggacctgggattctgcgccaagggcgagggcggcccattcgtccagggcggacgcatcgcgcccggcggcgagttggcggtgaacaccaacggtggcgggctgtcctgcgtgcatccggggatgtacgggatgttcctgatcatcgaggcggtgacccagctccgccgccagggcggcgagcggcagttggccaaggccgacgtggcgttgctgcacggcaacggcggcacgctgtccagccaggtaaccgcgttgctcggtaccggcgacacgctctag

SEQ ID NO: 318452 - DNA, 312 bp, Pseudomonas aeruginosa
atgttgcagcgcagccgttccagcggtcgccatgtgttctacccgcgccagttggtgccgggtagcggcgagactgatctcgagtgggttcccgccagcggcctgggtacgctctacgcgatcactgtcaatcgctcccgcggcggcaatcacaatgtcgcgctggtcgacctggacgagggcgtgcgcatgatgtcgcggatcgacgggcaccagagcctgccgatcggcacccgtgtgcaggcgcgcatcgtcgagcaggatggtgccaatgtcgtggtgttcgttccccaccaggagggacgaccatga

SEQ ID NO: 318453 - DNA, 801 bp, Pseudomonas aeruginosa
atgaccaaggacgccacaaccaaaggcaccagcagcaaagatgtcggcgcggtagtgaacgccattcagatacttcgccacctggcccacgccgacggaccgcaaggcgtggccgccatcgctcgcgccaccggtatcagcccgagcagcgccttcaatatcctgcgcaccctgagcaacgaacgactgacatccttcgacgatgcgggcaagacctaccaactgggccttggcctgtcggaactggccgtaggattcgtcggacgcagctatgccgacctgatccagccagagctggagcgactaagccttgcccaccacatcctcatcgccctgtggcaagtcaccgacgatgcgcacatccgcgtcatcgcccttgccgcgccgcccgtcgcccacgtcaacgtcgccgtcggcacgcgcctgccggaactggtcggcgccgccgggcgttgcattgccggcctgcgcgaactgccggaggacgaactgcgccgccgactgacccgcgtgcgctgggaaaatccgccgagcttcgagcgctaccaggccgaagcgaccgaggccgtcgagcgcggctgggctatcgaccaggaacacctttaccgcggcgtgagcatggtcgccagcgccatcaccgaccgcgacggacaaccgcgcttcgccatctccgcgatcggcatcagcgcccagcaccagcccgacgacctggaacggatcggcaccagcctgcgggataccgcgcgcttcgtgagccgcgcgctatttccccagggcgaggcactgaaggggaaatcctga

SEQ ID NO: 318454 - DNA, 900 bp, Pseudomonas aeruginosa
atgcgaccgctcgtttccgtcgtttgcgcctgtttcaatatctcgaagtatctggacgaggcgattgccagcatctacgcgcagggctatcccaatctcgagttgatcgtggtggatgacggatccacggacgacacctatgagcgtctcgccatgctccgcgagcgtcacggtttccagctctaccgccaggctaaccgaggggtgagcgatgcgctcaatcacggtttgcgtcatgcgcggggggagttcgtgatgactcccgacctcgacgacattgtcctgcctggagcgctcgacacgcgcgtcgactacttgcttgcgcaccccgaggtcgggtgcgtgggcggtttcaatatctgtatcgacagtgccggtaacgaagtggcgcgagacggtttcagcgagggttgtgtggagcgttgggggttcgatgcagcattggccgagaccctggtggtcatgccgctgacggcgctctaccgcatggacgcgatgaagcgggcggatttcttcgacccgtcgattcgcgtgcaggatttccagctcaccctcaggatcgcggcgcagggctatgaaattcatcgactaccggcctacatggggcgttatcgtcggcatggaagcggtctgtccggcaggtacaagctcaattacgaggcggatatgcaagccatcgagccttatcgggctcacccgaattatcgccgggcccggcaactgatcctgaacaaggcgctgaagaaggctgttgtccaggatgggcgatatgcctggcagctgttccgctcggtgccgctgcgggcgtgggaccgggtgacgctgaagcgattctggcgcttcctccgttatctgccggtcctcgggttgaaaggtggtaccgacgtcgcgggtcgataa

SEQ ID NO: 318455 - DNA, 711 bp, Pseudomonas aeruginosa
atggaaaaacgcgaagaactctaccgcggcaaagccaagtcggtttaccagaccgacgatgccgatcgtctcatcctgctgttccgcaacgacacctccgccttcgacggcaagcgcatcgaacagctcgatcgcaagggcgcggtgaacaacaagttcaacgccttcatcatgcagaagctggaagctgccggcattccgacccagttcgacaagctgctgtcggataccgagtgcctggtgaagaagctcaacatgatcccggtcgagtgcgtggtgcgcaatttcgccgccggcagcctggtgcgtcgcctcggcgtggaagagggcatcgccctgactcctcccaccttcgagttgttcctgaagaacgacgccctgggcgatccgttcatcaacgaatcccacgtccaggccttcggctgggccactcccgagcagctggcgcagatgaagacctattccttcaaggtcaatgaagtgctgaacaagctgttcgacgatgccggtctgctgctggtggacttcaagctggagttcggcctgttccatggccagatcgtcctcggcgacgagttcagcccggacggctgccgtctgtgggacaaggaaacccgcaagaagatggacaaggaccgcttccgccagggcctcggcgatgtgatcgaagcctacgaagaggtagccaagcgcctgggcgtgccgctttaa

SEQ ID NO: 318456 - DNA, 759 bp, Pseudomonas aeruginosa
atgcggttcgcggttctgggcagcggaagccggggcaattcggccttggtgagcagttctgacacccggatactgatcgattgcggcttcccgctgcgtgaaatcatcaagcgtctggcgcgcctggggctgagccccgcgcagctggacgcgatcctggtcacgcacgaacacgccgatcacatccatggcgtcgaactgctggcgcggcattaccaaatcccggtctatctcagtgcgggtaccctgagcggcatgcgccgcccggtgcaccccgccgagctgttgagggccggccagcgcctggcgatccgcgggctggaagtgcaggtggttggcgtctcgcacgacgcccgcgagcctacccagttcgtgctgtccgatgggcagcggcgcttcggcatgctcaccgatctgggaatggccacggccgaggtgctggagtgctatcgtgcggtggatgctctggtggtcgaggccaaccacgacagcacgatgcttgccggtggcccgtatccctattttctcaaggcccgcgtaggcggttcgcgagggcacttgaacaaccatcagtccgcagaactggtgaagcagctggattggggtcgcatgcagcacctggtgctggcccatctcagcgaaaagaacaactcgccgcagctggcccggcaaaccttcgtcgacacccttgggtgcgatccgggctggctgcaggtggccgatcagcattcaggcctggattggcgcgagatcgcctag

SEQ ID NO: 318457 - DNA, 1191 bp, Pseudomonas aeruginosa
atgaagcgactggctggactgaccgccctcgccctggttatcggcaacacttccggctgcggctggctgtgggggccggagggctatttccgcgaccgcggtgacgactacctcggcgcccgcgaaacgcctcccatgcaattgcccgaaggggtgcacagcaagccgctcgatccgctgctgccgattccgctgaacgtcgccaccacccacgaaaaagagggtgagtacgaggttccgcgtccgcagccgctggccaacgccggcgacatcagcgactacagcctgcagcgcagcggtgatagccgctgggtcgtggcccagcgtccgccggcggaagtctggccggtggcccggcagttcttcgaggagaacggtttccgcatcgccgacgagcgcccgcagaccggcgagttcagttccgactggcaatcgctgtcgcagctttccgcgccgctggcacgccgccttagcagccgcgtgagcggtgtcgagccggacggccaggcacgggttcgggtgcgtatcgagcccggcgtgcaaagcaataccagcgaggtctacgtgctcagccagacccgcgccgccggtgacaccagcagcccgagctggccgagcaagtcggtggcgccgagcctcgacgcggcgctgctcgacgagatggtcgcgagcatggcgcgcagcgccgagcagggcggctcggtctccctgctggcagccaactcgatctacgacacgcccggcaccttcgagttgagcaaggacggcagcggcaacccggtgctgaccttgcaatccgacttcgaccgctcctgggtcagtgtcgggcgtgccctggataacgccgatatccgcgtcgacgacctcaaccgcagccttggcgtgtactacgtgaacatcgccgaaggggcgaagaagcccgacgaagacaagcccgggttcttcagtcgcctgttcggcggcggcgagaagaccaaggaagaggaagacgccaaggcgcagcgctaccaggtccgcctgaccaccgtcagcgacgccgtgcaggtcaccgtcgacaaggacatcaacacctctgcgccggccgatgtcgcgcaaaacgtactggaaaaactccaggagagcatgcgcaatgcggttcgcggttctgggcagcggaagccggggcaattcggccttggtgagcagttctga

SEQ ID NO: 318458 - DNA, 879 bp, Pseudomonas aeruginosa
atgattgcgggcagtatggtggcactggtcacccccttcgatgctcagggtcgactggactgggacagcctcgccaagctggtggacttccacttgcaggaaggcaccaacgccatcgtcgccgtcggcaccaccggtgaatcggccacgctggacgtggaagagcacatccaggtgatccgtcgcgtggtcgaccaggtcaagggccgcatcccggtgatcgccggcaccggcgccaactcaacccgcgaggcggtggcgctgaccgaggccgcgaaaagcggcggcgccgacgcctgcctgctggtgacgccgtactacaacaagccgacccaggaaggcatgtaccagcacttccgccatatcgccgaagccgttgcgatcccgcagatcctctacaacgtaccgggccgcacctcctgcgacatgcttccggagaccgtcgagcgcctgtccaaggtgccgaacatcatcggcatcaaggaggccaccggcgacctgcaacgcgccaaggaagtcatcgagcgcgtcggcaaggacttcctcgtctattccggcgacgacgccacggccgtcgagctgatgctgctgggtggcaagggcaacatctccgtgaccgccaacgtcgcgccgcgcgccatgagcgacctgtgcgccgccgccatgcgcggcgacgccgcagccgcgcgcgccatcaacgatcgcctgatgccgctgcacaaggcgctgttcatcgaatccaaccccattccggtgaagtgggccctgcatgagatgggtctgatccccgagggcatccgcctgcccctgacctggctcagcccgcgttgccacgagccgctgcgtcaggccatgcgccagaccggcgtattggcttga

SEQ ID NO: 318459 - DNA, 558 bp, Pseudomonas aeruginosa
atgtccaccagccaaccccgcgaacaattccttctgatcagcgccctcggccccaatccgatggagctgaccaccctgctctgccgcgcctgcgtcgagagccgctgcgccgtggtcagcagccgcctgacccgccacggagagttcagcgccctggtgctgcagatctccggaagctgggatgccctcgcccgcctcgagggcagcctgccggccctcaccaagcgcggcgacatcaccctcagcatgacccgcagcaacgctcacgtgacccgcgcccaggcgttgccttacgtggcctatgtcagcgcggtgtatcgcccggacatcctcaacgaactctgccagttcttcatcgaccacaacatcgagctggagaacctgacctgcgacacctaccaggcgccgcacaccaacaccaccatgctcaacgccacgattaccgtgacgctgcccgccggcacccagatcagttggctgcgcgaccagttcctggacttcgccgacgccctgaacctggatgccctgatcgaaccctggcgcccccaacacccctga

SEQ ID NO: 318460 - DNA, 474 bp, Pseudomonas aeruginosa
atgccggtcgcaatcgacaaacccgtacccgacttcaccgcccccgcaaccagcggcaaggaggtgaccctgtccgcgctgaagggcaagcaggtcgtcctgtacttctacccgaaggacagcacccccggttgcaccaccgagggccagggcttccgcgaccagtacgcggcgttccagaaggccaataccgaggtcttcggcatctcccgcgacggcctgaagtcccacgagaacttcaagtgcaaacaggaattccccttcgagctgatcagcgacaaggatgaagcggtctgccaactgttcgacgtgatcaagctgaagaagctctacggcaaggaatacatgggcgtcgaccgcagcaccttcctgatcgacagggacggcgtactgcgccaggagtggcgcggcgtgaaggtgcccgggcatgtcgacgcggttctcgccgccgcccaagcgctcaacggcacctga

SEQ ID NO: 318461 - DNA, 1074 bp, Pseudomonas aeruginosa
atgatcaaggtgttacgcgactggatgcagcgctacttctccgacgaggaggccgtggtgctggcgatcatgctggtgctcggcttcagcgtcatcctcgccttcggcgggatgctcgcgccggtactggcggcgatggtgatcgccttcctgatccagggcgtggtcggcatgctggaacgcttccgggtgccgcacctgttcgccgtgtggctggtctacagcctgttcctcggcttgctggcgctgttcctggtggtcctgctgccgctgctctggcagcaattgttcaccctgttcaacgaactgccgcggatgctcggcgaatggcagagcgtgctgctgatgctgcccgagcgctatcccagcctgatcagcgaggagcaggtgctcaaggccatcgagaccgcgcgcggcgaattcggccagatcggccagtgggcgctgacctcgtcgctggccagcctgccggtggtggtgaacgtcatgatctacctggtgctggtgccgatcctggtgttcttcttcctcaaggacaagaagcgcttccatacctggttccaccgctacctgccgcgcgagcgcgggctgatgaaacaggtctgggccgagatgaaccagcagatcgccaattacattcgcggcaaggtcatcgagatcgtcattaccggtgcggtgacctacatcgccttcgcctacctggggctcaactacgcagcgctgctggccctgctggtcggcctgtcggtggtggtgccgtacatcggcgcggtggtggtgagcgtaccggtggcgatgatcgccttcttccagtggggctggagcgaccagttcatctacctgatggtggcccacgcgatcatccaggcgctggatggcaacgtgctggtgccgctgctgttctccgaggcggtgaacctgcacccggtggcgatcatctgcgcggtgttgctgttcggcgggctctggggcttctggggcgtgttcttcgcgatccccctggcgaccctggtgaaagcggtgctggatgcctggcccaaggaccttcccgagactccggcagccacgcgatag

SEQ ID NO: 318462 - DNA, 252 bp, Pseudomonas aeruginosa
atgacggataacgattcatcccccctggtatgtgacgcggagctggatgccagtggtctcaattgtccgctgcccctgctaaaggccaagctggagctgaaccgcctgcccagcggcggggtgctcaaggtgatcgccaccgatgccgggtcgcagcgagacttccgggccttcgcccagctcgccggccatgaactgctgcgcgaagaggccgccgaaggcgtctatcgatactggctgcgcaagcgttag

SEQ ID NO: 318463 - DNA, 1434 bp, Pseudomonas aeruginosa
atgaatgtactgcgccctgccctgttgacgctcgcctgcatgctcgcttcgccggtcatgtcggacgatctgccctccctgggcgacgcatcttcctcgatcgtttcgccggagcaggagttccagctgggccgcgcctggctgagcatgctgcgcaaccaggtcgatgcgatctccgacccgcagctcaaggacttcgtcgaaagcagcgtctaccggctggccgaaaccagcgacctgcaggatcaccggctggccttcatcctcatccgcgacgcacagatcaacgccttcgccgcgcccggcggcgtgatcggggtcaacggcgggctactgctcaacgcccagaccgaaggcgagtatgccgcggtgctggcccacgaactcggccacctgatccagcgccacttcgcccgcggcatcgaggcacagcagcgcatgcaactgccggtgatggcagcgatgctcgccggcatcgtcgccgcggccgccggcgcaggggatgcgggtatcgcggcgatcgccgggacccaggcggcggcgatccagaaccagttgcgcttttcccggcagaacgagcaggaagccgaccgcgtcggcgtcaccaacatggttcgcgccggttacgatccgcgctcgatgccgaacatgttcgagcgcctggcgcggcagtaccgctacgacggcaagccgccggagttcctcctcacccacccggtcaccgaatcgcgtatcgccgacacccgcaaccgcgccgagcagtatccccagggcggcaaggaagacagcctgcgctaccagcagatgcgcgcgcgcacccagttgctcttcgaggaaaccccggggatggccggcaagcgcttccgcgccatgctcaacgacaatcccaagctggacgccgcgcgctacggactggccatctcgcagacgcgcatcggccagctcaacgatgcccgtgacaacctcaggcaattgctggcgaaggcacccaacgacgtggcctacaacctggcccaggtcgagctggacatcaccgccaaccgccttccggatgccgatcagcggttgaagaagatgctcgcccagttccccagcagctacccgctgaaacaggtgcgcgccgacctgatgctgaagatgggcaagccgcaggaatcggagaagatcctcgacgacctgagcaaggcgcggccgctggacccggatgtctggaaccgcctggccgaggtgcgcagcctgaccaacaacgccatcggcgtgcaccaggcccgtgccgagtacctgtctctgaccggcgactaccaggccgccatcgagcagctcgatttcgccaagcgccgcgctggcggcaacttccaactggctgcgcgactcgacgctcgccagcaggaaattcgccaacaggaaaagatggtcaaggaaatgttccgctga

SEQ ID NO: 318464 - DNA, 1059 bp, Pseudomonas aeruginosa
atgacgcacatttccgaacgactcctggtacaggcccacctggccgccaagcaaccccgtgtgttgagcgagcaggagagcgccgagcatcgcgcggcgatcgcggccgaactgaaggcgcaaaatgctgtactggtggcgcattactactgcgacccggtgatccaggcgttggccgaggagaccggcggttgcgtatccgattcgctggagatggcccgtttcggcaaccagcatccggcgcagacggtggtcgtggccggggtgcgcttcatgggcgagacggcgaagatcctcaaccctgagaagcgtgtgctgatgccgaccctcgaagcgacctgctcgctcgacctgggctgcccggtggatgaattctcggcattctgcgaccagcacccggaacggaccgtggtggtctatgcgaacacctctgcggcggtgaaggcacgcgccgactgggtcgtgacctccagttgcgcggtggagatcgtcgaacacctgatggacaacggcgagcccatcctctgggcgccggaccagcacctgggacgctacatccagcgcgagacgggggccgacatgctgctctgggatggcgcctgcatcgtccacgaggagttcaaggccaagcagctggaagacatgaaggcgctctacccggacgccgccatcctggtccaccccgaatcgccggaaagcgtggtcgcgctggccgatgccgtgggctcgaccagccagttgatcaaggccgcgcagaccctgccgaacaagaccttcatcgtcgccaccgatcgcggcatcttctacaagatgcagcagttgtgcccggacaaggatttcatcgaggcccccaccgccggcaacggcgccgcctgccgcagctgcgcgcactgcccgtggatggcgatgaacacgctcgagcggaccctggcctgcctgcgcgagggcagcggggaaatcttcgtcgacccggcgttgatcccgagggcggtccgtccgctcaagcgcatgctcgacttcacccaggccgcgcgcctgcgccaggccgggaacgcctga

SEQ ID NO: 318465 - DNA, 999 bp, Pseudomonas aeruginosa
atgcctattcataacctgaatcacgtgaacatgttcctccaggtcatcgcctccggttcgatttcctccgctgcgcggatcctgcgcaagtcgcacaccgcggtcagctcggcggtcagcaacctggaaatcgacctgtgcgtggagctggtccgtcgggacggctacaaggtcgaacccaccgagcaggcgcttcgcctgatcccttacatgcgcagcctgctgaactaccagcagctgatcggcgacatcgccttcaatctcaacaagggtccgcgcaatctccgggtgttgctggacaccgccatcccgccgtcgttctgcgatacggtgagcagcgtactgctcgacgatttcaacatggtcagcctgatacgcacctcgcccgccgatagcctggcgacgatcaagcaggacaacgcggaaatcgatatcgccatcaccatcgacgaggaactgaagatctcccgcttcaaccagtgcgtgctcggctacaccaaggcgttcgtcgtcgcccatccgcagcacccgttgtgcaatgcctccctgcacagcatcgcgagcctggccaattaccggcagatcagcctcggcagccgctccgggcagcattcgaacctgctgcggccggtcagcgacaaggtgctcttcgtggaaaacttcgacgacatgctgcgtctggtggaagccggcgtcggatggggcatcgcgccgcattatttcgtcgaggaacgcctgcgcaacggtaccctggcagtcctcagcgaactctacgaaccgggcggcatcgacaccaaggtgtattgctactacaacaccgcgctggaatccgagcgcagcttcctgcgctttctcgaaagcgcccgccagcgcctgcgcgaactcggccgccagcgtttcgacgatgcgccggcctggcaaccgagcatcgtcgaaacggcgcagcgccgctcaggcccgaaggcgctcgcgtaccgccagcgcgccgcaccagagtag

SEQ ID NO: 318466 - DNA, 603 bp, Pseudomonas aeruginosa
atgcgcatcacgctgttggataacttcgattccttcacctacaacctggtcgagcagttctgcctgctcggcgcggaggtccgggtgatgcgcaacgatacgccgttgccgacgatccaggcggcattgctggccgacggttgcgaactgctggtgctgtcgccggggcccggtcggccggaagacgccggctgcatgctggaattgctcgcctgggcccgcgggcgcttgccggtgctcggcgtctgcctcggccaccaggcgctggcgctggccgccggtggcgcggtgggcgaggcgaggaagccgctgcacggcaagagcacgtccctgcgtttcgatcagcgtcacccgctgttcgacggcatcgctgacctgcgcgtcgcgcgctaccactcgctggtggtcagtcgcctgccggaaggtttcgactgcctggccgatgccgatggcgagatcatggcgatggccgatccgcgcaatcgacagctgggcttgcagttccatcccgagtcgattctcaccacccacggccagcgtctgctggagaacgctctactctggtgcggcgcgctggcggtacgcgagcgccttcgggcctga

SEQ ID NO: 318467 - DNA, 1572 bp, Pseudomonas aeruginosa
gtgagcggggttggctatcgactggaagaaagtctggagtaccgcacgctggtgccggaggcgctgtcgatctggcgcatggccggcgccaaccggatgctgttcgactgcttcgacgtggacagcaaggctgcgcggcgtagcgtggcgatcctttccagctgcctgcgcatcgagtgctgggggcgcgatgtggtgctgcgggcgttgaactccaacggacgtgccttgctggcgccattgagcgaggcctgtccggcccaggtcacctgcttgcgtgacggcgacaccctgcactggcgcttcccccaggaagagtcgcatgcggacgagtggcgacgcctgcatggcctgtccagcctggaggcgctgcgccgcgtgctcggaacgctgggcgacgcggaggggcccgcgctgctgggcggcctgttcagcttcgacctggccgagcagttcgaacccttgccggcgccggccgaacctgcgcggcattgcccggactacctgttcctggtgccggagttgctgctggacatcgatcacctggcgcgccggacttcgctgcaggcgttcgtccacgatccggccgggcacgaccggttggccgccagcctgcgccagtgtgccgacgaattccatggcgccgtggaggaggcttccgagtcgccggtggcaggcgtacgggccggcaactaccaggtcgacctggacgatgcgagctttgcccgccaggtagagcgcctgcaggcccacgtgagggccggcgacgtgttccagatcgtaccgtcgcgcagcttcagcatgccgtgtgcggacccctggcgggcctatcgccagttgtgcctgcgcaaccccagcccgtaccgcttcttcctcgatgcgggggacttctgcctgttcggcgcttcgccggagtcggcattgaagtacgacgcggagagtcgcgaggtggaactctatcccatcgccggcacccgcccgcgcggacgcgatgcccggggcgccatcgatgcggaactggacaatcgcctggaagcggagttgcgcctggacgccaaggagatcgccgagcacatgatgctggtcgacctggcgcgcaacgatctggcgcgggtctgccgcagcggtacgcggcaggtgcgcgacatgctcaaggtcgatcgctacagccacgtgatgcacctggtctcgcgcgtggctggcgaactgcatggcgaactggatgcgctgcatgcctaccgtgcctgcctgaacatgggcaccctggtcggtgcgccgaaggtccgtgccatgcagttgctgcggcagtacgaggatggctatcgcggcagctacggtggcgcgatcgacattctcgacagcgccggcaacctcgataccagcatcgtcatccgctccgccgaggtccgcgaaggtatcgcccgggtccgggcaggcgccggcgtggtgctggattcggatccacggctggaggccgaggaaacccgcaacaaggcgctggcggtgctgaccgccgtggccgctgccgaacgcgaaaggggagagcgcgatgcgcatcacgctgttggataa

SEQ ID NO: 318468 - DNA, 906 bp, Pseudomonas aeruginosa
atgttgaggctttcggctcccggtcaactggatgatgacctgtgcctgttgggggacgtccaggtgccggtgttcctgctgcgtctcggtgaggcgagctgggcgctggttgaaggagggatcagccgggatgccgaattggtttgggcggacctgtgccgctgggtcgccgacccgtcccaggtgcactactggctgatcacccacaagcactacgaccactgcggcctgctgccctacctgtgtccgcggctgccgaacgtacaggtcctggcgtccgagcggacctgccaggcctggaagtcggaaagcgcggtgcgggtggtcgagcgcttgaaccggcaactgttgcgtgcggagcagcggttgcccgaggcctgtgcctgggacgctctgccggttcgcgcggtggccgacggcgagtggctggagctgggaccgcggcatcgcctgcaggtcatagaggcccacggccacagcgacgatcacgtggttttctacgacgtgcgacgccgccgcctgttctgcggcgatgccctgggcgagttcgacgaggcagagggggtgtggcggccgctggtgttcgacgacatggaggcttacctggagtccctggaacgtctgcagcgtctgccgaccctgctgcaactgatcccgggacacggcggcctgctgcgggggcggctggccgcggatggggccgagtcggcctataccgagtgtctgcgcctgtgccggcggttgctctggcgccagtccatgggcgaatccctcgacgaactgagcgaggagctgcaccgcgcctggggtgggcagagcgtcgacttcctgcccggcgaactgcacctggggagcatgcgccggatgctggagattctctcccgccaggcgctgcctctggactga

SEQ ID NO: 318469 - DNA, 1014 bp, Pseudomonas aeruginosa
atgggtaatccgatcctggccgggctgggtttcagcctgccgaaacgccaggtcagcaatcatgacctggtagggcgcatcaatacgtcggacgagttcatcgtcgaacgtaccggcgtgcgcacccgctatcacgtcgagccggaacaggcggtcagcgcgctgatggtgccggcggcgcgccaggccatcgaggctgccgggctgctgccggaggacatcgacctgttgctggtgaacaccctgtcgccggatcaccacgacccgtcccaggcctgcctgatccagccgctgctgggcctgcggcacatcccggtgctggatatccgggcacagtgcagcgggttgctgtacggcttgcagatggctcgcgggcagatcctcgccgggctggcacggcatgtcctggtggtctgcggcgaggtgctgtccaagcgcatggactgttcggaccgcggccgcaacctgtcgatcctgctcggcgacggtgccggcgcagtggtggtgagcgccggcgagagcctcgacgacggcctgctggacctgcgcctgggcgccgacggcaactacttcgacctgctgatgactgcggcgccgggcagtgcctcgccgaccttcctcgacgagaatgtcctgcgcgagggcgggggcgagttcctcatgcgcggccggccgatgttcgagcatgccagccagaccctggtacggatcgccggcgaaatgctcgcggcccatgagctgaccctggacgacatcgaccatgtgatctgccatcaaccgaacctgcgcatcctcgatgcggtgcaggagcaactgggcattccccagcacaagttcgcggtgaccgtggatcgtctgggcaacatggcttcggcctcgaccccggtcacgctggcgatgttctggccggacatccagccgggacagcgggtgctggtcctgacctacggctccggcgcgacctggggcgcggcgctgtaccgcaaacctgaggaggtgaaccggccatgttga

SEQ ID NO: 318470 - DNA, 1047 bp, Pseudomonas aeruginosa
atgcataaggtcaaactggcagcgatcacctgtgaacttccggctcgcagctacgaaaacgacgatccggtgttcgctgcggtaccggacctcggcgagtcctggtggcaattctggggcgtcaatcggcggggctatttcgacccgcggaacggcgagaacgagttcagcctggtggtccgggccgccgagcgcctgctgcgcagcagcgataccgcgccggatagcgtggacatgctgatctgttcggcttcctcgccgatcatgaccgacgccggcgatgtcctgccggacctgcgcggacgtctctacccgcgcatggccaacgtgctgtccaagcagctcggcctgagtcgggcgctgccattggattcgcagatggagtgcgccagcttcctgctcaacctgcgcctggcagcgagcatgatccgccagggtaaggccgagaaagtgctggtggtgtgcagcgagtacatctccaacctgctcgacttcacctcgcgtacctcgaccctgttcgccgatggctgcgcggtggccctgctgacccgcggcgacgatgacagctgcgacctgctggcttcggccgaacacagcgacgctacgttctatgaagtggccaccggtcgctggcgcctgccggaaaacccgaccggcgaggccaagccgcggctgtatttctcgttgttcagcgacggccagaacaagatggccagcttcgttccgaccaacgtgccgatcgcgatgcgccgggcgttggaaaaggccggcctgggcagcgatgacatcgattatttcgtcttccaccagccagcgccgttcctggtcaaggcctgggccgagggcatcggtgcccgtcctgagcagtaccaactgacgatgggcgataccggcgtgatgatctccgtttccatcccgtacaccctgatgaccggcctgcgcgagggcaagatccgccccggcgatcgtatcgtcatggccggcgcagccactggctgggggttcgccgcccaggtctggcaattgggcgaggtgctggtgtgctga

SEQ ID NO: 318471 - DNA, 852 bp, Pseudomonas aeruginosa
atgttgattcaggctgtgggggtgaacctgcccccatcctatgtgtgtctggaggggccgctgggaggcgaacgccctcgcgcccagggcgacgagatgctgatgcagcgcttgctgccggcggttcgcgaagccctggacgaggcggtggtcaagcccgaggagatcgacctgatcgtcggcctcgccctgtctcccgaccatctgatcgagaaccgcgacatcatggcgccgaagatcggccatccgttgcagaaggtcctcggcgcgaatcgcgcgcatgtcttcgacctcaccgactcgagcctggcccgcgccctctacgtggtcgataccctcgccagcgaccagggctatcgcaacgtcctggtcgtgcgcggcgaatccagccagggattggaagtggacagcgagtccggcttcgcccttgccgacggcgccctggcgctgctctgccggccgaccggcaaggccgcgttccgtcgcggtgcgctgggcggtgatccggcgcaggaatggctgccgctgagcattccgctgaataccgatattcgccaggtaggcgacgtcaagggacacctcaacctgccggcccaacctggattgcccgaagcggtacgcgccggattcacccgtctggccggggacttcccgcaactgaactgggtgcgcgaggaatggttcggccagggacggcccgatggtcgttgcctggggccgttcgaactggcgtcgcaactgcgcgcggcacagcgcgaccgtctggatgaactgctgctgatcagcttcgatccgttcggcatggtggtggagggcgtgaccctggaactggcgggagaagctcatgcataa

SEQ ID NO: 318472 - DNA, 1554 bp, Pseudomonas aeruginosa
atgtccacattggccaacctgaccgaggttctgttccgcctcgatttcgatcccgataccgccgtttatcactatcggggccagactctcagccggctgcaatgccggacctacattctctcccaggccagccaactggcccgcctgctcaagcccggcgatcgcgtggtgctggcgttgaacgactcgccttcgctggcctgcctgttcctggcctgcatcgcggtcggcgccattcccgccgtgatcaatcccaagtcccgcgagcaggccctggccgatatcgctgccgactgccaggccagcctggtggtgcgtgaagccgatgcaccgtcgctgagcggtcctttggcgccgttgaccctgcgtgcggccgccggacgccctttgctcgacgatttctcgctggacgcgctggtcggtcctgcggacctcgattggagtgccttccatcgccaggacccggcggcagcctgtttcctgcaatacacctcgggttccaccggggcgcccaagggggtgatgcacagcctgcgcaacacgctcggtttctgccgggcgttcgctacggagttgctggcattgcaggcgggagaccggctgtattcgattcccaagatgttcttcggctatggcatgggcaacagcctgttctttccctggttcagcggagcctcggcgctgctcgacgatacctggccgagcccggagcgggttctggagaacctggtcgccttccgcccccgggtcctgtttggggtgccggccatctatgcctcgctgcgtccgcaggccagggagctgttgagcagcgtgcgcctggcgttttccgccggctcgccgctgccgcgcggcgagttcgaattctgggccgcgcacaggctggagatctgcgacggcatcggggctaccgaggtcggccatgtgttcctcgccaaccgcccgggccaggcgcgtgccgacagcaccgggctgccgttgcctggctatgagtgccggctggtggaccgcgaaggacacactatcgaggaagcgggccggcaaggcgtgctgttggtgcgtggcccagggctgagtccgggttactggcgggccagcgaagagcagcaggcgcgcttcgcaggtggctggtaccgcaccggcgacctgttcgagcgcgacgagtcgggtgcctaccgtcactgtgggcgggaagacgatctgttcaaggtgaatggccgctgggtggtgccgacccaggtcgagcaggcgatctgccgtcatctgccggaagtgagcgaggcggttctggttcctacctgccggctgcacgacggcttgcgtccgaccctgttcgtcaccctggccactccgctggacgacaaccagatcctgctggcgcagcgcatcgaccagcatctcgccgaacagattccctcgcacatgctgcccagccaattgcatgtgctgccggccttgccgcgcaacgacaacggcaagttggcgcgcgccgagctgcgccacctggccgacaccctttatcacgacaaccttccggaggaacgggcatgttga

SEQ ID NO: 318473 - DNA, 522 bp, Pseudomonas aeruginosa
atgccccatagctacaggaaaatggaatcgccggtcgggacactgaccctggtagccagggacgatgcctttctggtcgcgattctttggcagcatgagcgtcccaaccgagtaccgctggacgagatgcggctctccgaggacagctccctcctggcggaaaccgaacgccagttgcgggaatatttttccggcaaacgttcccggttcgaactcccgctcgacttccaaggtaccgaatttcagaaaaaggtctggtccgccctgctcaccattccattcggcgagacccgcagctatacggaaatagccgtgcagatcggcagccccaacgcagtacgggcggttggagccgccaacggacggaacccactgtccattgttgcaccttgccatagggtgatcggagcctctggcggcctcaccggtttcgccggtgggttggccgccaagcagtggttgctgcgtttggaaacccgaggcaggacaccagacctgttgagcatgatcgaggacgagtga

SEQ ID NO: 318474 - DNA, 2520 bp, Pseudomonas aeruginosa
gtggccatatttaggaaaaagttcgacttcgaggtgtccgtctattccaggtcttcctgtctcgtggccttgggattggctttgcctgccgtaaccttcgcggtggaattcaacgccgagttcctgaacaacgagggcggggcgcccgttgaactgaagtatttcgagaacggcaactcggtgtcgcccggcacttacagcgtcgacattcatttgaaccagatcatgatccggcgcgaagatgtcgtgttcagtgccgattccgaaaccggaagcgtccgcccggtcatccgggtggggctgctcaaggagatcggggtcgatattgcccggctgactcgggacaagctcattccggccaacctggaaaacaatacgcccctgaatgtcgccgaactcatccctggtgcatccgtcgagttcgacgtcaacagtctttccctgttggtcagcattccacagctgtatgtacagcggcactcgcgtggctatgtggatccctctctttgggatgacggtgtcaccgcgttgttttccaactaccaggccaacttcacgcgcaacaccaattttggccagaacagcgattaccgctacctgggcctgcgcaatggcttcaacctatttggctggcgcctgcgcaacgactcctccctgagcgggggtaccggcatgcgcaacaagttcagtagcaaccgtacctatgtggaacgtgacattcgtgccctgaaggggaccttgtccctcggtgagttgtatacctccgctcagggggatgctttcgagagcgtgcgtatgcgcggcgtgcaactgcaatccgatatcggcatgctgcccgacaacgagatcagctataccccggtggtgcgcggtatcgctgaaaccaatgcgacggtcgaggtgagccagaatggcttcgtgatctattccaccaacgtaccgcccggtgcgttcgagatcaccgacatctatcccagcggctccaatggcgacctagaggtcaagatcatcgaggcggacggacgccagcggtccttcaagcagtcctattcctacctgccggtcatgacccgcaaggggaacctgcgctatggcctggccgccggtgaataccataatgacggccagccgtcggtcaacctgctccagggatcggctgtgtatggcttgtccgacagggttaccggctttggcggcctgctggctgccgagaagtacaatgccaccaacctgggcctcggcttcaacacgcccctgggcggtctttctgcggacgtgacccatagccagtcccgcacgcgacggggtgggcgcaaccaggggcagagtctgcggcttctctattccaagaccatcaacgccaccgaaaccagctttaccgtggtgggctatcgctattccacggaaggctaccgtactctcagccagcatatcgacgacatgtccgacgagagctacctctatggctcaagttccagtcggcagaagagccgcatagacctgacggtgaaccagacgctgttccgacgcagttcgctctatctcacggcgggcgaaaccacatattggaatcgccccggcagcagccgtcgcgtgcagttcggcttcagcagcggcatcaagcgcgcgagctacagcctggcggtttcccgtacccaggagacggggtcgttcgggcgctccgatacccagttcacggcctccgtcagcatccccttgggcggtagcgcacgctccagtcaggtatatgccaatgccgtgagttcacagcatggtgattcgagcctgaacaccggtatctccggatacctggatgaagccaatgcgttcaactacagcgcacaggccaactacagcaaggacggcggcaactccggcagcgtcggcctgggttgggacacgtccaaggccaagttgtccgccaattacagccaggggcgcgacaacaagcagatcaacctgggagcaagcggttcggtagtggtgcatccggggggagtgaccttcggccagccggtgggggaaacgttcggcctggtggaggttccggaggtcggcggcgtcggcctcgacggctactcttcggttcgcaccgacggccgtggctatgccgtgctcccctacatgcaaccctatcgttacaactgggtgaacctggataccaatacccttggaagcgataccgagatcagcgacagcacgcaaatggccgtgccgacccggggcgccgtgatcgccaagcgtttctccgcggagtccggtcggcgggtgcagttcgacctgagcatggactctggaggaaagattcccttcggtgcacaggcatacgacaaggaagagcgggtcgtgggaatggtcgacaacctgtcccgtttgctggtgttcggtatcgaggaccaggggcgcctgtccattcgctggagcgatggctcctgttccgtcgactatcagttgccgcccaggaacaaggacctgacttacgaacgagttgcgctcagttgccgtcggtcctcgatctga

SEQ ID NO: 318475 - DNA, 714 bp, Pseudomonas aeruginosa
atgaaatatccattttcttccagagttatctggggtggcatccttttgcttttttccacccttgccaatgcgggaatcacgctgggaggaacccgggtcgttctgcaggcgcctgccaaggaggctgcaatcctggtcaggaaccaggcttccaatgacgtgatgattcaatcctgggtagaggctgataatggggcagataaacgtgaggttccgtttgtcatcacgcctgccctcagtcgtttgggaggcaataagcagcaaaccctgcgtatcctgtttcaaggggaaggcttgccgagcgacagggaatccgtattccgcctgaacgtccaggaaattccacaaaaatctgcgtcggctaatacgttgcagatagctttgcgccagcgtatcaaggtcttctaccgccctgataacttatcgggaacttccgccgaagcgcctggaaagttgaactggcgtcttgtccggcagggtggaaagtcggttgtcgaagtttccaacgatactgcgtttcatgtctctttcgccaacgtgaaattaaaagctggcaatgcctcctatgtcgttgatgccgacatggtcgcgccgaagtcgagtcgccgattcgaagtcaagggaactccccccggcgtttctggaaatatcgagttccagagcgtaaatgactatggcggactcgataaacattccagctccttatccgactga

SEQ ID NO: 318476 - DNA, 618 bp, Pseudomonas aeruginosa
gtgtccatttccatgaaaagcattctggctgccgcagtagccagcctggtcgtcggcaatgccatggcggcagacggcaccatcaatttcaaaggtgaaatcaccgcggccgcttgcagcatcactggtggtgccggcaccaccgttggcggtgcagcgggcaaccagaccatcgacgtaagcctcggcaagatcagcatcgactcgctgggcggcaccgcgggcggcagcatcgctggtggtaccagcctgaacctgaacctggactgtggcaagaccggtaccggtctgaccaccgtgaagctgaagttcgacccggtgtccggtaccggcatcgattcgcacaacgaaagcctgctgaagcttggtaaagactccactgccactggcgtcggtattggcatctatggctccgatggcaagctgctgaacctgtcggcgaacgagaccattaatgctcccttgaattccaatattgaaaaagatggcgaaggcaatgacatcaccgtctacagcgccaatctgaatctgcgggctgcttacgtcaagtctggcgctgcggccgctacggcaggtattgccaacggctccttgccgttcaccctggaatacaactaa

SEQ ID NO: 318477 - DNA, 642 bp, Pseudomonas aeruginosa
ttggctatccgctcggaagactccgatgggttctggcaagccttttcaaggcaggaacaagactcgaccaataggctgctgcccaccaccctcgcagccccttttatcctgtgcgcaagttcggccactccttgcaggtctgcgagtgcaagcaattccgccaaccgagtacgatcatcccgactgctggccaataaagtttccagcaaccgctgcaatgcagccggctcgccgccggtaatggcctccagcgaacgaatgtcgaaaagactttccatcggcgattccgaaccaagctctttcatacagactccatcgatatgcttaaaggaaggtcactgcgcgttgcgctgtcccgcctgcgggacttcaggcatccgtagaacgacaaggccgtacatgccgtccgggccagttatccgcaagcagcataagggaattgcctccgcctctgccgtccaaacaggggagcatcgcttgttgcgtctcctcgaacggacccaatcggccctggaaacgctcatggccggcacggagtctacctttgccagccgaccgcagccggcccgaccgctcgtttcggggagggaaactcctacggtaagtctgtgcgaagaggcgtcatcggttgcgaccgcctga

SEQ ID NO: 318478 - DNA, 705 bp, Pseudomonas aeruginosa
atggcaaatccattggacggcttgcacgacgcggaccacgcgaaggccgaaaaaacggaaggaaggatgccatcggtcagcgatcccagggcgcttgcccgtcttctggaattgatactgtccaccgcccaggccggtctcgccttctccaaggaccgcttcgacatcggacgctttcgcgcgctccagcatgccgtcgccgaattcatcgccagcgaccagggggtagcgtacgaacgggtcgagaactggatcgctctggacagccactacccgaccccgaaactggacgtccgtgcgttgatcctcgactcgcaacagcgggttctgctggttcgggaggcctcggatagtcgctggaccctaccaggcggctggtgcgacgtaaacgagtcgccggcagatgcggtagttcgcgaaacccaggaagaaagcggactggaagttcgagcgatacgcctgttggcattgctggacaagcacaagcatccccaccctccccaactgccgcatgcgttgaaagccttcttcttctgccacgtcaccggtggcagtcttcagcaacaaacggacgaaacgtcggcggccgagtacttcacggtggacgccttgccgccgctttccgagcaccgggtactggcctcgcagatccagacgttatggcagcgaatccacgcggaaacgccagaggcgcttttcgactag

SEQ ID NO: 318479 - DNA, 561 bp, Pseudomonas aeruginosa
atgggcaaaccattccttcacgctcggcgctggctgctgccgctcaccttcatctgcacggcaacgactgcggtcgccgaaagcaccggcgactactggatcgtctacggcaagggcgaacgctacaacaacgaggtattcgtcgccaacgccaccggcatcttgcagcaacccaaaggtatccagtcggcgcagatcatccagctattcgaagaccggtcgatgccgacgctgacggcctacgaggtccagttcaagtgcaaggagcgcagggtccgcttcgacaacgcacgcgccatgcgccgcatcgacaacgtcatcaccaacgtgaaaaccgtcgacggctggatcgacccggggaaatacgattactggctgcaacgctcgttcgctttcgtctgcgccccggccatccgcgacaacaaccagatgttgccgctgggcaagatgcccattgcacgcatggtgcagaccgtccaggcaatgttcgtcgaactgcagggcgtccaggccaagaaacagaccatgcgcgatctggatgcgatgctcggcaacgagtag

SEQ ID NO: 318480 - DNA, 405 bp, Pseudomonas aeruginosa
atgccgaccccggttttcataaagagaacggtactgtttggcgactgtgatcccgaagggatcgtctatacgccacgtttttcatactttgtgctggaagcggtgcaggaggcgctcggggtctggctgggcggcccggggctcagaaccctcctggggttcaggattcttcccccggcgagagcgttctccctggaattcctgcatccggtcacctgggacgacgagctcacgatgcaggtgggcgtgtcgaacgtggggacgcattctttctcgttttcagtcgaaggacgtctttcgccggacgtggtggcgttcactgcgagcctgacgcaggtctgtgtctccccggatacccgcgaagtcatggaggtccccgcgcagctccgcgcgctcctcgcatag

SEQ ID NO: 318481 - DNA, 675 bp, Pseudomonas aeruginosa
atgaaccagaagaaagcggtcatcctgctctccggcggcctcgactccgccaccgttgtcgccatggccaaggccgacggctacgcctgctacaccatgagtttcgactacggccagcgccatcgcgccgagctgcaggccgccgagcgcgtggcccggcagttgggcgtgatcgagcacaaggtgatagggctcgacctcaatggcatgggcggctcggcattgaccgacgagagcatcgcggtgcccgagtcgcctagcgaaggtataccggtgacttacgtgccggcgcgcaatacggtgttcctctcgctcgccctgggctgggccgaggtcctggatgcccgtgacatcttcatcggtgtgaatgcggtggattactctggttatccggattgtcgccctgagttcgtcgaggctttcgaacgcatggcgaacctggcaaccaaggcgggcgtggaaggcaatggcttccgcatccaggcgccgctgcagtatctgtccaaggcgcagatcatccaggcgggcgtggcgcgtggggtggattacggcctgacggtgtcctgttatcaagccgatgagcagggacgtgcgtgcggcaaatgcgatagctgccggctgcgtgcggatggcttcgcggcggctggtatttccgacccgacgccatatttctga

SEQ ID NO: 318482 - DNA, 648 bp, Pseudomonas aeruginosa
atgcaacagaccctgcgcatcaccgagattttctactcgttgcagggggaaacacgtaccgccggcttgccgacggtcttcgtgcgcctgaccggctgccccttgcgctgtcactattgcgataccgcctatgccttcagcggcggcgacgtcgttagcctggacgccattttcgagcgggttgccgcctacaagccccgctacatctgcgtgaccggcggggagccgctggcccagccgaattgcatctctctgctggaacggctctgcgacgccggctacgaggtttccctggaaaccagcggggctctcgacgtgtcacgggtcgacccgcgcgtaagcaaggttctcgacctcaagacgccgggatctggcgaggtcggacgcaaccgatacgaaaatatcccgttgctgaccgacaacgatcaggtgaagttcgtcgtctgttcgcgagaggactacgactgggcggtatccaagctgatcgagtaccgcctcgaccagcgtgccggtgaagtcctgttctcgccgagccaccatcaggtcagcgcgcgagaactggccgattggatcgtggccgacaacctgccggtccgcctgcaattgcaactgcacaagattctctggaacgacgaaccgggccattga

SEQ ID NO: 318483 - DNA, 825 bp, Pseudomonas aeruginosa
atgcccaagcacctgcgtgtcctgacgttcctcgcgctcagcctgccattagcggcctgggcggaagttcctgtgtatgacggcgttgccgccaacaatggcggcaacgttcctccttccgggtatggcacggcaggtgccggcggcgcctttgccggaggtggggtgacaacccccacctccgtgcagggcgaactgttcatgcagctccagcagatgcaggacgagttggctcgcctgcgtggcacgctcgaggagcagcagaaccagatccagcagctcaagcaggaaagcctggaacgctaccaggacctcgaccgtcggatttccggtggtggcgctcccgctgcacagaattccgcacccgctggcgccatcaacgccaatggggcgcctgcggctcccgcaggcaacaacgcaccggcgccgagcagcgagccgggcgacccggcgaaggagaagctctactacgatgcggccttcgacctgataaagagcaaggatttcgacaaggcgagccaggcgttcaatgccttcttgcgcaagtacccgaacagccagtactccggcaacgcccagtactggctcggcgaggtgaacctggccaagggcgacctgcaaggtgccggccaggccttcgcgcgggtcagccagagctaccccagcagccagaaggtgcccgactctctgtacaagctggcggacgtcgagcgtcgcctgggtaacaacgacaaggccaagggtatcctccagcaggtcatttcccagtacccaggcacttcggccgctcaactggcgcagcgcgatctcaagaaccttcgctga

SEQ ID NO: 318484 - DNA, 507 bp, Pseudomonas aeruginosa
atggaaatgctgaaattcggcaaatttgctgcgctggctctggccatggctgtggctgtgggttgctcctccaagggcggcgatgcttccggtgaaggtgccaatggcggcgtcgacccgaacgcaggctatggcgccaacagcggtgccgttgacggcagcctgagcgacgaagccgctctgcgtgcgatcaccaccttctacttcgagtacgacagctccgacctgaagccggaagccatgcgcgctctggacgtacacgcgaaagacctgaaaggcagcggtcagcgcgtagtgctggaaggccacaccgacgaacgcggcacccgcgagtacaacatggctctgggcgagcgtcgtgccaaggccgttcagcgctacctggtgctgcagggtgtttcgccggcccagctggaactggtttcctatggtaaagagcgtccggtcgctaccggccacgacgagcagtcctgggctcagaaccgtcgcgtcgagctgaagaagtaa

SEQ ID NO: 318485 - DNA, 1299 bp, Pseudomonas aeruginosa
gtgagtaccctgattcgcattgcgctgttcgccctggccctggtggcaggtgctgcgcaggctgccgacccgctggtgatctccagcggtaacgaccgtgccattcccatcgccgtggtgccgttcggcttccaggggggcaacgtgttgccggaagacatgtccaatatcatcggcaacgacctgcgcaactccggctacttcgagccgctgccccggcagaacatgatcagccagccggcgcaggccagcgaagtgatcttccgtgactggaaggcagttggcgtcaactacgtgatggtcggcaacatcgtgcctgccggcggacgcctgcaggtgcagtacgcattgttcgatgtcggcaccgagcagcaggtcctgaccggcagcgtgaccggcagcaccgatcagctccgcgacatgtcgcactacatcgccgaccagtcgttcgagaagctcaccggtatcaagggcgcgttctccaccaagatgctctatgtcaccgccgagcgtttctcggtcgacaacacccgctacaccttgcagcgctccgactacgacggcgcccgcccggtgaccctgctgcagtcgcgcgagcccatcgtgtcgccgcgcttctcgcccgatggccgccgtatcgcctatgtctccttcgaacagaagcgcccgcgtatcttcatccagtacgtcgatactggccgtcgtgagcagatcaccaatttcgagggcctgaatggcgctccggcattctcccctgacggcaaccgcctggccttcgtcctgtcgcgcgacggcaacccggaaatctacgtcatggaccttggcagccgcgccctgcgccgcctgaccaacaacctggcgatcgataccgaacccttctggggcaaggacggctctaccctgtacttcacctcggaccgtggcggcaagccgcagatctacaaaatgaacgtgaacagcggtgccgtggaccgggtaaccttcatcggcaactacaacgccaacccgaaactctcggccgacgagaagaccctggtaatggtccaccgccagcagggctacaccaacttccagatcgccgcccaggacctccagcgcggcaatctgcgggtgctgtcgaacaccactctggacgattcgcccactgttgcgcccaatggcaccatgctaatctacgccacccgccagcaggaccggggcgtgctgatgctcgtatccatcaacggacgcgtacggatacctctccctaccgctcagggcgatgtgcgcgagccttcctggtccccttacctgaactga

SEQ ID NO: 318486 - DNA, 1044 bp, Pseudomonas aeruginosa
ttgaagcaacagttcgaacgctcgccttccgagagttatttctggcccgtcgtcctggcggtggtcctgcacgttctgatcttcgccatgctgttcgtcagctgggcgtttgctccggagcttcctccctccaagccgatcgtgcaggccacgctctaccagctcaagtcgaagagccaggcgacgacacagaccaaccagaagatcgctggcgaggcgaagaagaccgcctccaagcaatacgaagtcgagcagctcgaacagaagaagctcgagcagcagaaactcgagcaacaaaagctggaacagcagcaggtcgctgctgcgaaagcggcggaacaaaagaaggctgacgaggctcgaaaggccgaggcccagaaagccgccgaggcgaaaaaggccgatgaagccaagaaagctgccgaggccaaggccgccgaacagaagaagcaggctgacatagccaagaagcgcgccgaggacgaggccaagaaaaaggccgctgaggacgccaagaaaaaggcagccgaggacgcgaagaagaaagcggccgaggaggccaagaagaaggctgctgcggaagcggcgaagaagaaagccgccgtcgaggccgccaagaaaaaggccgccgccgctgccgcggcagcccgcaaggctgccgaggacaagaaggcgcaggcattggccgagttgctttcggatacgaccgagcgccagcaggccctggccgacgaggtgggcagcgaggtcaccggcagtctcgacgacctgatcgtcaacctggtgagccagcagtggcggcgtcctccatcggcgcgtaatggaatgagcgtagaagtactgatcgaaatgctgccggacggtaccatcaccaatgccagcgtcagccgttcgagtggcgacaagcctttcgacagttcggcggtggcggcggtgcgcaacgtcggccgtattcccgagatgcagcaattgccgcgggctaccttcgacagcctgtatcgtcagcgccgcatcatctttaaaccggaggatttgagtctgtga

SEQ ID NO: 318487 - DNA, 441 bp, Pseudomonas aeruginosa
atggcaagggttcgtcacaagcgcaagccggtcgcggaaatgaacgtggtgccttacatcgacgtgatgctggtactgctggtgattttcatggtgaccgcaccgatgcttaaccagggggtcaaggtcgacctgccgaaggtgtccagcgaggcgttgcctcaggacaacaacaagcaggtcctgaccctttcggtgaaggccgacggttcctattactggaacgtcggcagcgaagtggatactgaaaaacagaccgatagtgccgtgtcgttggaacagatgaccgatgcagtcaccaagatcatgagtgcccgtccggacacccaggtattcatccgcggcgacaaggcggtgaactatggtgcggtggttggcgccatgggtgccttgcagcaggccggtgtgcccaacgtcgggttgattaccgaggccccctga

SEQ ID NO: 318488 - DNA, 696 bp, Pseudomonas aeruginosa
gtggaaccgaacgtcgtcgaccatacctccatgtggagcctgatcagcaacgccagtatcgtggtgcagctggtcatgctgaccctcgtggccgcctcggtcacatcctggatcatgattttccagcgcggcaatgccatgcgcgccgccaagaaggcactggatgctttcgaagaacgcttctggtcgggcatcgacctgtccaagctgtaccgccaggccggtagcaatccggacccggactccggcgtcgagcagatcttccgtgccggcttcaaggagttttcccgtctgcgccagcagcccggcgtcgatcccgatgcggtgatggagggcgtggcgcgcgccatgcgtgtggccatctcccgtgaggaggagaaactcgaagccagcctgccattcctggcaaccgtcggttccaccagcccgtacgtcggcctgttcggtaccgtctggggtatcatgaactccttccgtggcctggccaccgtgcagcaggcaaccctggccaccgtcgccccgggtatcgccgaagcgctgatcgctaccgccatcggcctgttcgccgcgatcccggcggtcatcgcctacaaccgcttctccgcacgttctgagatgctgatcggtcgttactacaccttcgccgacgagttccaggccatcctgcaccgcaaggtgcacaccagcgacgactaa

SEQ ID NO: 318489 - DNA, 447 bp, Pseudomonas aeruginosa
atgcgcgcgcaacacgggggaaagccgttccagcagcgtttccgggtctattacgaggacacggatgccggcggcatcgtctattacgtcaactatctcaagttcatggaacgggctcggaccgagcggctgcgagctttggggttcgcccaatcgcaactggtcggcgacaatctgctgttcgtcgtgcactccgccgaggcgcgttaccacgccccggccaagctcgatgatgaactgcttgtcagcgccgaggtcgaggagttgaaccgggcgagcctgaagtttcgtcaacaggttcgtcgagcgtcggactccgtcctgctctgcgaggggcggttcctggtggcgtgcgtgcgagcggacaccctgaagccacgtgctatccccgaaacgttgcgtgcggcttttgccggaagcccggattctttttcagcaggagattaa

SEQ ID NO: 318490 - DNA, 1059 bp, Pseudomonas aeruginosa
atgatcgagcctgatcgcctcatatccgccgtttccggtcgcgaacgcgatgagcagctggaccgcgccattcgcccgctgaagctggccgactacatcggccagcccagcgtgcgcgagcagatggagctgttcatccatgccgcgcgcggccgccaggaggcgctcgaccatacgctgatcttcggtccgccggggctgggcaagacgaccctggcgaatatcatcgcccaggaaatgggcgtttccatcaagagtacttccgggccggtgctcgagcgtcccggcgatctcgccgcgttgctgaccaacctggaggccggcgacgtcctgttcgtcgacgagatccaccgtctttcgcccatcgtcgaagaagtgctgtatccggccatggaagatttccagctggacatcatgatcggcgaagggcccgcggcccgctccatcaagctggacctgccgccgttcaccctggtcggcgcgaccacccgtgccggcatgctgaccaatccactgcgcgatcgcttcggtatcgtccagcgcctggagttctacaacgtcgaggacctggcgaccatcgtcagtcggtcggccggcattctcggcctggagatcgagccgcagggcgcggcggaaatcgccaagcgcgcccgcggtacgccgcgaatcgccaatcgcctgctgcgccgggtacgcgacttcgccgaggtccgggggcagggcgacattacccgggtgatcgccgacaaggcattgaacctgctcgatgtcgacgagcgtggcttcgaccacctcgaccgtcgtctgttgctgaccatgatcgacaagttcgatggcgggcctgtaggaatcgacaacttggctgcggcgttgagcgaggagcggcacacgatcgaagatgtactggagccctatctgatccagcagggctacatcatgcggacaccgcgggggcgcgtggtaacacgccatgcgtacctgcactttggcctgaatattccgaaaaggttggggccgggggtgacgacggatctgttcacgtctgaagatggtaattaa

SEQ ID NO: 318491 - DNA, 606 bp, Pseudomonas aeruginosa
gtgatcggacgcatgcgtggcaccctggcggagaaacagccgccacacctgatcctcgatgtgaatggcgtcggctatgaagtggaagtgccgatgacgaccctctatcggttgccttcggtgggcgagccggtgaccttgcatacccatctggttgtgcgtgaggatgcgcacttgctctatggcttcgccgaaaagcgcgagcgagagctgttccgtgagctgatccggctcaacggcgtgggtccgaaactggccctggcgctgatgtcgggcctggaagtggacgaactggtgcgttgcgtccaggcacaggacacctccaccctggtgaagatccccggtgttggcaagaagaccgccgagcgcctgctggtggagttgaaggaccgcttcaaggcttgggaaaacatgcccacgattgcaccgttggtgatggaaccccgtgccagcgctacagtctcaagcgccgaggccgatgcagtcagcgcgctgatcgccctcggcttcaagccacaggaagccagtcgtgccgtcgcagccgtaccgggagaggatttgtccagcgaagaaatgatccgccaggccctgaagggcatggtctag

SEQ ID NO: 318492 - DNA, 534 bp, Pseudomonas aeruginosa
  misc_feature (512)..(521): n is a, c, g, or t
atgactttgattctagggattgacccgggctcgcgcatcaccggcttcggcgtggtgcgggaaacggcgcgcggttgcgaatacgtggcgtccggatgtatacggaccggtaatggccccttgcacgagcgtctacacgtggtgtttcgcagcgtccgcgaggtgatccgcacccatggcccgacggccctgagcatcgagcaggtgttcatggcgcgcaacgccgattcggccctgaagctggggcaggcgcggggggcggccatcgtcgcggcaatggaggaggggttgagcgtggcggagtacaccgcctcgcaggtcaagcaggcagtcgtggggaccggcggtgcagacaagcagcaggtgcagatgatggtcatgcatctgttgaagctgacccagaaaccgcagatagatgcttccgacgccctggccatcgccctgtgtcatgcccatacccaacagagtctggtcccccatggcctggtgggcgcacgccgacgtggcggggnnnnnnnnnncctgcgtctttga

SEQ ID NO: 318493 - DNA, 747 bp, Pseudomonas aeruginosa
atggctggtcattctaaatgggccaacatcaagcaccgcaaagagcggcaagatgccaagaaaggcaagatctttaccaagctgatccgtgagctgaccgtcgctgcaaggcagggcggcggcgtaccggcggacaacccccgtctgcgcctggccgtggacaaggcgctgaccgccaacatgacccgcgataccatcgaccgtgccattgcacgcggcgtcggctccaacgatgccgacaacatggtcgagctttcctatgaaggctatgcgccgagcggcgtagcgatcatcgtcgaggcgatgaccgacaaccgcaaccgtacagctgcggaagttcgtcatgccttcagcaagtgtggcggcaacctgggcaccgatggttcggtcgcctacatgttcgagcgcaagggacagatcagcttcgctcccggcgtggacgaggaagcgctgatggacgcggccctggaggctggcgccgatgacgtggtagtcaacgacgatggctccatcgacgtgttcaccaccttcgccgacttcatttcggtgaacgaggcgctggccgccgccggattcaagggcgacgaagccgaagtcaccatgatcccttcgaccaccgcgaccctggacctggaaaccgcgcagaaggtgctcaagctgatcgacatgctcgaggacctggacgacgtgcagaacgtctattccaatgccgatatcccggacgacgtgatggcgcagctcggctga

SEQ ID NO: 318494 - DNA, 1776 bp, Pseudomonas aeruginosa
atgatgcgcagccactattgcggccaactgaacgagagcctggacggccaggaagtcaccctttgcggttgggttcaccgccgccgcgaccatggtggagtgatcttcctcgatgtgcgcgatcgcgaggggctggcccaggtggtgttcgatccggaccgtgcggaaaccttcgccaaggccgaccgggtgcgcagcgagttcgtggtgaagatcaccggcaaggtgcgcctgcgccctgaaggcgcgcgcaacccgaacatggtgtctggctccatcgaggtactgggctacgaactggaagtgctgaaccaggccgagactccgccgttcccgttggatgaatactccgatgtgggcgaggaaacgcgcctgcgctaccgcttcatcgacctgcgtcgtccggagatggccgccaagctgaagctgcgcgcgcgcatcaccagcagcattcgccgctacctggacgacaacggcttcctcgacgtcgagaccccgatcctcggccggccgacgccggaaggcgcgcgcgactacctggtgccgagccgtacctacccgggccacttcttcgccctgccgcagtcgccgcagttgttcaagcaactgctgatggtcgccggcttcgatcgctactaccagatcgccaagtgcttccgtgacgaggacctgcgtgccgaccgccagccggaattcacccagatcgacatcgagaccagcttcctcgacgagagcgacatcatcggcatcaccgagaagatggtgcgccaactgttcaaggaagtgctggatgtcgagttcgacgagttcccgcacatgccgttcgaagaggccatgcgccgctacggttcggacaagcccgacctgcgcatcccgctggagttggtggacgtcgccgaccagttgaaggaagtggagttcaaggtcttctccggtccggccaacgatccgaaggggcgtgtcgccgccctgcgtgtgccgggcgccgcctccatgccgcgcagccagatcgacgactacaccaagttcgtcggcatctatggtgccaagggcctggcctacatcaaggtcaacgagcgcgccaagggcgtggaaggcctgcagtcgccgatcgtgaagttcatccccgaggccaacctgaacgtgatcctcgatcgcgttggcgcggtcgacggcgacatcgtgttctttggcgccgacaaggccaagatcgtttgcgatgccctgggcgcgctgcgtatcaaggtcggccatgacctcaagctgctcacccgggagtgggcgcccatgtgggtcgtggacttcccgatgttcgaggagaacgacgacggctcgctgtccgcgctgcaccacccgttcacctcgcccaagtgcaccccggccgagcttgaggccaatccgggcgcggcgctttcccgcgcctacgacatggtgctcaacggtaccgagctgggtggcggttccatccgtatccatgacaagtccatgcagcaggcggtgttccgtgtgctgggcatcgacgaggcggaacaggaagagaaattcggcttcctgctcgacgcgctcaagtacggtgcgccgccgcatggcggcctggccttcggcctggatcgcctggtcatgctgatgaccggtgcatcgtctatccgcgaagtgatcgccttcccgaagacccagagcgctggcgacgtcatgacccaggcaccgggttccgtggacggcaaggccctgcgcgagctgcacattcgcctgcgcgagcagccgaaggccgagtga

SEQ ID NO: 318495 - DNA, 471 bp, Pseudomonas aeruginosa
atggaaatcaatatcggaatcggcgaacaggatcgcgcagccattgccgagggcctgtcgcggctactggccgacacctacaccctctacctgaaaacccacaacttccactggaacgtcaccggcccgatgttcaacacgctgcacctgatgttcgaaggccagtacaccgaactggccgttgccgtggacgacatcgccgagcgcatccgggccctgggcttcccggcgcccggcacctacgccgcctacgcccgcctctcgtccatcaaggaggaggaaggcgttccggaagccgaggagatgatccggcaactggtccagggccaggaagccgtggtgcgcaccgcccgcagcatcttcccgctgctggacaaggtcagcgacgaacccaccgccgacctgctcacccaacgtatgcaggtgcatgaaaagaccgcctggatgttgcgcagccttcttgccagctga

SEQ ID NO: 318496 - DNA, 615 bp, Pseudomonas aeruginosa
atgttgaaaatcgtccttctggtcacgggcgtcgccgccctattgctgtccttcattcccagcctaagaaccgaagccacacccttcctgcaacatcccgatgccatctacctggccattctgggcctgatcaacctgctcttcgctcccgtactgcaatcgtcacatccaacccgcccgctgcaggccggcgcagccgccctgctggtcctgggcgtcgtcctgcaggcactgatcctgctggcgccgctgccgaccatcgccgaccagccggcgatcgtcctgcccctgctaagcctggtgctggccacggccctgcaactggcgggcagcctgaaacccggcaagccggtctcgcgcagcgccagcgccccggcagccctcggcggcagccaggacagcggcaaccgggagaccggtaccgtgaagtggttcaacacctcaaaaggtttcggcttcatttcccgcgattcgggcgaggacatcttcgtccacttccgagcgattcgcggcgaaggccaccgcatcctcatcgaaggccagcgcgtggagttctcggtggtacaacgggacaagggcctgcaggcggaagacgtgatcgcctcccgccgctga

SEQ ID NO: 318497 - DNA, 210 bp, Pseudomonas aeruginosa
atggagctggacgcgcgcatggatgacctggaatgccgccaggctttccaggatgacactttgcaggctctcaacgatgtggtggtcgagcagcagcgcagcatcgagcgactgcagcttcaggtcgcggcattgatcaagcgtctggaagacgtccaggggctggtgggcgaggcgggggaagacgaagcgcctcctccccattattga

SEQ ID NO: 318498 - DNA, 429 bp, Pseudomonas aeruginosa
atgttcgctttggatccccggctggagcaggacaccctgttgctcggcgactttcccctcagccgcctgctgctgatgaacgatgcccgctatccgtggttcatcctggtgccgaggcgggaggatgtcaccgagctgttccagctcgatgtcgatgaccggcaggcgctgtggcgcgaggccacgctgctggcagaggtcctcaaggacaccttccgtgcggacaagatgaatgtcgctaacctgggcaatgtggtcagccagcttcacatgcacgtgatcgtccggcgacgtggtgacgacgcctggcccggccctgtctgggggcgccatccggctcggccttattcttccgagcaggtcgaggcgatccgcggcaagttgcggatggtgctgaccgacggcttccgttttgccggggaggcctag

SEQ ID NO: 318499 - DNA, 1326 bp, Pseudomonas aeruginosa
atgaaagtgatgaagtggagcgccattgcactggcggtttccgcaggtagcactcagttcgccgtggccgacgcattcgtcagcgatcaggccgaagcgaaggggttcatcgaagacagcagcctgaacctgctgctccgcaactactatttcaaccgtgacggcaaggaaggtcggggtgatcgcgtcgattggacccagggcttcctcaccacctacgaatccggcttcactcaaggcaccgtgggcttcggcgtcgatgccttcggctacctgggcctgaagctcgacggcacctccgacaagaccggcaccggcaacctgccggtgatgaacgacggcaagccgcgcgatgactacagccgcgccggcggcgccgtgaaggtgcgcatctccaagaccatgctgaagtggggcgagatgcaaccgaccgccccggtcttcgccgctggcggcagccgcctgttcccgcagaccgcgaccggcttccagctgcagagcagcgaattcgaagggctcgacctcgaggcaggccacttcaccgagggcaaggagccgaccaccgtcaaatcgcgcggtgagctctacgccacctacgccggccagacagccaagagcgccgacttcgctggcggccgctacgcgatcaccgacaacctcagcgcctccctctatggcgcagagctgaaagacatctatcgccagtactacctgaacaccaactacaccatcccgctggcctccgatcaatcgctgggcttcgacttcaacatctaccgcaccaccgacgaaggcaagtccaaggctggcgacatcagcaacaccacctggtccctggcgggcgcgtataccctggacgcccacaccttcaccctggcctaccagcaggtgcatggcgacgagccgttcgactacatcggcttcggcggcaacggttccggcgccggcggcgactcgatcttcctcgccaactccgtccagtactccgacttcaacggtcctggcgagaaatcctggcaggcccgctacgacctgaacctggcctcctacggcgttcctggcctgaccttcatgctgcgttacatcaatggtaaggacatcgacggtaccaaggtcgattccagctcctcctatgcaggcctgtacggcgaggatggcaagcaccacgaaaccaacctcgaagccaagtacgtggtccagcccggtccggccaaggacctgtcgttccgcatccgccaggcctggcaccgtgccaacgccgaccagggcgaaggcgaccagaacgagttccgcctgatcgtcgactatccgctgtcgatcctgtaa

SEQ ID NO: 318500 - DNA, 408 bp, Pseudomonas aeruginosa
atgaacgcggcgcaggtacaggcgttgatccgcatggggctgcccatggccgaggacatcgattttcgtgtcgagcgtctcgatgaacgacatgcgctggcgcgcataccttttcacggcaagctggtgcgtcccggtggaacgctgtccggcccgaccatcatggcgctggccgacgcggcgatgtacgcggtcattctcgggcgtctcggggcggtcgagatggccgtgacctcgaacctgaacatcaacttcctcagcaagcccaggcccgaggacctgttggccgaggcgagcatcctcaagctggggcggcgccaggtcgtctgcgaggtcggggtgttttcgcagagtaatgaggaagacctggtggcccatgtcaccggtacctacgcccttcctttatag

SEQ ID NO: 318501 - DNA, 1716 bp, Pseudomonas aeruginosa
atgcgtaccagtcagtatctgctttccacgctcaaagaaacccccgccgacgcggtggtaatcagccatcaactgctgcttcgcgccggcatgatccgtcgcctggcctcgggtctctacacctggctgccaatgggcctgcgggtactgcgcaaggtcgagaccatcgtccgcgaggaaatgaacgctgccggcgccctggaagtgctgatgccggcggtgcagccggccgagctgtggcaggagtcggggcgctgggagcaatacggccctgagctgctgcgcctgaaggaccgccacgagcgcgaattctgcgtaggcccgacccacgaagaagtgatcaccgacctcgcgcgcaacgagctgaacagctacaagcaactgccgatcaacttctatcagatccagaccaagttccgcgatgagatccgcccgcgcttcggcctgatgcgcggacgcgaattcatcatgaaggacgcctattccttccacctgagccaggactcgctgcagcagacctacgacgggatgtaccaggcgtacagcaagatcttctcccgcctcggcctggatttccgtcccgtgcaagccgacaacggctccatcggcggcagcggctcccatgagttccacgtgctggccaactccggcgaggacgatatcgtcttcagcgacagctccgactacgccgcgaacatcgagaaggccgaagccgtgccgcgcgagagcgcccgcggcagcgccaccgaggacatgcgcctggtcgacacgcccaacaccaagaccatcgcggccctggtggacggcttccagctaccgatcgagaaaaccatcaagaccctggtggtgcatggcgccgaagaaggcaccctggtcgccctgatcgtccgcggtgatcacgagctcaacgaaatcaaggccgccaaccagccgctggtcgccagcccgctggtattcgcttcggaggccgagatccgtgccgccatcggcgccggccccggctcgctgggcccggtcaacctgccgatcgcctgcatcgtcgaccgctccgtcgccctgatgagcgatttcgccgctggcgccaacatcgaggacaagcactacttcggcgtgaactgggagcgcgacctgccgctgcccgaggtcgccgacctgcgcaatgtcgtcgaaggcgaccccagcccggacggcaagggcaccctggttatcaagcgcggcatcgaggtcggtcatatcttccagcttggcaccaagtacagcgaagcgatgaagctgagcgtcctgagcgaacagggcaagccggtcaacctgatcatgggctgctacggcatcggcgtatcccgcgtggtcgccgccgccatcgagcagaaccatgacgagcgcggcattctctggccaagcgcactggcgccgttccagatcgccctggtaccgctgaagtacgaaaccgagagcgtcaagcaggcgaccgacaagctctatgccgagctgaccgcagccggtttcgaagtgctgctggacgatcgcgacaagaagaccagccccggggtgaagttcgccgacatggagctgatcggcattccccaccgcatcgtgatcagcgaccgcggcctcagcgaaggcgtcctggaatacaagggccgccgcgacagcgagtcgcagaacctgccgatcggcgaactgatgtcgttcatcaccgaaaaactcagccgctga

SEQ ID NO: 318502 - DNA, 957 bp, Pseudomonas aeruginosa
atgcccaccggaagacccctgcgcctattcgccgccgccctgtgcggcggccttctgctgagcggctgcgccaaccagttgccgcagcgtagcgagcatgaggagcgcgtcgagcggaagctgctcgaacacaccctgcaagtcgatgtcggccagcccgatgtgctcgaactgccgcagcgccgggtccggatcaacgaccagaagtccttcgaggtcaccgagttcgaggtgacgcgccgttacgaccgctatacgccgtaccaggcctggcgggagatctacgagatcccgttgggcgcggtggcgctggtggccggcgtcggagcgaacatcgtcaacgtggtgaccttcggcagcgtaccggacaacatcacccacggctggatcaactacggactggccggggtgaatccgttcatgaacgtggaatccaacggtcgcgccgaacagaatctcgcgagcatcgacgagaaacagcgcgacaagcgcctggaatactccagcctgccctgggcggagcgtccggtcctggtcagttccggcaaggaactcaacgaactgcttaccgaccgtcatggcgtgctgcgcctcaacctgctcgacagccccttcgccgaacaggacatcagccgcatctcgcagatacacctttcggtgagcgacccacaggatggtacccgcgccgatgccagcctccgcgtcagccgcagcctgcgcggcaagctcctggaagctcacgccctgatctatgacgacctggaaggcgatgacgtccaccactgggtccatcgggtgaaacgcctcgcggagctgggcctggaagaagaagccagcgaactggaacagagcctgatcgagctcacgcgcaacgaccccgaactgcagcagcagttcatgcatgccctgctccgggatgccggtcgcctggccgcggaccctggcgagacgccctga

SEQ ID NO: 318503 - DNA, 276 bp, Pseudomonas aeruginosa
atggcgaggatctgcttgcatgcctatgtcggcggccgggtacagggcgtcggtttccgtcaggcgacccgggaagaggctgatcgcctcgaactcgacggttgggtgcgaaacctggatgacgggcgtgtcgaagtcgtctgggagggcgaggaggaccgggcgaaagccctggagcgatggctggggcggggcccgcggcacgcggaggtctctgcggtcgaggtcgagcaaatgccgctgcaggggatcgctggcttcgtcgtccgtcgctga

SEQ ID NO: 318504 - DNA, 465 bp, Pseudomonas aeruginosa
atggggagttggctacgcccgctgggcgctgctgcggtgttgtttctcgcgggctgttcggcggattacggagtcgaccaggacgggcgtcctgtcgctgcggagcagttggacgggcattggctggtggtcaattactgggctgactggtgcgcgccctgccggaccgagattccggagatgaatcgccttgcgcaggtgctggaagggcagggcgggcgcgtcattggcgtgaatttcgatggcctgcgcgatgccgaattgaagaagtcggccgatggcatggggattcgcttcaccgtgctggccgatgatccggcgcctcgcttcaagctccctcgcagcgaagcgttgcccgtcacctatatcgtcgatgctcggggggaaatgcgtcagcgtctgctgggcgagcagacggccgatggcatattgaaacagctcgaggctttgcgggagggacgctga

SEQ ID NO: 318505 - DNA, 384 bp, Pseudomonas aeruginosa
atgaaagaccatctgatcggaagcgtccccgcacacctggtggatgccgcacgcccgaccctgacagcccacgagggcctggtcgcggactacaacattgccgcctggctacatcttccggatgcctgcgacctgctggtgtcactggtggtcagctatctggatggcgggcgccagcgcgaagtggcggtggatcacggacgaatcgaccgccagcaacgcatcctgctttccggcattgcccgcctgcccgtacggcagaaagtggagaacatgcaggtacgcctgaagtcggcgacggccttttcccgactggtcgtggaggagttcttcgtacaagcggtggagcaggaaaacaggtcccagcaggtgtccgaagcttga

SEQ ID NO: 318506 - DNA, 195 bp, Pseudomonas aeruginosa
atgctcccaatgtcgaacaaggtcgtccatttgcatcacaaggatgagcaggcagcgcttgagcgtttgaaccggattaccgggctgcagttcagcagttggccggagtcgctggtgccggcgcgcagcgtcagcgaaccgtcgcctgagaaagcgcgggacgaacccctgctcgatcaggtgcgccagggctga

SEQ ID NO: 318507 - DNA, 1236 bp, Pseudomonas aeruginosa
atgcgcgaacatttcaacgatggggtcgagttcgctcgcttcctcgctcatcgcttcgtcaccgacaaggctcccaacagcgcggcggcgctgacctacaccacgttgttcgcggtagtgccgatgatgacggtgatgttttccatgctttcgctgattccggcattccatggcatgggcgagtcgatccagactttcatctttcgcaatttcgtgccttccgctggagaagcggtggaaacctacctgaagagtttcaccacccaggcccggcacctgacctgggtcggggtggtctttctggcagtcaccgccttcaccatgctggtgaccatcgagaaagccttcaacgagatctggcgggttcgccagccacgccgcggtgtcgggcggttcctcctctactgggcgatcctcagcctgggcccattgttgctgggggccggcttcgccgtgaccacctacatcacttcgctgtcgctgctccatggcccggacgcgttgccgggcgcggagacgctgctggggctgatgccgctggcgttcagcgtggcggccttcaccctgctctattcggcggtcccgaacgcccgggtcccggtgcgccatgccctgatgggcggcgtgttcaccgcggtactgttcgaagccgcgaaaaccctgttcgggctgtacgtaagcctgtttcccggctaccagttgatctacggtgccttcgccaccgtgcctatcttcctgctgtggatctatctttcctggatgatcgttctgttcggcgcggtgctggtctgcaatctctcttcttcccgtctctggcggcggcgctcgctgcccaagctgatcgtcctgctcggcgtgctgagggtgttccaccagcgccagcagcttggacagtcgctgcgcctgacccacttgcatcgtgcgggttggctgttgcccgaggatgagtgggaggaactgctggactttctcgagaaggagcagttcgtctgtcgcgccggcggaggcgagtgggtgctgtgccgggatcttggcgcctacagtctgcatcgcttgctgaatcgctgcccctggcccatgcctagccgagagcgcatgcctgcgaatctggacgaggcgtggtatccgccgttccagcaggccatggagcgcttgcaggtggagcaggaggcgctgttcggagaaagcctggcccactggctggcggacggaacctcgggagcgaaggtgacgtaa

SEQ ID NO: 318508 - DNA, 354 bp, Pseudomonas aeruginosa
atgagcgaactgatcctgttgcacaatccgcgctgctcgaaatcccgcgcagcgctcgaactgctcgaagcccgcggcctgcaaccgcaggtggtgcgctatctggaaaccccgccgagcgccgccgagctgaaagcgatcctggccaagctcggcattcccgcccgccagttgctgcggaccggggaggacgaatacaaggccctcggcctggatgagcccagtcttggcgaagaggccatcatcgaggcaatggccaggcatccgaagctgatcgagcgcccggtgctggtcgcgggtgacaaggcggtggttggccggcctccggaaagagtcctggagatcctcgcttga

SEQ ID NO: 318509 - DNA, 597 bp, Pseudomonas aeruginosa
ttgagcagtccctacatcctggtgctgtactacagtcgccatggcgctaccgcggaaatggcccggcagatcgcccgtggcgtcgaacagggcggcttcgaggcgcgcgtacgcacggttcccgcggtatccaccgaatgcgaagcggtcgccccggacatccccgcggagggggcgctgtacgcaaccctggaggacctgaagaactgcgcgggcctggccttcggcagcccgacccgcttcggcaacatggcttccccgctgaaatacttcctcgacggcaccagcagcctgtggctgaccggcagcctggtcggcaagccggcagcggtcttcacctccaccgccagcctgcacggcggccaggagaccactcagttatcgatgctgttgccgttgctgcaccacggcatgctggtcctgggcattccctacagcgaacccgccctgctggaaacccgcggcggcggcacgccttacggcgccagccacttcgccggcgccgatggcaagcgcagcctcgatgagcacgaactgaccctgtgtcgcgcgctgggcaaacgcctggcggaaaccgccggcaagctggggagttga

SEQ ID NO: 318510 - DNA, 420 bp, Pseudomonas aeruginosa
atggcccgcaagaacaaaccgctgcccgaagtagcgtggctgcagccgcgcctggcgctcagccgcgccatcagcctgggaagcttcgtcggcctggtcctgctcatcctcattcgcgacctgatctacgcggacgcccatggtgcggcgagctgggtgccctggctggtcctcgccttcaagctgctgccgctgctggtggtggcccccggactgctcatgggcagcgcgcgcgggcatgcctgggcctgctacgtggtcaacctgtatttcatcctcggcgtactcgccgccttcgatcccacgcagcgcctgttcggctgggccgaagtgctactcagcgtgaccttgttctgcgccgcgctgctctatacgcgctggcgattccagtacgaccgacgggtcgccggggaacgctga

SEQ ID NO: 318511 - DNA, 705 bp, Pseudomonas aeruginosa
atgaaacctattcagcttcccctcagtgtgcgtctgcgcgacgacgccaccttcgccaactactatcccggtgccaatgccgcggcactgggatatgtcgagcgtttgtgcgaagccgaggctggctgggcggaaagcctcatctacctctggggacacgacggcgtcggccgcagccacctgttgcaggcggcctgcttgcgtttcgagcagttcgaagagcgaaccatctacctgccgatggccgatctggtgcagtacggcccggaaatcttcgacgatctcgagcagtgcgagctggtctgcatcgacgacctggatgtgctggttggcaagcgagaatgggaagaggggctgttccacctgttcaatcgactgcgtgataccggtcggcgcctgctgctggcggcatcgaagtcgccccgggagctgcaggtcaagctgccggacctgaagtcccgcctcaccatggcgctgatcttccagttgcacggtctttccgacgaggacaagcttcgtgccctgcaactgcgggcatcccgtcgtggcctgcatctgaccgatgaagtcggtcgtttcatcctcaaccgcggttcgcgcagcatgaactctctgttcgatctgctggagcaactggatcgcgcttcgctccaggctcagcgcaagctgaccattcctttcctcaaggaaaccctcggctggtaa

SEQ ID NO: 318512 - DNA, 1038 bp, Pseudomonas aeruginosa
atgcgcatagcccgactcttcgttctctgtttttccctgctaggcttgcccgtcttcgcggcaacggtccccaatctctaccaggtccacgagccggtttcgtcgcagcagcccggggagcgcgatgccggactggtgcgagccctgcaaaccctgctggtgcgcctgaccggcaatccgcaggcgccgcagaacccggcattggcggggtacctgaaggatccgcagcaactgatcagccagtacgccttcgaaaatggtccgccgctggcgctggtggtcgatttcgatccgaccgccaccggtaatgcgctgcgggccgccggcctgccgagctggggcgccaaccggccggcggtgctggcctggtggctgaacgaaagcgccgatggcagctccctggtcggtgacaaccaggcctcggccgaaccgctcaagcgtgcggcgcagaaccgcggcttgccgttgcgcctgcctctggcggatctcgacgaacagatcgtcggtaccccggaaaacctcaccgccgcccaacccgatgccctgcgcgcagcctctgagcgttatgccgccgatgccttgctggcagtggacgccaaggaggcggacggcaaatggcaggcgcaatggcggctgtggatgggcgattcgcgagagcaaggccaggctgaaggcgctacgcccgacgcgttggcagacagcgttatgctggccgtcggcaaccgcctgtccactcgtttcgttgccacgccggaagcggcgaccggcctgaccctccaggtccagggcgcgacactggcacgctatgccgagttgcaacgcctgctcgatccgttcggcgcgcgtctggtaggcgtgcggggcgatcgtctcgactattccgtgaaggccagtcccgagcaattgcgtgcccagctgggcctggcgcagttgcaggaaatcccggccgacagcgtaccgctggatgcctccggccagcccgcagcgcccagcgcggcggtgccgtcgtcgacccaactgaatttccgctggcagtga

SEQ ID NO: 318513 - DNA, 1062 bp, Pseudomonas aeruginosa
atgagcagcaagcaaccctcgttgagctacaaggacgctggtgtggacatcgacgccggcgaagccctggtggaacgcatcaaaggcgtggccaagcgcaccgcacgcccggaagtgatgggcggcctcggcggcttcggcgccctctgcgaaatcccggccggctacaagcagccggtgctggtatccggcaccgacggggtgggcaccaagctgcgcctggcgctcaacctgaacaagcacgacagcattggccaggacctggtggcgatgtgcgtcaacgacctggtggtctgcggcgccgagccgctgttctttctcgactactacgccaccggcaagctcaacgtcgacgtcgccgccaccgtagtcaccggcatcggtgccggttgcgaactggcgggctgttccctggtcggcggcgagaccgccgaaatgcccggcatgtacgaaggcgaagactatgacctggccggcttctgcgtcggcgtcgtggaaaaggccgagatcatcgacggctccagggtccaggccggcgacgcgcttatcgccctgccctcctccggcccgcactccaacggctactccctgatccgcaagatcatcgaggtttccggcgccgacatcgagcaggtccaactcgacggcaagccgctggccgacctgctgatggcgccgacccgcatctacgtcaagccgctgctgcaactgatcaagcagaccggcgcggtcaaggccatggctcacattaccggcggcggcctgctggacaacatcccgcgcgtcctgccggacaacgcccaggccgtgatcgatgtcgccagctggaaccgtccggcggtattcgactggctgcaggaacagggcaacgtcgacgagaccgagatgcatcgcgtactcaactgcggcgtcggcatggtcatctgcgtggcccagagcgacgccgagaaagccctggaagtcctgcgtgccgccggcgagcaaccctggcagatcggtcgcatcgaaacctgcggcgcggacgccgagcgcgtggtcctgaacaatctgaaaaaccactga

SEQ ID NO: 318514 - DNA, 669 bp, Pseudomonas aeruginosa
atgccgaaactctgcaatgtcgtggtgctgatttccggctccggcagcaacctgcaggcgctgatcgacagcctccgggacggcgccacgccggcccggatccgcgcggtgatctccaaccgcgcggacgcctatggcctggaacgcgcacgccaggccggcatccaggccgaggtgctcgatcacaaggcctatgccgatcgcgaaagcttcgaccaggccctggcacaacggatcgatgcccatgaaccgcacctggtgatccttgccgggttcatgcgcatcctcagcgccgatttcgttcgccattaccaggggcgtctgctgaatatccatccctcgttgctgccgcgccacaaagggctgcatacccatcaacgcgccctcgaagccggcgaccgcgagcacggttgcagcgtgcacttcgtgacggaggaactcgatggggggccactggtcgtacaggcagtaatcccggtagagtcgcaagatacgccggaacgcctggccagacgggttcacgaggaagaacaccggatctacccgctggccatgcgctggttcgccgagggccgcttgcgcctgggcgaacagggcgccctgctggatggccaggccctgcctgccaccggccatcagattcgcaccaaggagattcgcaatgcgtaa

SEQ ID NO: 318515 - DNA, 717 bp, Pseudomonas aeruginosa
atgcgtaaagccatgctgttcctgctgacgctgctgaccctgccggcctatgctttcgagctgaagccgttcaccgccagctataccgccgactggaaacagatgcccatcagcggcaacgcctcccgcagcctgaaggctctcggcgacggccgctggcaactggacttcgaggcctccatgctgctggccagcctcaacgaagtcagcaccttcaaggtcgagaacgacaccttcctgccgcagacctaccgcttcgcccgccagggtctgggcaaaggcaagcagatcgaactggacttcgactggtcgcagaagcaggtgctcggcagcgaccgcggcgatgcggtgcggcaacccctgaatcgcggtcaactggacaagtccacctatcaactggtcctgcagcatgacgttgccgacggcaagaagagcatgagctaccagatcatcgagggcgaggatgtcgatacctacgacttccgggttctcggcgaggaaaaggtacgcacccaggctggcctgatcaacgcgatcaaggtcgagcgcgtgcgtgatccgggcaagagcaaccgcaagaccatcctctggttcgccaaggactgggactacctgctggtccgcctgtaccagatggaaaccgacggcaaggaataccagatcatgctcaaggaaggcaccatcgacggcaagaccgtcactggcgaaaagagctga

SEQ ID NO: 318516 - DNA, 561 bp, Pseudomonas aeruginosa
atgtccgccatcgccctttacgattatctggaaaggctgaccagcctgatgcgtgcctggtcccgcgagcagccgctggtggctgagctgcagccggtgcagttgagcgccttgcattacctggcgcgttgtaatcgctattcggatactccgctgggcgtgaccgaatacctcggcttgaccaagggcacagtgtcgcaatcgctcaaggtgctggaagggcgggggctgatcagcaagctgccggatgcgcgggatcggcgcagcgttcatctgcggctgaccgatgcggggcgcgcgctgatcgaggcggtgattccgccgcagttcctcgagcaggccgtcacggcactgggcgagaagggcgaacacttgcaaggcttgttgcgtgatcttctggtcgtcatccagcgtcaggaggatgtgcctggtttcggcctttgtcggtcctgccggttccatcaacggcgtgcgggttcgcccttctgcggtctaaccggggagccgttgagcgatgccgatgccgaactgatctgccgcgagcaccaggcctgcggctga

SEQ ID NO: 318517 - DNA, 234 bp, Pseudomonas aeruginosa
atgaccaaagccatctactaccacgccggctgcgcaatctgtgtcgaagccgaacgttccttgctgccattgctcgatcgcaagcaggtggacatcgaagtggtccatctcgccgaacaatcggcacgcatcgccgaggcggaaaaggccggggtcaggtcggttcctgccctggttgtcgacggacaggtactgcaccttaacttcggtgcggcgctcagcgatctgaaataa

SEQ ID NO: 318518 - DNA, 255 bp, Pseudomonas aeruginosa
atggaggtgaagatcttcgacacccatgtgcgaacccgcgacggccgctacctgcacttcgatgtcctggtcacggaggagctgggggctcgcgccggcgagttcgctcgacgctggctcgccggaagaggcatagacgaggccgatatcagccaggggcattgcagctactgccatagcgagattgcgacagcagaggttgccgaagccattcggctccatggccattacatccttcccctggaaggctgttga

SEQ ID NO: 318519 - DNA, 327 bp, Pseudomonas aeruginosa
atggacagctaccgcccgatcgcctgcgatctccatgactacctggagatcgcctgcctctaccgctaccggttgctcctcgaactcgaggacggtgttcgcttcgaagccgaggcgcgcacgacgcatacccgggccgttcggccaggcggcggcaaggaggaataccttgaggtggccgtcgaaggagcgactctgctgctgcgcctggatcgcctgttggcgattaccgccctcacggaagcggccttgttcggccgcatacgcctgagggaagaggcctgttccagagcatccggcatgccatcttcacaccttggaaactga

SEQ ID NO: 318520 - DNA, 192 bp, Pseudomonas aeruginosa
atgagtgtgacagtgaccgagcgtgacgatgaccacaaatcccgcgagctgcgtgcgcttggccgccgctgctgggacgtgcatcagcagggactgctggttggcgtcttccataacgaggatgacgcccacgcctatcggatcaagctggagaaagaagaagaactgcgacagataggtaaatcggcctga

SEQ ID NO: 318521 - DNA, 1329 bp, Pseudomonas aeruginosa
atgccttcctcacagcttccgggggcttcgccctcggagatcgatctcgttcagctgttccagcaattgtgggcgtcgaaatggctgatagcgctgatcgcggccttggcgaccgccgctgcgctcgcctacgcgctgttggccgttccgacctaccaggtggatgtcctgttgcggccgatccagaccaaggccctggaggctgtcaatgtcaacgggctgtatgccctgactccgcgggaagcgctggatcgcgtcggcaacgagctggcagcctactccggcaggctggagtatttcgaagcccatccagagctattccagcaattgaacgccgagggcttgtcccccgagcaggctttctggaagttcaaccaggatgccttcagcatgcagcaggcggacttgaagaaggacccccaggcggcgcctttcttccgcttgtccatgcagtatccccagggcatggatggtgccgccattctcaacggcatgctcgcgtcgaccatcgagaacgagcgtcagcgaatcctggacgacctccaggcacgtatcgacggtcgcctgcaattcctcgagcaggatatcgaaggcaagcgtgccagttaccaggctaccaaggagggcaagatcgcccggttgctggaagcggacagcatccggcgggccggcctggaggatgagctcaaggcgttgcgcgggcggctgaagatggtgcgcgattcgcgtatccagcagctcaacgaggctatccagatcgccacccggctggggatcgtcaagccgacgaccccgggcgcactgggagaggccgggcaggatggctcgcgcagcgttttccgcaccgaggtgaataaccagcagatacccctgtatttcatgggtgtcgatgccttgaccgccgagcgcgataccttgctcaaacgcaagggcgatgacttcaccgagccccgcgtggcgaagatccagcaggagctgaagcagctggagaacaaccgtgaagtgcaatacctgcaggctcgaaagggcgaggagcgtttcttcgaaaacatcgacaagctgcgtggagagcaggcgcgcctcaagactctgaaggcgagcgagctgaagatcgaactggtgcggatcgaccagaaggcttcgacccctctgaaaccgatcaagccgcgcaaggccttggtggtggccttgggtctcctgggcgggttggtgttcggcgtgctggtggctctggttcgggcaatgttgcgtgcccctcggcaacgggtacaggaagatagcctgccgccgggagtcgtcagtctcgaccggagcctttcggggacctga

SEQ ID NO: 318522 - DNA, 540 bp, Pseudomonas aeruginosa
atgagcatgtcattgcgtgaccagttgctgaaagccgggctggtcaatgagaaacaggccaagcaggccaccaagcagaaacagaaacagcagcgcctggagcacaagaaccaggtcgacaaggacgactcccagcgccaggcggcggagcaggccaaggcggaaaagctggcgcgcgaccaggagttgaaccgccagcagcaggaaaaagccgagaagaaggccaaggccgcgcagatcaagcaacttatcgaagggacgcgcctgcccaagctggaaagcgacgactactacaatttcgtcgacgccaagaaggtcaagcggatcgcggtcaacgacctgatccgcgacaagctgagccgaggcagcctggctatcgtcagctatgacggacgctacgagatcgtgccccgggatgcggcggtgaagatccaggagcgcgatccgcggcgggtggtgctgctcaacgtacagagccaggagccggacgaagacgatccctacaaggactatgtggtgcccgacgatctcatgtggtga

SEQ ID NO: 318523 - DNA, 939 bp, Pseudomonas aeruginosa
atgagcgtttctctcctggtaaaagtcactctggtgggcctgttcgtcgccagcgtcctgttcgtccatttccgtgggcgcgcgcgcttgcccttcctgcgccaactggtcaaccactccgcctggttcgccccctacaactcgctgatgtacctgttctccagcgttccctcgaagccctatctggatcgcagccgttttccggagctggacgaactgaagaacaattggcaaaccatccgcgaagaagccctcaacctgttcgacgagggttatatccgggctgccctgaacaataacgaagccggcttcggctcgttcttcaagaaaggctggaagcgcttctacctgacctggtacgacggcccgctgccctccgcccagcagctctgcccgaagaccgtagagctggtgagccgcatccccaacgtcaagggcgcgatgttcaccctgcttcccggcggcagccacctgaatccgcaccgcgaccccttcggcggctcgctgcgctatcacctcggcctgtccacgccgaattcggacaactgccgcatctacgtcgacggccagccctacgcgtggcgtgatggcgaagacgtgatgttcgacgaaaccttcgtccactgggtgaagaacgagaccgagcagacccgggtgattctcttctgcgatatcgagcggccgctccgctcccgcctgctgacccgcctcaatcgctggatcagcggcattctcgggcgtgcgaccgcaccgcagaacgtcgaaggcgaacgcgtcggcagcatcaaccaggcctactcggtcgccattcgcggcggcaatgccatcggcgcccaggtgaagcgcttcaaacgcgcctacccgaaggcctaccgaatcctccgcccggtgctggcggtgatcctgctggtcatcctctatcgttggatcttcggctga

SEQ ID NO: 318524 - DNA, 831 bp, Pseudomonas aeruginosa
atgtaccgactcgacgacctgctccacctcatggcgcgcctgcgcgatcccgaattcggctgcccctgggatctccagcagagctacgcgaccatcgtcccgcacaccctggaagaagcctacgaagtagcggacgccatagaacagggggatttcccgcaattgcgcgaggaactgggcgacctgctgttccaggtggtctattacagccagttggctcgcgaagaggatcgcttcgctttcgacgaggtggtggacggcatcacccgcaagctgatccgtcgacatccccacgtattcctcgatggcgatctctatggcaagcccgatgcggcgaagctggccgaagcggcggtcaagcagcgctgggaagaactgaaggccgaggagcgtgccgccaaggccaaggagccgcagcagttgtcgctgctggatgacgttcctgtcgccctgccggcgttgtcacgggcggcgaagctgcagaagcgcgcggcgcaggtcggcttcgactggccggaagcgctgccggtggtggacaaggttcgcgaggagctggacgaagtcctcgaggcgatggcagagggtgacgagggtgccgtgggcgaggaggttggcgacctgctgttcgtcgtggtcaacctggcccggcatctcaaggtcgatccggaggctgctctgcgccaggccaacggcaagttcgagcggcgcttccggttcatcgagcggaacctgcgcgaagccggccggaaagccgaagagtgttcgctggaggaactggacagcctctggggcgaggctaagaaagcggagaggagcgcgcccggctgttaa

SEQ ID NO: 318525 - DNA, 2244 bp, Pseudomonas aeruginosa
atggtacaggtgagagcgcaccagccggtcaacaccgacggcagtatcaacctcgaggcctggctggaccacgtccagaacctcgtccccgggctcgatcgtcagggcttgctggaggcttgcgagttcgctcgcgaatccgagcagcgagcgatcgccgcacagaactcctgggcggaaggcacgtccagcttccagaccggactggaaatcgccgagatcctcgcggacctcaagctggatcaggagtccctggtcgccgcggtcatctatcgaggcgtgcgggaaggcaagatcaccctggaagcggtcaacaagcatttcgggccggtggtggccaagctgatcgagggcgtgctgcgcatggccgcaatcagcgccagcctcaatccgcgccattccatggtgctgggtacccaggcgcaggtggagaacctgcgcaagatgctggtggcgatggtcgacgacgttcgcgtcgccctgatcaagctggccgagcgcacctgcgccattcgcgcggtgaagaacgccgacgaggaaaagcgccaccgcgtcgcccgggaagtcttcgatatctacgcgccgctggcccaccgcctgggcatcgggcatatcaagtgggagctggaggacctgtccttccgttacctcgagcccgaccagtacaagcagatcgccaagctgctgcacgagcgccggctggatcgcgagcagtacatcgccaacgtgatgagccagttgaaggaagctctcgcggccaccggcgtacaggccgatctcagcggacgggcgaaacacatctattcgatctggcgcaagatgcagcgcaagggcctggacttcagccagatctacgacgtgcgcgccgtgcgcgtgctcgttccggagatgcgcgactgctacaccgcgctgggcatcgtgcataccctctggcggcacattcccaaggaattcgacgactacatcgccaaccccaaggaaaacggctatcgctcgctgcataccgcagtgatcggccccgaggggaaggtgctggaagtacagatccgtacccactccatgcacgaagaggcggagctcggagtctgcgcgcactggcgctacaaggggaccgacgtcaaggccagctccaaccattacgaggaaaagatctcctggctgcgccaggtgctcgaatggcacgaggaactgggcgacatcggtggcctggcggagcaactgcgggtcgatatcgagccggacagggtctacgtcttcactcccgacggccatgccatcgacctgcccaagggcgcgaccccgctggatttcgcctatcgggtccacactgaagtcgggcacaactgccgcggggcgaagatcaacggacgcatcgtgccgctgaactacagcctgcagaccggcgagcaggtcgagatcatcaccggcaagcacagcggtccgagccgcgactggctgaacagcaacctgggctacgtcaccacctcccgggcgcgggcgaagatcgtccactggttcaagctgcaggcgcgggaccagaacgtcgctgccggcaaggccctgatcgaacgcgagctgtcgcgcctggcgctgccgccggtggatttcgaccggctggcggagaaggccaacgtgcgtaccgccgaggatatgttcgccgctctcggcgccggcgacctgcgcttggcgcacctggtcaactatgcccagcaactggtcgagccggaccgcgacagcgagcaactcgaactgatcccgcgcaagccgagcaagatcggccacggcaagcgcggcgacgtgcagatccagggtgtcggcaatctcctgacgcagatggccggctgctgccagccgctgccgggagatcccatcgtcggctacatcacgctgggccgtggggtcaccatccaccgccaggattgcgccaccgcgctgcaactggcgggacgcgaaccggagcggatgatccaggtcagctgggggccggagccggttcgcacctatccggtggatatcgcgatccgtgcctatgatcgttccggcctgttgcgcgacgtgtcccaggtgctgctcaacgagcggatcaacgttctggcggtgaatacccgttcgaacaaggaagacaacaccgcgaccatgcaactgaccatcgagattcccggtctggacgctcttggacgcctgctggcgcgcgtctcgcaactgcccaacatcatcgaggcgcggcgcaaccgtacgccttga

SEQ ID NO: 318526 - DNA, 1353 bp, Pseudomonas aeruginosa
atggccagaaataagggcgggctgcgcttccagcccagcggtggtgcgcgcggtcccgcgataccggtaggcaagaagcagcgcctgaccatcgagcgcctggcccatgacggccgaggtatcgcccacgaggcggggatgacctggttcgtcagcggagggctgcctggcgaggaacttgaggcccgggtgctgggcgcacgaagcaaggtggtcgacgcgcgcagcgagcgcctgttcagcagtagcgacctgcgtcgccgcgagccctgcactgtagcgggtcgctgcggcggctgcaccctgcagcacctggaacacggcgagcagttggccctgaagcagcgtaccttgcaggagcagttgcagcgtttcgccgggatcgagccggaagaatgggccgcccctctggtcgggcccgaattcggctatcggcgccgcgctcggatcgccgtgcgctgggatgccagggcgcggcgtctggatgtcggcttccgtgcctcggccagccaggagatcgtcgccttcgatgagtgcctggtcctggtgccgcctttgcaaacgattgcccgtgccctgcctgctcttctgcaggacttccgcaagccggaaagcatcggccacgtggagctcttccatggcacggccagtgcattgctgttgcggcatacgactgccctggtcgacgaggatcgccagcgcctggccgctttctgctccgcacaccaggcccagctctggctgcaaggtgcggaacagcccttgccggtggagccggccgccgaactgggctactccttgggtgactggcaactgactctggcataccgacccggagacttcgtccaggtcaatgcgccggtgaacgagtcgatgatccgccaggcccttgactggctggcgccgaccgccgacgagcgggtcctcgacctgttctgcgggctgggcaatttctccctgccgctggcgcgccgggtggcgcgggtagtcggggtggagggcgtggcggcgatggtcgagcgggcaggcgccaacgcgctggccaatggccttggcaacgcgcactttttccaggccgacctgtccaaagcgcttgccgaagcgccctgggcggagcaaggttttaccgctgtgctgctcgatccgccgcgcgacggcgcgttcgaggcggtacgcgaaatgagttctctgggtgcccggagggtagtctatgtatcctgcaatccggcgaccctggcgcgcgatgctggcgaaatggccaggcagggctatcgtctgaagcgcgccggaatcctcgatatgtttccgcagaccgcacatgtcgaggccatggctttgttcgaggcaggctag

SEQ ID NO: 318527 - DNA, 900 bp, Pseudomonas aeruginosa
atgaccgtgcagtacccgactatcgccgactgcgttggcaatacccctctggtgcgtctgcagcgccttcccggggaaacctccaataccctgctggtgaagctcgaaggcaacaacccggcgggatcggtgaaggaccgcccggccctgtcgatgatcacccgtgccgaactgcgcggcgacatccgccccggcgatacgctgatcgaggctacttccggcaacaccggcatcgccctggccatggcggcggcgatcaagggttacaagatgatcctgatcatgccggacaactccacggccgaacgcaaggcggcgatgaccgcctatggcgccgagctcattctggtcagcaaggaagagggcatggagggcgcgcgcgatctggccgacaagctgcagcgcgaaggccgcggcaaggtcctcgaccagttcgccaatggcgacaacccggaagcccattaccacagtaccggcccggaaatctggcagcagaccggcggcagcatcacccatttcgtcagctccatgggcaccaccgggaccatcatgggcgtctcgcgctacctcaaggagcagaacccggcggtgcagatcgtcggcctgcaacccatggagggctcggccatcccgggaatccgacgctggccgcaggaatacctgccgaagatctatgacgccagtcgcgtcgaccgggtcgtcgacatgcaccaggacgaagccgaggacatcatgcgccggctggcccgcgaggaaggcatcttctgcggcgtgtcctccggtggggcggtggcggcgatgctgcgcctgtcccgcgaactggagaatgccgtgctggtggcgatcatctgcgaccgcggcgaccgctacctgtcttccggcgtctatgacccgcgctga

SEQ ID NO: 318528 - DNA, 2229 bp, Pseudomonas aeruginosa
atgtacccccaattccgtcgcggccatctcgccgctgccgtccttttcgcttcatcgagcctgctgggcgggcaggccctggccgaggacgagcgcctggaagaactggacgagcgcgccgaatcggtggtccagctgggtgacgaggtggtgctgggcaccgccgaacaggagctcaagcaggcaccgggggtatccatcatcaccgccgaggacatcaggaagcgcccgccggtgaacgatctctccgagatcatccgcaccatgcccggggtcaacctcaccggcaacagttccagcggccagcgcggcaacaaccggcagatcgacatccgcggcatggggccggagaacaccctgatcctggtcgacggcaaaccggtcagctcgcgcaactcggtgcgctacggctggcgcggcgaacgcgacacccgcggcgacagcaactgggtgccgccggaggaggtcgagcgcatcgaggtcctccgtgggccctcggcggcacgctacggttccggcgcggcgggcggggtagtcaacatcatcaccaagcgcccgaccgatcgtttgcgtggttccatgacggtgttcaccaacattccggaaagctccaaggatggcgccacgcgccgcgccaacttcagcctcagcgggccgctgaccgaagccttgagcttccgcgcgtacggcagcgcgaacaagaccgattcggacgataccgacatcaacctcggacataccgtcaacccgagccgtaccgtggccggacgcgaaggggtacgcaatcgcgatctcagcgggatgctgtcgtggcaggtgacccccgaccaggtcgtcgatttcgaagcgggcttcagccgacagggcaacatctatgccggcgatacccagaacaacaacggcaccgccaatacccagggactcgccgacgacggtgcggagaccaaccgcatgtatcgcgagaactacgccatcacccacaacgggacctggtcgttcggtacttccaggttcgtcgcccagtacgactccacccgcaacaaccgtctggaggaggggctggccggttccgtcgaggggcagatcggcgccgaccgttcgttcagcaccagcaagctggagaactatcgcctcagcggcgaactcaaccttccgttgcatgcgttgttcgagcaggtgctgacggtgggcgcggagtggaacaaggaaaccctcaacgacccgtcctcgctcaagcagggcttcgtgggaagcgatagcttgccggggacccccgcggccggctcgcgaagcccgaaaagcaaggcggagatccgcgcgctgtacgtggaagacaatatcgaactgcgccccggcaccatgctcacccccgggctgcgcctggacgatcacagcgacttcggcctgaactggagcccgagcctgaacgcttcccaaacgctcggcgaatacttcacggtcaaggccggtatcgcacgggccttcaaggcgcccaacctgtaccagagcaacccgaactacctgctctatacccgtggcaacggttgcccgatccagaccagcagcggcggctgctacctggtcggcaacgagaacctggacgccgagaccagcgtaaacaaggaactgggcatcgagttccggcgcgatggctgggtcgccgggttcacctacttccgcaacgactacaagaacaagatcgtcgcgccgctggatgtcatgggacagaccgggaccggtaacaacatcctgcaatggagcaacacgaagaaagcagtggtcgagggcctggaaggcaacctgctggtccccctgcacgaggacctgagctggagcaccaacctgacctatatgctgcaatccaaggacaaggacaccggcaacccgctttcggtgatccccgagtacaccctgaactcgaccttggactggcaggccagcgagcgtctttccacccaactgaccagcaccatctacggccgccaggagccgccgaagcatggcaccagccgcaacacgccggtggtctcgcgaaaagaggtgggtacctatggcatctggggcgtcagcgccggctacaccttcagcgagaacctgagcgtacggggcggggtaagcaacctcttcgacaagcgcctgtaccgccagggcaactccttcgacgccggcgcggcaacctacaacgagccgggtcgcgcctactacgtttcgatgaccacctcgttctga

SEQ ID NO: 318529 - DNA, 1341 bp, Pseudomonas aeruginosa
atgatgcccaaccgtcattcgctgttctggcgcctggccctggtgctggtggcgttcttcctgctatcggtatggctgtcctggacctggggacgcagtgccgaactgaagggttactacctgtccgccgaagcccgctccgccttggcggattatgcgcggcgagccgaacgtgcctggctcgacgatggccgcgagggcatcgaccgttggctggccgagccgcgccagcgggcgctggactgggtggtcgtgctcgacggacggctgcaatcgctgggcagtcgtccgctcaccacggaggaagccgagcgcctgactttcctgcggggcgtcgactggccgatgagctcccgctcgttgtcgcggccgttcatcagcctgcgcttccccgaacatccggagcaaggccgggtggtcctgcgtcttcccgccgagttcgtccctcccggcttgtcgccggccaagcgcctggtcacccatggcctggtgccggccgggctggccctgctgctgggagtgttgctgtatcggcgctggatagtgccgctgggacgcctgcgagcgcaggccaatgccctgcgcggcaacgacctgacggcgcgtacgcaggcagagatcagccggcgcagcgacgagctgggcgatctggggcgggcgttcgaccatatggccgagcgactcgacgagcacatggtgttgcagcgccaactgctccgcgatctctcccacgagctgcgcacgccgctggcgcgcctgcaggtggcggcagagggcacgctgtccgcgcagctcctgcgcgagcgcctggagcaggaggtacagggcatgcagcaactggtggacaacaccctggagctggcctggatggacaccgaacgcccggtattggcgctggaggacatttccatcccggcgttatgggacctgctggtggagaacgcacgcttcgaaagcggctgggccgccgagcggttccgcagcgctctgcccgaggattgtgtcgtgcgtggcaacctcaatgcacttgcccaggccctggagaacctgctgcgcaacgccatccggcattcgccggaagacggcgtgatccgcctgcatggtcggcgcgaaggaagttgctggtggctttgcctggaagaccagggcgagggtgtggccgagcaccagttggagaccatcttccgcccgttcacccggctgtcttcggcacgtaccggcaagggcttcggcctgggactgagcattgcccgtcgcgccgtggtgctccagggcggccgcctatgggcggaagccgccgatccggggctgcgcctgtgcctggtgctgccttctgcctag

SEQ ID NO: 318530 - DNA, 720 bp, Pseudomonas aeruginosa
atgttcccatccctgacgcccgacccccgactgctggccatcgaggacgatccgacactgggtgcacatctgttccagcacctcaatggcagcggtttcgaggtgacctggtgccgagacggggaagaggggttggcggctgcgcgcagcggcggctatgacctgatcctgatggacatcatgctgcccgggcgcgatggcctcgagattcttcgccaactccgccaggagcaggcgctgccggtgatccttatgtcggccctgggcgccgagcaggaccgcatcgccgggttcagccagggcgccgacgattatctgccgaagcctttcagcctggccgagctgcgggtacgcatcgatgccatcctgcgtcggatcgccctggagcgggggggcgcgccgggccgctgcgccgaaccgctggcgcggccctcgctgcaattctctgccgatgtctgcgatgtcagccttggcgagcggttcgccggcctgacgccgaccgaataccgcctgctggaaaccttcctcgccgcggaaggcgagaccctgaccaaggccttcctttaccagcatgtcctgcaccgcggtcatacccagcatgatcgcagcctggacatgcacgtcagtcacctgcggcgcaagctgcaacgcctcggttacgccggtcaccagttgcataccgtctggggcaagggttacgtcctgacaccggcgccatga

SEQ ID NO: 318531 - DNA, 2778 bp, Pseudomonas aeruginosa
gtgttcaaggatctcggcatcaaggggcgcgtactgctgctcaccctgctccccaccagcctgctggcgatggtgcttggcggttacttcacctgggtccagctgtccgacatgcgcgcccagttgatcgagcgcgggcaactgatcgccgaacaactggcgccgctggccgccaccgcgctggcgcgaaaggataccgccgtgctcaaccgcatcgccaacgaggcgctggaccaaccggacgtgcgcgcggtgaccttcctcgacgcccgccaggaacgcctcgcccatgccgggccaagcatgctcaccgtcgccccggccggcgacgccagccatctgagcatgtccaccgaactggacaccacgcacttcctgctaccggttcttggccgccaccacagcctgtccggcgccaccgagcctgacgacgagcgcgtactcggctgggtcgaactggaactgtcgcaccacgggactctgctgcgcggatatcgcagcctgttcaccagcctcttgctgatcgccgccggcctcggcgtcaccgccctcctcgccctgcgcatgagtcgcgcgatcaacgcgccgctggaactgatcagccagggcgtcgcccagctcaaggaaggccgcatggaaacccgcctgccaccgatgggcagcaacgagctggacgaactggcctccggcatcaaccgcatggcggaaacgctgcagagcgcccaggaggaaatgcagcacaacatcgaccaggccaccgaggacgtacggcagaacctggaaaccatcgagatccagaacatcgagctggacctggcgcgcaaggaggccctggaggcgagcaggatcaagtccgagttcctcgccaacatgagccacgagatccgcaccccgctcaacggcatcctcggtttcaccaacctgctgcagaagagcgagctcagcccgcgccagcaggactacctcacgaccatccagaaatcggcggaaagcctgctggggatcatcaacgagattctcgatttctcgaagatcgaggccggcaagctggttctggaaaacctccctttcaatctccgcgacctgatccaggacgccctgaccatgctggctccggccgcccacgagaagcaactggaactggtcagcctggtctaccgggataccccgatccaattgcagggcgacccgcagcggctgaagcagatcctcaccaacctggtcggcaacgccatcaagttcacccagggcggcaccgtcgccgtacgcgccatgctcgaggacgaaagcgacgaccgcgcgcagctgcggatcagcgtccaggacaccggtatcggcctctccgaggaagaccagcaagccttgttcaaggccttcagccaggccgacaactcactgtcgcggcaagccggtggcaccggcctgggcctggtgatctccaagcgcctgatcgagcagatgggcggcgagatcggcgtcgacagtacgcctggggaaggcgccgagttctggatcagcctgagtctgccgaaaagtcgcgacgacaacgaggagccgggcgcctcctgggccgcgggccaacgcgtggcgctgctcgaaccgcaggaactgacgcgccgctcgctgcaccaccagctcaccgacttcggcctggaagtgagcgaattcgccgacctcgacagcctccaggaaagcctgcgcaacccgccgcccggccagttgccgatcagcctggcggtgctcggcgtctcggccgcgatccatccgccggaagatctgagccagtcgttctgggaattcgaacggctcggctgcaagaccctggtgctctgcccgaccaccgagcaggcgcaataccacgcgaccctgcccgacgaacaggtcgaggccaagcccgcctgcacccgcaagctgcaacgcaagctgcaggagttgcttcaagtccgcccgacgcgcagcgacaagccccacgccatggtttccggacggccgccacggctgctatgcgtcgacgacaacccggccaacctgctgctggtgcagaccctgctcagcgacctcggcgcccaggtcaccgcggtggacagcggctacgcggccctcgaggtagtgcagcgcgagcgcttcgacctggtcttcatggacgtgcagatgcccggcatggacggccgccaggccaccgaggcgatccgccgctgggaggccgagcgggaagtcagcccggtgccggtgatcgcgctcaccgcacatgcgctttccaacgagaagcgcgcattgctgcaggccggcatggacgactacctgaccaagccgatcgacgagcagcaattggcccaggtagtgctgaagtggaccggactgagcctgggccagtcgctggccagcatgagccgtgcgccgcagctcggccagttgagcgtgctcgatcccgaggaagggctgcgcctggccgccggcaaggccgacctcgccgccgacatgctggcgatgctgctggcctcgctggcggcggaccgccaggcgattcgccaggcccgcgacaacgacgaccgcaccgctttgctcgagagggtccaccggctgcatggcgccactcgctactgtggcgtgccgcagttgcgcgcggcctgccagaccagcgaaaccctgctcaagcagaacgatccggcggcggccgcggccctggacgagctggacaaggccatcgaggccctggccgacactgcctcggccaccacccacctgtcctccaccagcctcgactccagcgaactctga

SEQ ID NO: 318532 - DNA, 990 bp, Pseudomonas aeruginosa
atgcgcatcctgttcttcagcagccaggcctacgacagcgagagcttccgggccagcaaccaccggcacggcttcgaactgcacttccagcaggcccacctgcaggcggacacggcggtcctcgcccagggcttcgaagtagtctgcgccttcgtcaacgacgacctctcgcggccggtgctggaacgcctggcggccggcggcacgcgcctggtcgccctgcgctcggccggctacaaccacgtcgacctggccgccgccgaagcgctcggcctgccggtggtgcacgtccccgcctattcgccgcacgctgtcgccgagcacgcggtcggcctgatcctgacgctcaaccggcgcctgcaccgcgcctacaaccggacccgcgagggcgatttctcgctgcatgggctgaccggcttcgacctccacggcaaacgcgtcggagtgatcggcaccggacagatcggcgagaccttcgcccgcatcatggccggcttcggctgcgagctgctggcctacgatccctatcccaatccgcgcatccaagcactcggcggccgctacctggcgctcgacgccctgctcgccgagtccgacatcgtcagcctgcattgcccgctgaccgccgacacccgccacctcatcgacgcgcagcgcctggcgacgatgaaacccggcgcgatgctgatcaataccggccgtggcgccctggtgaacgccgcggcgctgatcgaggcgctgaagagcggacaactgggctacctcggcctcgatgtctatgaagaggaagcggatatctttttcgaggatcgctccgaccagcccctgcaggatgacgtgctggcacgcctgctgagcttccccaacgtggtggtgacggcccaccaggccttccttacccgcgaggccctggcggcgatcgccgacaccaccctggacaacatcgccgcctggcaggacgggacgccgcgcaatcgggtccgggcctga

SEQ ID NO: 318533 - DNA, 426 bp, Pseudomonas aeruginosa
atggctgaacacgatttccgttacaccctgctcaacccgcaatacaccctcaacgaatgccgcgcgctctccccggggcgctaccaggtcaccggcaccggcggctcgatcaaggccgacgacgtgctgctggtcagcctcaagggcagcaagaccctgagcatgcgcctgaccgtggaaaaggttcgccacctgatcaacccacccggccagtggctggcggtcgcccgcggcccggcattccgcgaactggcgatccatacctggcaggtcgactgcgaccagtgccaggctcgtctcgacttcgagttcgccgtggacgccagtctcggtcgcaaggccctggcgccggccgccgaagaacgcattcacgaactgggctggcgcagccgcgaaggcaagcacctgtgcccgaaatgccagtag

SEQ ID NO: 318534 - DNA, 408 bp, Pseudomonas aeruginosa
atgaaaccctctctcgccctcttcgcctccgccgccctggtcctgggcggttgcgccagccaggagaccaccctggaaaccgagcaggcctaccaggtcgactgggtcggggcacaaccgacgatggactacagccacatcagcctgaccttcgacggccagggccgcgccttcggcaatggcggctgcaaccactggttcgccagctacaccctgcaggacgacctccttcagttcggcgccatcggcagcacccgccgcctgtgcgcagcggagatcatggagcaggaacggcgcttcctggccctgctgcagagcgtccagcactgggacatttcgccgtccgacgagctgcgcctgtggccggccgaaggcaagccgctgcgcctggttcccgagcacgactga

SEQ ID NO: 318535 - DNA, 1929 bp, Pseudomonas aeruginosa
atgttcgccccacccagcaccgagacactcaaccgcttctttctgttgtcgtggctggtggtgctctggcaggtgctgcgcctgcaggacgggatcgtcttcgacgacgcctggctgccgctctggagcgtcgctgccagcctgagctacgccttcctttatatagtcccggtgtacctcgcctgccgactgctcctgcatttccatgatcgccttcccgtgcgcctcagtccgtggctggcaggcgtgctggccatcgtcggcagcgcggcggtacagatactgctctacgccgaccgcaccctctacgacctgtacggattccacctcaacggtttcagcatcggcctgctggtctcgcccggcggcctctccagcctcggcagcggcgacggcaccctgctcagcgcaagcctggcggccctggccctgctctgcctgcaggtgctgctgtacagcgcctgccaggtcagccgcgaacgccttcccgcgctccctcggcgcgcctggcgctacctgttggcggccttcctctgcctggtcctgggcgaacgcctggtctatgcgttcagctccctgcgcgactaccggccgatcctgctggccagcgaacgctatccgctttacctgccattgaccgtccgcagcctggcgcgaagcctgggcatccagccgacgcccacccagcgcgagctgctccagcagcagagcgacctgcactatcctctccggccgctggagatcagcgccccggcgcacccattgaacatcgtctggatcgtcgccgagtcgctccgcggggacatgctcgatccgcgctacatgcccaggctgtgggacttctccaaccgggcgatccgcctggacaaccactacagcagcggcaacctgacccagatgggcgtcttcggcatgttctacgggctgcacggcggctactgggacgccgtgctgaaggccggccagccgccggtgctcatggaggtactcaggcagcagaactaccagttccggatcaatgccgcgcaacgtttcagctatccgcccttcgaccgcagcgtgttcgtcaacctgcgcccccaggacctgcacgtgctggatagcccggagcctgcctggcagcgcgacgcccggaacaccgacgacctgctgcgcttcgtcgatcgccgactacccgaccggccgttcttcgcctgcctgttcctcgagtcgagccacgccaactacagcttccgcgacgagaccgcgaaaatccgcccctatctggtcaacttcaactacctgaccaccgatttccaggcgcagatgccgctgatcaagaaccgctacctgaatgccgtgcgcgaagtcgatacacagatcggccgcctgctgcagcacctggaaaaccagcacctgctggaaaacaccgcggtagtggtgctcggcgaccatggggaggagttcatggaacgctcgcgctggggccacaataccgagttcaatcgctatcagaccggcaccgtcgccgtgctgagcattcccggacaggcgccccgtgccgtccgcggcatcaccagccacatcgacctgcccgcaacgctcctgccgctgctgggcgtacacaatccgccccgcgactactcgctgggacaggacctgctcgcagcggactaccatcgcgactatgcggtgagcgccgataccacgcgcatcgcctacctgggcgaaggcttcaaggtgagcttcccactgcgtggcacggaccgtcaccacggtccggtgagcgatggcgacgaccgcccgctcgacgtggaacaacaggaagccatacgcggcccactccgtgcagcacgcctggaactgctgcaggatctcggccgcttcagcgccttgccggtaggggaagagccgtcgccgcggaacctcgcgacttcgttgacgccatga

SEQ ID NO: 318536 - DNA, 1050 bp, Pseudomonas aeruginosa
gtgcggaaaatcatccatatagactgcgactgtttctatgccgccctcgagatgcgcgacgaccccagcctgcgcggcaaggcgctggcggttggcggttcgccggacaagcgcggagtggtcgccacttgcagctacgaggcgcgggcctatggcgtgcgctcggcgatggccatgcgcacggcgctcaagctgtgtcccgatctgctggtggtgcgcccgcgtttcgatgtctaccgggcggtgtcgaagcagatccatgcgatcttccgcgattataccgatctgatcgagccgctttcgctggacgaggcctacctggacgtcagcgcttcgccgcatttcgccggtagcgccacgcggattgcccaggacatccgccgccgggtggccgaggagctgcacatcaccgtttcggcgggcgtcgcgccgaacaagttcctggccaagatcgccagcgactggcgcaagccggacgggctgttcgtgattaccccggagcaggtcgacgggttcgtcgccgagttgccggtggccaagttgcatggcgtcggcaaggtcacggcggagcgcctggcgcggatgggcatccgcacctgcgccgacctgcgccagggcagcaagctgagcctggtgcgcgagttcggcagcttcggcgaacgcctgtggggactggcccatggtatcgacgagcgaccggtggaagtcgacagccggcgccagtcggtgagcgtcgaatgtaccttcgatcgcgacctgccggacctggcggcttgcctggaggaactgccgaccctgctcgaggagctggacggacgcctgcaacgcctggatggcagttatcggccggacaagccgttcgttaaactgaagtttcacgatttcacccagaccacggtggaacagtccggcgccgggcgcgacctggagagctaccggcaattgctcggccaggcctttgcccgtggcaatcgtccggtgcgcctgatcggcgtcggcgtgcgcctgctcgacctgcagggcgcccacgaacaactcaggctgttctga

SEQ ID NO: 318537 - DNA, 315 bp, Pseudomonas aeruginosa
atgctgaacgtcgaacaattgaagcgcagcgtgaaccggatggaactcgacgacatccgccaggcagtggacgaactgcagatggacggcctggtcaccgacggcaagacgccgttcacccgcgtgcacttcaacacctgcttcgccgagatcgaggcgctgttccagcgcgccggcttccaccggccgctcgatgtggtcggctaccagggcgagatctatgcgttgtacgacccctctcgctgggaggccgtggaagtgctgcgctggttgaaggaataccgcgaggaatcgcgtcacctgactccggcgtga

SEQ ID NO: 318538 - DNA, 360 bp, Pseudomonas aeruginosa
atgatccaggcgggcattcatgtcggcgccggagtcgtgctgggcgtggccgctggatggtggctgggggattgggaacagtcgttgcaggtcaaggactcggtggcgcgggtcgattgcctgttgtacggcgccctgctggtggtgttgctccgccacgacggttggttgcgccgcctgggcctgctgggcctggggctgttctgcggttccctgctggtctattcggtgaatccggcaagcctgttcgctgcgaaagagtcctggagccttgcgcggatctccatgcgggccttcggtccgctggtgatgctggtcgtggggatggcctgcgcgcgcctggcacacgagttgcgctga

SEQ ID NO: 318539 - DNA, 2646 bp, Pseudomonas aeruginosa
atgcgcaccgacgctcccgttccagaacatcccgctccacccagctctcccgcgtccccacaacgcatccggctgatcgatcggattaccgcctaccgccagcccatcggcctggtcttcaccttgctgctgttcggcctggcgctggtggcctgctaccacctgctacgggagatcgatcccggcgccctccacgatgccatcgccgacgtgcccaggccggcgctgctcggcgccctgagcgcgaccgccctcggcttcgtcatcctgctcggctacgagtggtcggccagccgcttcgctggcgtcacgctgcccatgcgcagcctggccaccggcggcttcagcgccttcgccatcggcaatgcggtaggcctgtcgctgctttccggcggctccgtacgctaccgactgtattcccggcatggcatcggcgctgccgaaatagcccggatgacgctatttgccagcctttccctgggctgcgcactgccggtgctggcggcactcgccgcactctgcgacctcgacgatgcggcgtcggcgctgcacctgccccgcgccctggtcgccgtcatcgcgatcgccgtcctgtcgctggctgtcggcctggtggcgttcctggcccggcaccgcctgccgggagaacggccgtcccccgacagcctgctggtccgcctcggccgccgcagcctgcgcctgccaggcctgcgcctatcgctgctgcaactgctgatcaccgccctcgacgtcgccgccgccgctaccgtcctttatctgttgctgccggaaaccccacccttcgcggcgttcctgctggtctacctgctcgccctggccgccggcgtactcagccacgtaccgggcggagtcggggtgttcgaggcggtgctgctggccgcgttcgccggccaactgggcgccgcgccgctggccgcggccctgctcttgtaccgcttgatttatgtggtgctgccactgctgctggcctgccttttgttgctgttcctcgaagcgcgccggttgtgggtgacgcgccaggcgattcgcgtcgcctcgggtttcgccgcaccgatcctggcgatcctggtcttcctctccggtgtcgtgctgctgttttccggcgccacaccggcgatcgacacccgcctggaacacctcggtttcctcattccacatcgcctgatcgatgcctcgcacctggtcgccagcctgatcggcgtgctctgcctcctgctcgcgcagggtttgcgccgacggctgtcggccgcctgggccctgaccctggtgctgttgctggtgggcgccctgctttcgctgctgaaaggcttcgactgggaggaagccagcctgctgagcctgaccgccgcgctgctcgccatgttccgccgctccttctaccgtcccagccggctgatggaagtacccttctcgccgctttacgtaggcgccagcatctgcgtggtcggcgcctcggtctggctgctgctgttcgccaaccaggacgtgcattacagcaaccagctctggtggcagttcgccctggacgccgacgccccgcgcgccctgcgcgccgccctcggcagttgcctgctgctcctggccctggcccttggctggctgctgcgcgcggcaccgccggcgatccgcgagccgaacgcggaagagctgcagcgcgcggcgcggatcatccgccactcggaccagccggatggcggcctggccctgaccggcgacaaggccctgctcttccatgagagcgacgacgctttcctcatgtacgcccgccgcggtcgcagcatgatcgccctgtacgacccgatcggcccggccatgcagcgcgccgaactgatctggcagttccgcgacctctgcgacctgcaccatgcccgcccggtgttctaccaggtgcgtgccgagaacctgccgttctacatggacattggcctgaccgccctcaagctcggcgaagaagcgcgagtcgacctgctgcgcttcgacctggagaacaagggcaaggaaatgaaagacctgcgctacacctggaaccgcggccagcgcgacggcctggccctggagttccatgaaccgggccaggctccgctggacgagctgaaggcgatatcggacgcctggctgggcggcaagcaggtgcgcgagaaaggcttctccctgggccgcttcaccccgacgtacctgaacttcttccgcatcgccatcgtccgccaccaaggcaagccggtggccttcgccaacctgctggagaccgacagccgcgaactggcgagcctcgacctgatgcgcgtgcacccggacgcgccgaagctgaccatggagttcctcatgctcggcctcatcctccactacaaggcccagggccacgcgcgcttcagcctcggcatggtgccgctggccgggctccagccaaggcgcggcgcgccgttgacccagcgcctgggcgcgctggtcttccggcggggcgaacagttctacaatttccaggggctgcgacgcttcaaggacaagttccagcccgactgggaaccccgctacctggccgtgccagccgggctcgacccgctggtggccctggccgataccgccgcgctgatcgccggcggcctgactggattggtgaaacgctga

SEQ ID NO: 318540 - DNA, 1284 bp, Pseudomonas aeruginosa
atgtctgtcgtgaaacgtcactggcgccgttttctggtcgccgccctggtgctgatcgtcggtgccgccctgctgctctggagccgaccggcggcccaggcgaaactggaagccctggacctcgacgacggcggccacgccacccttgccgaacccggcgagaagccgcgctcgcgggtggtggtgatcgccgcccccgaacagcaactgaacgacgcccagatgctgaacctggctcacgacagcgccgcccgggtgatccagtacttccccccggaaaacggcgattgcagggcgcagcagtcccggctcgaagcggtcattgcccgcctcggcggcaagccgaacctggtcgccggcatcggcccaggctcgaccaccgcctggcgctggctcgccagccaggacgacgacaaggccaaggcgctctcggtcggcttcgacattgccctggccgagcgcgactgcgacgccccgctgccgcaccaggcgtcgcacggccagtggctgctggcctggaacgacaacccggacgacgacaccgcagtcttcgtccgcaagcagtcgagcgcggaaaccagcatcagcgactacgacaccccgctgtccgacgtgctcgcccatcagttgcgcctgcaactgcaaggcaacgccgaggccctgccggtactcgaggtccccgcggcgcaaccctcggacatcgtcaccctgttctattccggcgacggcggctggcgcgacctggacaaggactctgccgagcatatggccagcatgggctacccggtggtcggcatcgacaccctgcgctactactggcaacacaagagcccggaacagagcgccgccgacctctccaagctgatgcaacactaccgcgagaagtggggcgcgaaacgtttcgtcctggccggctactcgttcggcgctgacatcctgccggcgatctacaaccgcctgcccggaaaggaccagcagcaagtgaaagccatgctgctgctggcgctggcgcggaccggcagcttcgagatcgaagtggaaggctggctgggcaaggccggcgaggaagccgccaccggcccggaaatggccaggttgccggcggccaaggtgttctgcatctatggcgccgaagaaaaggacgaaagcggctgtacccaatcccaggccgtcggcgagaagctcgaactgccgggcggccaccacttcgacgaggactacctgtccctggcgaagaagatgctccaggccatccgcgaccgcgagaacgctcccgacgcctga

SEQ ID NO: 318541 - DNA, 549 bp, Pseudomonas aeruginosa
atgagctggaaaaacaccgaatcccgttatgggagcctgaccattgccctgcactggctgaccctgctgctgatcgccggggtctacgcctgtatcgaactgaagggcaatttccccaagggcagcgaaacccgcgaactgctcaagcaatggcacttcatgcttggcctgagcgttttcctgctggtctggttgcgcctgctggtgcgcctggccacccctaccccgcgcatagagcccgccatccccgcctggcaggcgacgctggccaggctgatgcactacgccctctacctgatgatgatcggcctgcccttcgccggctggctgatcctcagcgccgccggcaagccgataccgttcttcggcctggagctaccgccgctggtcgacaagaaccccgacctcgccgggcaaatcaaggaatggcacgaaaccatcggcaacgccggttatttcctgatcggcctgcacgccgccgcggcgctcttccatcacttcgtcagccgcgacaacaccctggtacggatgctgccgcaacggcgctga

SEQ ID NO: 318542 - DNA, 1905 bp, Pseudomonas aeruginosa
atgagtgatgcagcgacgcgtgccgaggagacgtcggaggggcattccagctctgccatcggcctgatggtcggggcggttggagtctgctatggggatattggcaccagtcccttgtataccctgaaagaggtcttcatcggcggctacggggtgcaggccaaccacgatggcgtccttggcgtgctgtcgctgatcttctggtcgctggtctgggtcgtttccatcaagtacgtgatcttcgtcctgcgtgccgacaaccagggcgagggcggggtgatggcgctgtcggccctggcgcgccgggcggcggcgccgttcggcaggctgcagaccttcgtggtggttgccggcctgatcggcgcggcgctgttctacggcgacagcatgatcaccccggcgatctcggtactgtcggcggtagaagggctggagatcgccttcgacggcctggagcactggacggtaccgctggcgcttatcgtgctgatcggcctgttcctgatccagaagcacggcaccgcgcggatcggcatcctgttcggcccggtcatggtgctctggttcggcgccctggcggcgctgggcgtctacggggtgatccagcagccggaagtgctgcaggcgatgaaccctgtatgggccgtgcgtttcttcagctcgcatcccggcatcggtgtcgccatcctcggcgccaccgtactggcgctgaccggcgccgaggcgctgtacgccgacatgggccacttcggtcgcaagccgatcgcccgtgcctggttcctgctggtgctgccggcgctggtgctgaactacttcggccagggcgcgaccatcctttccaacgccgaggcggcgcgcaaccccttctacctgctggcgccgggctgggcgctgctgccgatggtggcgctgtccaccctggccacggtgatcgcctcccaagcggtgatctccggcgccttctccctgacccgccaggcgatccagctcggctacgtgccgcggatgaccatccagcacacttccagccacgagcaggggcagatctacatcggcggggtgaattgggcgctgatggtcggcgtggtcctgctggtgctcggcttcgagtcctcggcgtcgctggcggctgcctacggcgtggcggtgaccggaaccatgctgatcaccaccctgctgatgggcgtggtgatctggcgcctgtggaaatggccgctgtggctgggcgtcccgttcttctgcgtgatgctcgcggtggacagcctgttcttcgccgccaacctgcccaaggtgatccagggcggcgccttcccggtcatcgcgggtatcgtcatcttcatcctgatgtccacctggaagcgtggccgccaactgctggtggagcgtctcgacgagggctcgctgccgctctcggtgttcatttccagcatgcgcgtgcagccgccgcaccgggtccaggggaccgcggtgttccttaccgcgcgtaccgacgcggtgcctcacgcgctgctgcacaacctgttgcacaaccaggtgctgcacgagcaggtggtgctgctcaccgtggtcaacgaagacagcccacgggtttcgccggatcgccgtttcgaggtcgaggcctatggcgacgggttcttccgggtgatcctgcacttcggcttcatggaagagccagacatcccggctgccttgcgcctgtgccatctcaacgaactggacttcagcccgatgcgcaccacctacttcctcagccgggagacggtgattccatccaagcgcatcggcatggcgcgctggcgcgaggggttgttcgccttcctgctgaagaacgccaacggcaacctgcgctatttcaacctgccgctcaaccgggtgatcgagttgggaacccaggtcgagatctga

SEQ ID NO: 318543 - DNA, 1323 bp, Pseudomonas aeruginosa
atgtccacccccactcccaaagtcggcttcgtcagtcttggatgccccaaggcgctggtcgactccgagcgcatcctcacccagctgcgcatggaaggctatgaggtcgttccgacctacgaagacgccgacgtcgtggtggtcaacacctgcggtttcatcgacagcgccaaggccgagtccctggaagtgatcggcgaagccatcgccgagaacggcaaggtcatcgtcaccggctgcatgggcgtggaagagcacgcgatccgcgacgtccatcccagcgtgctggcggtcaccggcccgcaacagtacgagcaggtggttaccgcggtgcacgaagtggtgccgccgaagaccgaacacaacccgctggtcgacctggtcccgccgcaaggcgtcaagctgaccccgcgccactacgcctacctgaagatttccgaaggctgcaaccacagctgcagcttctgcatcatcccgtccatgcgcggcaagctggtcagccggccggtcggcgacgtgctgagcgaggccgagcgcctggtcaaggccggggtcaaggaactcctggtgatttcccaggacaccagcgcctacggcgtggacctgaagtacaagaccgacttctggaacggccagccggtcaagacccgcatgaaggaactctgcgaggcgctgagcagcatgggcgtgtgggttcgcctgcactacgtctacccgtaccccaacgtcgacgacgtgatcccgctgatggccgccggcaagctcctgccgtacctcgacatccccttccagcacgccagcccgaaggtgctcaaggccatgaagcgcccggccttcgaggacaagaccctggcccggatcaagcagtggcgcgagatctgcccggaactgaccatccgctcgaccttcatcgtcggcttcccgggcgaaaccgaagaagacttccagtacctgctcgactggctgacggaagcccagctcgaccgcgtcggctgcttccagtactcccccgtcgaaggcgctccggccaacgagctgggcctggagccggtgccggacgaggtcaagcaggaccgctgggaacgcttcatggcccaccagcaggcgatttccgccgctcgcctgcagctcaaggtgggcaaggaaatcgaagtgctgatcgacgaagtcgacgaacagggcgcggtcggccgctcctgggccgacgctccggaaatcgacggcaacgtgttcgtcgacagcgacgagctgaagccgggcgacaaggtccgcgtgcgcatcaccgatgccgacgagtacgacctctgggccgagctggtctga

SEQ ID NO: 318544 - DNA, 462 bp, Pseudomonas aeruginosa
atgctcaacaacgacgtactacgcagcctgcgctacctgctggatcttcccgacgcacatctggccgaactggccgcccggttcggcgagcaagtcgaagcggacctgctcgaggcttacctgaagaaggaagacgaagacggcttccaggcctgccccgaccgctacctggcgcgctgcctggacggactgatcatccagcgccgcggtcgcgacgagtcgcgtccgctaccgccgctggagctgccgttgagcaacaacatgatcctgaagaagctgcgggtcgccttcgaactcaaggaggaagacctccatgccatcctcgacagcgtcgacttcccggtctccaaacccgagctgagcgccctgtttcgcaagcccggccacagcaactaccggacctgcggcgaccagttgctgcgcaacttcctcaagggcctgaccctgcgcgtccgtggctga

SEQ ID NO: 318545 - DNA, 393 bp, Pseudomonas aeruginosa
gtggctgaacgcgcggagccactgctggcggttctgctccaggcgccgccctgcgtcgacccctggttcctggagtgccgccaggatcgcgccggcctcaccatcctcgtccgcgacctcgccaaccagcgcacctggcgcgtcgagttcgtcgaagtcgaaggcctgcgccagctcgacgctgccgacctgctggaattctggccagcctgtgcggcatccgagggttggctgtaccgggtcgagcaaggcggctggctggaccaggaatgccgtcgcgagggcttcgtcgcccgcgagaccaaggccgtcgacgagtatttcgtcaatggcggcgatcgctgcctgagcgtgctgtcctggtcgccaccgaaggtttccccgctgatctga

SEQ ID NO: 318546 - DNA, 1449 bp, Pseudomonas aeruginosa
atgaccgaagtagaagccaagaagccgcaggaaagcctgcaggaccgcctagcgcaggtggtcgagctgctgcatcgccacaaggtggtggaagacctgacccatcgtcaggaaggccagcaccatgaccgggtggaaaacctcgtccaccggcagaatctcgtagaactccagcgcaagctggaggaactgcaccccgccgacatcgcccacatcctcgaatcgctgccgctggacgaccgcctgacggtctggcaactggtcaagtccgaggacgacggcgacatcctcctcgaagtctccgacgcggtccgggaaaccctgatcgcggacatggacgaccacgagatcatcgccgcgaccaaggacctggacgccgacgaactcgccgacctggcaccggaactgccgcgcgacgtggtccatgaactgatggaaagcctcgacgcgcagcagcgcgagcgagtgcgttcggcgctgtcctacgaggaggaccaggtcggcgcgctgatggacttcgagatggtcaccatccgcgaggacgtcagcctggaagtggtgctacgctacctgcgccgcctgaaggaactgcccgggcataccgacaaactgttcgtggtcgactacgacggcgtgctcaagggcgtgctgccgatcaagcgcctgctggtcaacgatccggacaagcaagtgctggaagtcatggccaccgacccggtgaccttccacccggacgaggacggctacgacgccgcccaggcattcgagcgttacgacctgatttccgcgccggtggtggacaagggcggcaagctgatcggtcgtctgaccatcgacgagatggtcgacctgatccgtgaggaaagcgaaagcgaagtcctcaacatggccggtctgcgtgaagaagaagacatcttcgcctcggtctggaagtcggtgcgcaaccgctgggcctggctggccaccaacctgatcaccgccttcgtcgcctcgcgggtgatcggtctgttcgaaggctccatcgagaaactggtggcgctggccgcgctgatgccgatcgttgccggcatcggtggcaattccggcaaccagaccatcaccatgatcgtccgcgccatcgcgctcgaccaggtacagccgaccagcaacagtcgcaaccgcctgctgcgcaaggagcttggcgtcgcgctggtcaacggcctggcgtggggcggagtgatcggcgtggtggccttctatctttacggcaactgggaactgggcgtggtgatgaccgccgcgatgaccctgaacctgctgctggcggcgatgatgggagtgctgatcccgatgaccctgcatcgtttcggacgcgatccggcgatgggctccagcgtgatgatcactgcgatgaccgacagcggcggtttcttcatcttcctcggcctggcgacgatcttcctgatgtag

SEQ ID NO: 318547 - DNA, 540 bp, Pseudomonas aeruginosa
atgcgttccctgtccctccttctcctcctctcgctggcgtccacctgcgaggccgctgcggtattccgctgcgaagacgccagcggccatgtcagcttcacccaactcggttgccccgccgggcaggccggcgagaccgtcgtggcggacaacccgccgccgggaggcaggagcgtcacgccgatggccgagacgaagacgaaaaaggcgtccatcggccggaaaagcgtgccgctcgcggtgatcggagaaagagaagatcgctgcggcagacgcctggacgagaaggaacgccgcaaggcgatcgtggagcagcggataatggcgggaatgacccgctccgatgtggagcgggcgctgggcaagccggaccgggtcagcgggaacaatgcggaggtgcgttatcagtacaaggccgacaagcgacggggagcgagaagcgtgagcttcgatcaggagggatgtgtgaagggaagagaaggtaccgggtggagcgagtcgatcccgggagctaaggccgggccgtcctcataccgatga

SEQ ID NO: 318548 - DNA, 453 bp, Pseudomonas aeruginosa
atggtcatgttgatcagtcgtcgcgtcggcatcgttcgcctggatgcggtgatttccgaaaacctcgcgcaggctgccgtcagcgcgcgcggcgaccagctcatcaccatcgtcggcagcattgtcgaccatgcgcccgctggcgagccgttgccctccttgctgccgatggagggaggcagccgcgcgttgaacgagtgccgtgtgcgcaagggcatcgctgccttgacttcactgcaaggcgcttccgaaacggtggacgtgcaaacgggattccacctgtatcgcggtctgttcatcacgcgcgttgttgcccggcgaaccgcagaaagaggattgagcctgaccataaccgccagccagaggcgtgcgcggcgggcaggcggtaggttgcttaagactgtcgtccgtcttttccatgcaggcagggcgacaccctgcccggcacgctaa

SEQ ID NO: 318549 - DNA, 504 bp, Pseudomonas aeruginosa
atgtccagtgcaaccgtgcgcctggatcacgccgccctgcgcgaaacgttgcggcagttgttcggcctgcccgccggcagcgtcatcgatgccgatcaactgctggccccgccggccatccccttcatgaccttgcgcctggagtcctcgagcctgcttggcaaggtgcggcgggagttttccgccagtggcgagcaggagtccctgctggccagttgcgagagcatctttcgcctgacctggcatggtcccgaggcgcaccagtacctgcaggatgcccgctgcctgctgcagtcaggcaatgccggcgagcgcctgcgcgtgctgaaggccagcctgctgcgcctgacacccatcgaaaacctgtccgtcgtgcaggatggccaggcgctggggcaggctcgtttcgaccttgttctcgctcacgaacacgtgctgctcgtcgacctcgagcgcaccgctcccgggcaggcctccgggggggcgggtggaacggcttcctag

SEQ ID NO: 318550 - DNA, 276 bp, Pseudomonas aeruginosa
atggttgatccgctgtccaccctgaccgtgctggtctgctcggcgatctgcatgcgcctgatcacctatcgccgcgccggcgcgcgtttccgccccggcgtttccctgtgcgcctacctgctggcgttgtgcaccggctgccaggcgctgggaatagtggccgggttgtatcgtgccgagcacctctcgccgtggatgctcggggtactgctggtgctgctggtcctgctgttgcaggcgcgcggcaacctggcgcgggtcctgcgcctgcattga

SEQ ID NO: 318551 - DNA, 375 bp, Pseudomonas aeruginosa
atgtccgagccaagctctgcggcctccgccgccagcgcaatggctggcgtcggcctggccatgtacctgccgggtatcgatggcaacgccttgctgggaggcttcggcggcgccatcttctttgtcgtgttcgcccgtgactacaacgccctgacccgcctcggctacctgctggtgtcctgggtcggcggctattacgccggaatcgaggcgctcggccgcggattgacccagaccagcggcatggccgccttcgtcgccgcgaccctctgcgtgaccggcggcatcggcatgctcgagtggatgcgtggcggcgaactgcccagctggatgcgcgggctgttgcgccgccggggaggcaagtccgatggttga

SEQ ID NO: 318552 - DNA, 531 bp, Pseudomonas aeruginosa
atgtttcaaagtaccgagcaggcgctggccgtggcctactggatgttcgagcaccagccgggaccgaagtcgtcgacggcgatggtgatcgatggcctgcgcgagcgcttcgatcgcagcttcatcgaacacctgcccagcggtttgagtccgcacgaatggcaggcccaggcggtgatgaccgtgcgtttcgcccagcgccagttggctgcgcacccactggagctggcggtggtgcgggccgagttcgcccgcgggcgggatttcgtccttggcctggcggctttgcgcgactggctgaagcccggggccgacccgatcgagcagcgggcaaccctggccttgctgatgcgcatgttccgtcgtccgccgtcgagcatccgcgagatcgagcgactcagcgggctgtcgaagagcaccctgcatcgctgggacaaggaatggcgcgagcgggtcgtcgctttgctgcgccaggccttgcagcggctggaggagccgatggcggaggtggggatcgtgggcgagcgctaa

SEQ ID NO: 318553 - DNA, 714 bp, Pseudomonas aeruginosa
atggaactcaaagatcgcatcaaggcggcgcgcaagcacgcccatctcagccaggtccagcttgcccaggcggtaggcatgacccagacctccatttccgatctggagcgcggcaagtcccgcgccaccagcttcgtcgcgcagatcgccggcgcctgcggcgtcaaccccctgtggctggcggaaggtcgtggcgagatgctcgccgagcgcggccaggcgaatgcaggccccaatgccagttggcttggcgcagtagagtcatgggacgacgaaacgcccctggatgccgacgagatcgaactgcccttctacaaggagatcgagctgtccggcggcaagggcagcacggtgatcctgcagaccggcgggcgcaagctgcgcttcggcaagtacaccctgcgcaagaagaacatcgatccggccagtgcagcctgcgtcacggtcagcggcaacagcatggagccggtgctgccggacggcagcacggtaggcgtggacactagcgcgcggacgatcaaggacggcgacatgtacgccttcgaccacgacggccaactgcgcgttaaactgctttaccgccttccaggcggcggcctgcgcattcgcagcttcaacagtgacgagcatccggacgagcgctacgagccccaggaagccgccgagcacatcaacgtgatcggccgggtgttctggtactcggtgctggtctga

SEQ ID NO: 318554 - DNA, 186 bp, Pseudomonas aeruginosa
atgctgattctgactcgtcgggtcggagagaccctgatggtaggtgacgacgtcaccgtgacggtactgggtgtcaaagggaaccaggtgcgcatcggcgtcaacgcgccgaaggaagtcgccgtgcaccgggaggaaatttaccagcgcatccagaaagagaaagatcaagagccaaaccattaa

SEQ ID NO: 318555 - DNA, 1146 bp, Pseudomonas aeruginosa
atggctttgatcgtacagaagtttggagggacctccgtcggcaccgtcgagcgtatcgagcaggtggccgagaaggtgaagaaattccgcgaagcgggcgatgacgtcgtcgtggtggtatccgccatgagcggcgagaccaaccgtctgatcggcctggccaaccagatcatggagcagccggttccgcgcgaactggacgtcatggtctcgaccggagagcaggtgaccatcgccctgctcagcatggccctgatcaagcgcggcgtgccggcggtctcctataccggcaaccaggtgcgtatcctcaccgacagtgcgcacaccaaggcgcgcatcctgcacatcgacgacacccacatccgcgccgacctcaaggccggcagggtagtggtggtcgccggtttccagggcgtcgacggcaacggcaacatcaccacgctgggccgcggcggttccgataccaccggggtggccctggcggcggcgttgaaggccgacgaatgccagatctacaccgacgtcgacggcgtctacaccaccgatccgcgcgtagtgccgcaggcccgtcggctggacaagatcaccttcgaggaaatgctggaaatggccagcctcggttccaaggtgctgcagatccgggcggtcgagttcgccggcaagtacaacgttccgctgcgcgtgctgcacagcttccaggagggtccgggcaccctcattactatcgatgatgaagaggaatccatggaacagccgatcatctccggcatcgccttcaaccgcgacgaagccaagctgaccatccgtggcgtacccgatacccccggcgtggccttcaagatcctcgggccgatcagtgccgccaatgtggaagtcgacatgatcgtgcagaacgtggcgcacgataacaccaccgacttcaccttcacggtgcatcgcaacgattacctgaacgccctggaaatcctcaagcagaccgccagccgcatgttcgaggcgctggccaaggaaagcatcaacatccagatgatctccacctcggaaatcaaggtttccgtggtgatcgaagagaagtacctggaactggcggtacgtgccctgcacacggcgttcgagctcgacgcgccggcgcgacagggtgagtga

SEQ ID NO: 318556 - DNA, 2625 bp, Pseudomonas aeruginosa
atgaaaagcgctgaaatccgtgaagccttcctccgcttcttcgaagagaagggacacacccgtgtcgcttccagttcgctgatcccggcgaacgatccgaccctgctgttcaccaacgcgggcatgaaccagttcaaggactgcttcctcggcctggaaaagcgcgcctacacccgtgcgaccaccagccagaaatgcgtgcgcgccggcggcaagcacaacgacctggaaaacgtcggctacaccgcgcggcaccacaccttcttcgaaatgctgggtaacttcagcttcggcgactatttcaagcgcgacgccatccattacgcctgggagttcctcaccggcgagaaatggctgaacctgcccaaggaaaagctctgggtcaccgtctacgccaccgacgacgaggcctacgacatctggaccaaggaagtcggcgtgcccgccgagcgtatggtgcggatcggcgacaacaagggcgcgccctatgcgtccgacaacttctgggcgatgggcgataccggaccctgcggtccctgcaccgagatattcttcgaccatgggccggagatctggggcggcccgcccggttcgccggaagaggacggcgaccgctacatcgagatctggaacaacgtgttcatgcagttcaaccgcaccgcggacggcgtcatgcacccgctgccggccccgagcgtggacaccggcatgggcctggagcgcgtcagcgcggtactccagcacgtgcactcgaactatgagatcgacctgttccagaacctgctgaaagcctccgccgaggccatcggctgcgccaacgacgacgcgccgtcgctgaaggtggtagccgatcacatccgttcctgcagcttcctgatcgccgacggcgtactgccgtccaacgagggtcgcggctacgtcttgcggcggatcatccgccgcgcctgccgccacggcaacaagctgggcgccaggggcaccttcttccacaagatcgtcgcagcgctggtcaccgagatgggcgatgccttccccgagctgaagcaacagcaggcgcacatcgagcgcgtgctgaagaccgaggaagaacagttcgccaagaccctggagcaaggcctgaagatcctcgaacaggacctcgccgaactgcagggcagcgtgattcccggcaacgtggtgttcaagctgtacgacacctatggcttcccggtcgacctgaccaatgacatcgcccgcgagcgcgagctgaccatcgacgaggacggcttcgagcgcgagatggaggcccagcgcgagcgcgcccgcgcttccagcgccttcggcatggactacaacagcctggtcaaggtcgacggcgagacccgcttcctcggctatcagggcgtctccggcgccgggcagatcgtcgcgctgttcagggacggccaggccgtcgagcgcctggaggagggcgaggagggcgtcgtggtcctcgaccagacgccgttctacgccgagtccggcggccaggtcggcgacagtggctacctcgaggcggctggcgtgcgcttcgacgtgcgcgataccaccaaggctggcggcgcgcacctgcaccatggcgtggtcgcccggggcaacctgagcgtcggcggcgcggtcaaggccgaggtcgacgcctcggtacgccaggccaccgcgctcaaccactccgcgacccacctgctgcatgccgcgctgcgccaggtactgggcgaccacgtacaacagaagggctcgctggtggacagccagcgcctgcgtttcgacttcagccacttcgaggcgatcaaggcggaacaactgaaggccctggaggatatcgtaaacgccgaaatccgtcgcaacaccgaggtcgagaccgaggaaaccgatatcgacaccgccaaggccaagggcgccatggcgctgttcggcgagaagtacggcgaccaggtgcgcgtactgagcatgggcggcgatttctccgtcgagctgtgcggtggcacccacgtatcccgcaccggcgacatcggcctgttcaagatcaccagcgagggtggcgtggctgccggcgtacgccgtatcgaggcggtcaccggcgcggcggcgctggcctacctgaacggtgccgaggagcagctcaaggaagccgccagcctggtcaagggcagtcgcgacaacctgctggacaagctcggcgccctgctggagcgcaaccgttcgctggagaaggaactggaacagctcaaggccaaggctgccagcgcggccggcgacgatctttcggcggcggcggtggaaatcaagggcgcgaaggtactcgccgcgcgcctcgatggtctggacggcaaggcgctgctggcgctggtcgaccagttgaagaacaagctcggccgcgcagtgatcctgctcggcggcgagctggacgggaaggtcgtactggtcgcaggcgtgacccaggacctgaccggccaactgaaggccggcgagcttatgaagcaagccgcggcggcagttggtggcaaaggtggcggacgcccggatatggcccagggcggcggcaccgatgcagcgaaattggacgaggccctggccctggcccagcgcttcgtcgagcaagggctctga

SEQ ID NO: 318557 - DNA, 1005 bp, Pseudomonas aeruginosa
gtgcctgtcatcgacctgcgcagcgacaccgtcacccagcccaccgccggcatgcgcgaagccatggccgcggccgaactgggcgacgacgtctatggcgaggaccccacggtcaaccgcctggaggccgagctggcggcgcgcctgggcttcgccgcggcgctcttcgtaccgaccgggaccatgagcaacctgctcggattgatggcccactgcgagcgcggcgacgaatacatcgtcggccagcaggcgcatacctacaaatacgagggcggcggtgccgcggtgctgggctcgatccagccgcagccgatcgacggcgaggccgacggatcgctccacctggacaaggtcgcggcggcgatcaaggccgacgatttccacttcgccaggacccgcctgctggccctggaaaacaccatgcagggcaaggtgctgccgctcgactacctggccgcggcgcgcgccttcactcgcgcgcgtggcctggccctgcacctggatggcgcgcgcctgtacaacgcggcggtgaagctgggcgtagacgccagcgagatcacccgacacttcgactcggtgtcggtgtgcctgtccaagggcctcggtgcgccggtgggctcggtgctttgcggcagcgtagaactgatcggcaaggcccgtcgctggcgcaagatggtcggcggcgggatgcgccaggccggcctgttggcggctgccggactgtacgccctcgaccaccaggtggcacgcctggccgacgaccacgccaacgccgcacgcctgggcgacgggctgcgcgaactgggctatgcggtggagccggtgcagaccaacatggtctacgtcgatgtcggcgagcgggcggtcgcgctgcgcgacttcctcgccgagcgcggggtgcggatcagcgcggcggcgcgtttgcgcctggtcacccacctggacgtttccgccgagtccataggacaagtactggatgccttcgcggcctttcgtcgctcataa

SEQ ID NO: 318558 - DNA, 999 bp, Pseudomonas aeruginosa
atgctcgccctcggcaaactgctcgacttgaccctggccggccgcgagccgaccgagaagatccagctcaccgccgacggcacccgcctgcactggctggccgagggcgcgctggaagtcacgccgatcggcgcccgcgataacggcgtcgacctgttgctctcggccggtatccacggcaacgagaccgcgcccatcgaactgctcgaacggctgatccgcaaggtcgccgctggcaccctcaagcctgccgccagggtcctcttcctgttcggcaaccccgaagccatccgccgcggcgagcgctacgtcgaacaggacatgaaccgcctgttcaacggtcgccacgaggagggcagtggcaacgaggccttccgtgccgccgagctggagcgcctggcccaggtgttcttcagcaagaccgagcgagtccatctgcactacgacctgcataccgcgatccgcggctcgaagatcgagcagttcgccctctacccctgggccgagggccgccagcattcccgcagcgaactggcccgcctgcgcgacgccggcatcgaggcggtgctgttgcagaacaagccgggcatcaccttcagcgcctacacctacggccagctcggcgccgaggcctttaccctggaactgggcaaggcacgtccgttcggagagaaccaggaggtcaacctggagcgcctggagcggagcctggagctgctgatcgacggcagcgaggaacagccggacggctcccggctcgacggcctcaagctgttcagcgtgtcgcgcgaggtgatcaagcacagcgaccacttccgcctgcacctcgacgacgacgtggccaacttcaccgaactctcgccgggctacctgctggccgaggatatcggcggcacgcgctgggtggtggacgaggtcggcgcgcgcatcatcttccccaatccacgggtgaagaacggcctgcgtgccggaatcctggtggtgccggccaagctctga

SEQ ID NO: 318559 - DNA, 291 bp, Pseudomonas aeruginosa
atgtccgatagcctgcaactgatcctcgaagataccgacggcacccagctggaaacttcctgcacccgtttcgccgtggtctggcagggcaaggaagtgtgggtccagcaagccggcaacggccagttgctgatcggcgtcgacgtcgaagacggcgataccgaatacaccaacctgctgctgcggccgatggcgaccaacctggtcagcctgcaactggagatggagccgatcgaagagggcgacgaccacgagcacggccccgactgcggctgcgaccacacccactga

SEQ ID NO: 318560 - DNA, 1347 bp, Pseudomonas aeruginosa
atgaatgcccatgaagtgaatttcgacggcctggtcggcccgacccacaactacggcggcctgtcctacggcaatgtcgcttcgcaaagcaacagccaggcggtgtccaacccgaaggaagcggcgaagcagggcctggcgaagatgaaggcgctgatggagatgggtttcaagcagggggtactcgctccgcaagcccgcccggataccgctgcgctgcgtagcctgggcttctccggcagcgacgaggaggtgatccgccgcgcggcgaaggaagcgatgcctctcctcgccgcctgcagctcggcttcgagcatgtggaccgccaatgccgccacggtcagcccgagtgccgacaccgccgatggccgcgtgcatttcaccgcggccaacctgaactgcaagttccaccgatccatcgagcatcccaccaccagccgcgtgctggcggcgatgttcaacgacgagcggcatttcgcccatcacgcggcgctgccggcagtgagccagttcggcgacgaaggcgcggccaaccacacgcgcttctgcaaggactatggcgatgccggcgtggagttcttcgtcttcggtcgcagcgccttcgacagtcgcttcccggcgccgcaacgctatccggcgcgccagaccctggaagcctgccaggccgtcgcgcgtctgcacgggctgagcgaggccggagtggtctacgctcaacagaacccggcggtgatcgaccagggcgtgttccacaacgatgtgatctcggtgggcaatggcgaggtgctgttccatcacgaggacgccttcctcgataccgagaaggtccttgccgaactgcacgacaagctgggccgccgcggcggccgcttccgcgccatctgcgtgccgcgcgaccaggtcgcggtggaggacgcggtgaagtcctacctgttcaacagccaactgctgtcgaaggccgacggttcgatgctgctggtggtaccggaggagtgtcggaacaacccgcgggtctggaactacctggaccagctcaccggcgacgacggtccgatccgcgaagtgaaggtcttcgacctcaagcagagcatgcagaacggcggcggtccggcttgcctgcgcttgcgcgtggcgctgcaggaacgggagctggcggcggtgaatccgggggtgatcatgagcgccggcctgtacgacacgctggtagcctgggtcgaccggcactaccgcgaccgcctgagcgagaccgacctggccgacccccaactgctgctggagtgccggacggcattggatgaactgacgcagatccttaaactgggctcggtttattccttccaactcgattga

SEQ ID NO: 318561 - DNA, 1464 bp, Pseudomonas aeruginosa
atgagtacccattacattgccggccagtggctggcgggccagggcgagaccctggagtccctcgacccggttggccagggcgtggtctggtccgggcgcggcgctgacgccacccaggtcgacgccgccgtgcgcgccgcccgcgaggccttcccggcctgggcgcggcgcccgctggagcagcgcatcgagttgctcgagcgcttcgctgcgaccctcaagtcccgcgccgacgagctggcccgagtgatcggcgaggaaaccggcaagccgctgtgggagtcggccaccgaagtgaccagcatggtcaacaaggtggcgatctcggtgcaggcgttccgcgagcgcaccggcgagaagtccggtccgctggccgacgctaccgccgtgctacggcacaagccgcatggcgtggtggcggtattcggtccctacaatttccccggccacctgcccaacgggcatatcgtcccggcgctgctggccggtaactgcgtggtgttcaagcccagcgagctgaccccgaaggtcgccgagctgacgctcaaggcctggatccaggccggcctgccggccggcgtgctcaacctggtccagggcggtcgcgaaaccggcgtcgcgctggccgcccaccgtgggctcgacggtctgttcttcaccgggtccagtcgcaccggcaacctgctgcacagccagtttggcggccagccgcagaaaatcctggcgctggagatgggcggcaacaacccgctggtggtggaggaggtcgccgacctcgacgccgccgtctacaccatcatccagtccgccttcatctccgcaggccagcgttgcacctgcgcccgccgcctgctggtgccgcagggcgcctggggcgacgcactgctggcgcgcctggtggcggtcagcgctaccctgcgggtcggtcgcttcgacgaacagccggcgccgttcatgggcgcggtgatttcgctgagcgccgccgagcacctgctcaaggcccaggagcatttgatcggcaagggcgcacagccgctgctggcgatgacccagccgatcgacggcgccgccctgctgaccccgggcatcctcgacgtcagcgcggtggccgagcgaccggacgaagagttcttcgggccgctgttgcaagtgatccgctactccgatttcgctgcggcgatccgtgaagccaacgccacccagtacggcctggccgccgggttgctgtcggattcccgcgagcgtttcgagcagttcctcgtggaaagccgcgccggcatcgtcaactggaacaagcagctcaccggcgccgccagcagcgcgccgttcggcggtatcggcgcgtccggcaaccaccggccgagcgcctactacgccgccgattactgcgcctatccggtcgcctcgctggaaagccccagcgtgtcccttcctgccaccctgactcccgggatcagcctatga

SEQ ID NO: 318562 - DNA, 1023 bp, Pseudomonas aeruginosa
atgatcgtacgtcctgttaccagcgccgacctgccggccctgatcgagctggcgcgcagcaccggcaccggcctgaccaccctgccggccaacgagcagcgcctgcagcatcgcgtcagctgggccgagaaggccttccgcggcgaggccgaacgcggcgacgccgactacctgttcgtcctcgaggacgacgccggcaaggtcgtcggcatctccgccatcgccggagcggtggggcttcgcgaaccctggtacaactaccgggtcggcctcaccgtgagcgcctcgcaggaactcaacatccatcgcgagatccccacgctgttcctggccaacgacctgaccggcaattccgagctgtgctcgctgttcctccacgccgaccaccgcagcggcctcaacggcaagctgctgtcgcgcgcgcgcttcctgttcatcgccgaattccgccacctgttcggcgacaagctgatcgccgagatgcgcggcatgtccgacgaggaggggcgttcgccattctgggaaagcctcggccggcacttcttcaagatggaattctcccaggccgactacctcaccggggtcggcaacaaggccttcatcgccgagctgatgccgaagttcccgctctacacctgcttcctctccgaggaggcgcgcggggtgatcggccgcgtccatccgaacaccgagccggcgctggccatgctcaaggccgagggcttcagctaccagggctacgtcgacatcttcgacgccggcccggcgatcgaggccgagaccgacaagatccgcgccatcgccgagagccagaacctggtgctggcggtgggcactcccggcgacgacgccgagccctacctgatccacaaccgcaagcgcgaagactgtcgcatcaccgccgcgccggcgcgggccgccgccggcaccctggtggtcgatccgctgactgccaagcgcctgcgcctgtcggccggcgcctcggtacgcgcggtgccgctgtcggcgcagaagcgcggttga

SEQ ID NO: 318563 - DNA, 1017 bp, Pseudomonas aeruginosa
atgttggtgatgcgccccgcccaagcggccgacctgccacaggtgcagcgtctggcggcggacagcccggtaggcgtcacgtccttgccggatgacgccgaacgcctgcgcgacaagatcctcgcttccgaggcctcgttcgccgcggaggtgagctacaacggcgaggaaagctatttcttcgtcctcgaggacagcgccagcggcgagctggtcggctgctcggcgatcgtcgcctcggccgggttctcggaaccgttctacagcttccgcaacgaaaccttcgtgcacgcctcgcgctcgctgtcgatccacaacaagatccatgtcctctcgctgtgccacgaccttaccggcaacagcctgctgaccagtttctacgtacagcgcgacctggtgcagagcgtctacgccgaactcaactcgcgcggtcgcctgctgttcatggccagccatccggagcgcttcgccgacgcggtggtggtggagatcgtcggctacagcgacgagcagggcgaatcgccgttctggaacgcggtcgggcgcaacttcttcgacctgaactacatcgaggcggaaaagctctccgggctgaagagccgcaccttcctcgccgaactgatgccgcactatccgatctatgtgccactgttgccggatgccgcccaggagtccatgggccaggtccacccgcgagcgcagatcaccttcgatatcctgatgcgcgaaggcttcgagaccgacaactacatcgacatcttcgatggcggcccgaccctgcacgcgcgtacctcggggattcgctcgatcgcccagagccgggtggttccggtgaagatcggcgaggcgccgaagagcgggcgtccatacctggtcaccaacggccagttgcaggacttccgcgcggtcgtgctggacctggactgggcgcccggcaagccggtggccctgagtgttgaagccgccgaggccctgggcgtcggcgaaggcgccagcgtgcgcctggtagcggtctga

SEQ ID NO: 318564 - DNA, 1221 bp, Pseudomonas aeruginosa
atgtccgctccccatgcgcaggtagaacgtgccgatttcgaccggtatatggtccccaactacgcccccgccgccttcattccggtgcgaggcgagggatcgcgcgtctgggaccagagcggccgcgaactgatcgatttcgccggcggcatcgccgtgacctccctgggccacgcgcatccggcgctggtcaaggcgctcaccgagcaggcccagcgcatctggcacgtttccaacgtcttcactaacgagccggccctgcgcctggcgcgcaagctggtggacgccaccttcgccgagcgggtgttcctcgccaattccggcgccgaagccaacgaggcggccttcaagctggctcgccgctacgccaacgatgtctacggcccgcagaagtacgagatcatcgccgccagcaacagcttccacgggcgcaccctgttcaccgtcaacgtcggcggccagccgaagtattccgatggcttcgggcccaagttcgagggtatcacccacgttccctacaacgacctggaagcgctgaaggcggcgatctccgacaagacctgcgccgtggtgctggaaccgatccagggcgagggcggcgtgctgccggcgcagcaggcctacctggaaggggcgcgcaagctgtgcgacgagcacaacgcgctgctggtcttcgacgaggtccagagcggcatgggccgggtcggcgagctgttcgcctacatgcactacggcgtggtcccggacatcctctccagcgccaagagcctgggcggcggcttccctatcggtgcgatgctgaccaccggcgagatcgccaagcacctgtcggtcggcacccacggcaccacctacggcggcaacccgctggcgtcggcggtggccgaggcggcgctggacgtgatcaataccccggaagtgctggatggcgtgaaggccaagcatgagcgcttcaagtcccgcctgcagaagatcggccaggagtacggcatcttcgacgagatccgcggcatgggcctgctgatcggtgcggcgctgaccgacgagtggaagggcaaggccagggatgtgctcaacgccgccgagaaagaggcggtcatggtgctccaggccagcccggacgtggtgcgcttcgcgccgagcctggtgatcgacgacgccgagatcgacgaaggcctggagcgcttcgagcgcgccgtggccaagctggtccgcggctga

SEQ ID NO: 318565 - DNA, 261 bp, Pseudomonas aeruginosa
atgcccatcgagggaatcgactaccgtctcgtcttcgcctccgacgtcaatccgcgcgacggcctcggcctggagtgctggcgcggcgaacagccgctgttcgaggtatttcgcgacgacgccggccggcgtttcgtggtcaacctgttcgccagcgacgttccgctggaactgctggaggcgatcattccgacggcccgtcgcgaactcggcgacttcccgaggcgatccgcctcccggggcgtcgcaaagcccggctga

SEQ ID NO: 318566 - DNA, 990 bp, Pseudomonas aeruginosa
atgactgcccaaccccaacgcatcggtttcctcctctggcccgccacccgcgcgctgacgctatcgcttgccgaggaagccctgcgggcggcccggcggttgcaccccgaggcgctctacgagccgctgttcctgctcgccgaagcgccggccgaagaggagggctggcgcctgccgggaacggcctggaacggcaggctggagcaatgctcgcggctgttcctggtcgccgacgaggcgccggcggcggtgtcgccagcgctgggcctggcgctcaagcaactggcgcgttcgggagcggcgatcggcgcgctgtccgccggcatctacccgctggcccagctcggcctgctcgacggctatcgcgccgcggtgcactggcgttggcacgacgacttcaccgagcgcttccccaaggtcatcgccaccaatcacctgttcgagtgggatcgcgaccgcatgaccgcctgcggcggcatggcggtactcgacctgctgctggcgctgctgtcccgcgaccatggcgctgaactggccggcgcggtctcggaagagctggtggtggagcgcattcgcgaaggcaacgagcgccagcgcatcccgctgaagaatcgcctcggctccagccatccgaagctgacccaggcggtactgctgatggaagccaatatcgaggagccactgaccaccgacgaaatcgcccagcatgtgtgtgtttcgcggcgccagttggaacggatcttcaagcaatacctgaaccgcgtacccagccagtactacctggagctgcgcctgaaccgcgcgcgtcagatgctgatgcagaccagcaagtcgatcatccagatcggcctgtcctgcggtttctcttccgggccgcatttctccagcgcctaccgcaacttcttcggcgtcactccgcgcgaggaccgcaaccagcggcgcggcggcagcgccttcgagacgaccttcactcccgtcgaacgcggctga

SEQ ID NO: 318567 - DNA, 765 bp, Pseudomonas aeruginosa
atgtacaaactggaagtccaagacctgcacaagcgctacggtagccacgaggtgctcaagggcgtctcgctggcggcgaaagcgggcgacgtgatcagcatcatcggctcgagcggttccggcaagagcacctttctgcgctgcataaacctgctggaacagccgcacgccggcaagatcctgctcaacggcgaggagctgaagctggtgcccggccgcgacggcgcgctgaaggccgccgactcccgccagttgcagcgcatgcgctcgcgcctgtcgatggtgttccagcatttcaacctgtggtcgcacatgagcgccctggagaacgtcatcgaggcgcccgtgcatgtgctcggcgtgtcgaagaaggaagccatcgagaaggccgagcactacctggccaaggtcggcgtggcacaccgcaaggacgcctacccggcgcacatgagcggcggcgagcagcagcgcgtggcgatcgcccgggcgctggcggtggagccggaagtgatgctgttcgacgagccgacctcggcgctcgaccccgaactggtgggcgaagtgctgaaggtcatgcaggacctggcccaggaaggccgcaccatggtggtggtgacccacgagatgggtttcgcccgcgaggtgtcgaaccagttggtgttcctgcacaagggcctggtcgaggaacacggctgcccgaaggaagtcctcgccaacccgcagtcggaccgcctcaagcagttcctctccggcagcctcaagtaa

SEQ ID NO: 318568 - DNA, 1113 bp, Pseudomonas aeruginosa
atggagcgtatcgaccacctgctgccgtggagcaccctgggaagcgagaagcgcctgagcgtgttccgcttcggctgcggcgcgcgcaaggtctacatccagtccagcctgcacgccgacgagctgccgggcatgcgcaccgcctgggagctgaagcagcggttgcgcctgctggaggcggaaggccgcctgcgcggcaccgtcgagctggtgccggtggccaatccggtcggtctcgggcagatgatccaggcgctgcaccaggggcgcttcgaaatgagcagcgggcgcaacttcaatcgcgatttccccgacctgctggacgcggtgatcgacagcgtcggcgagcgtctcggcagcgatccggcggccaatgtcgcgctggtccgccaggccctgcgcgcggcgctggacgccctgccgccggcgacctcggaactggagggcatgcagcgcgtgctctatcgccacgcctgcgacgccgacctggtgctcgacctgcattgcgacttcgaggccgccatccatctctataccctgccgcaacaatggcccaccttcgcctccctggccgcacgcctgggcgccgccgtcgggctgctcgccgaggagtccggcggcggttccttcgacgaggcctgctcggtgccgtggctgcgcctgtcgcgcctgtatccgcgcgccgagctgccgctggcctgcctggcgaccaccgtcgaactcggcggccaggccgacaccaccgtgcagcaggccgaggccaacgccgcggcgatcctggccttcctcgccgagcagggcttcgtcgagggcgaatggccggcggcgcccgaagcctgctgcgaaggcttgcccttcgagggcaccgaatacgtccacgccccgcataccggcgtggtgagtttcctgcgccggccgggcgaatgggtggaggtgggcgaaccgctgttccaggtcatcgatcccctggccgaccgtgccagcaccgtgtgcgccggggtttccggcgtgcttttcgccatcgaacggatgcgctacgcgcagccgggactctggctggccaaggtggccggtcgtcaaccgatccgtcagggacgcttgctcagcgactga

SEQ ID NO: 318569 - DNA, 699 bp, Pseudomonas aeruginosa
gtgatcttcgatttctccgtcatctgggacagccttccgctctatttcgacggcctgctggtcaccctcaagctgctctcgatctccctgctgatcggcctgctgctggcggtgccgctggcgctgatgcgggtctccaagcagccgctggtgaacttcccggcctggctctatacctacgtgatccgcggcacgccgatgctggtccagctgttcctgatctactacggcctggcgcagttcgacgcggtgcgcgagagcgcgctgtggccctggctgtcgaacgcgtccttctgcgcctgcctggcgttcgccatcaacaccagcgcctacaccgccgagatcctcgccggcagcctgaaggccacgccccatggcgagatcgaggcggccaaggcgatgggcatgtcgcgcctgaagatgtaccgccgtatcctcctgccgtcggccctgcggcgcgccctgccgcagtacagcaacgaagtgatcatgatgctgcagaccaccagcctggcgtccatcgtcaccctggtggacatcaccggcgccgcgcggaccgtctactcgcagtactacctgccgttcgaggcgttcatcaccgccggcctgttctacctgtgcctgaccttcatcctggtgcgcctgttcaagcttgccgagcgccgctggctggcctacctggcgccgcgcaaatcctga

SEQ ID NO: 318570 - DNA, 690 bp, Pseudomonas aeruginosa
atgatcactggctacggtgcgaccatcgtcgatggcgcctggctgactctccagctggccctgctttccatgctcctggccatcgtcctcggcctgctgggcgcggccttccgcctgtcgccggtgcgctggctggcctggtgcggcgacctgtacgccacggtagtgcgcggcatccccgacctggtgctgatcctgctgatcttctacggcggccagggcctgctgaactgggtcgccccgcaactcggctacgacgactacatcgacctgaatcccttcgtgtccggcgtcggcaccctcggcttcatcttcggcgcctatctctcggagaccttccgcggcgccttcatggcgattcccaagggccagggcgaggccggctacgcctacggcatgagccaccgccaggtgttcttccgcatccaggtgccgcagatgatccgcctggcgatccccggcttcaccaacaactggctggtgctggtcaaggccaccgcgctgatttccgtggtcggcctgcaggacatgatgttcaaggccaagcaggcctccgatgcgacccgcgagccgttcacctactacctcgccgtggccggcctgtacctgctggtgaccagcgtgtcgctgctgttgctgcgcctgctcgaacgccgctattcggtcggcgtgaaaaccgcggaactgtga

SEQ ID NO: 318571 - DNA, 780 bp, Pseudomonas aeruginosa
atgaagaagctcgcacttctcggcgccctggcgctgtccgtgctctccctgcccactttcgccgccgacaagccggtgcgcatcggcatcgaggcggcctacccgccgttctcgctgaagaccccggacggccagttggcaggcttcgacgtggatatcggcaatgccctctgcgaagagatgaaggtgcagtgcaagtgggtcgagcaggagttcgacggcctgatcccggcactcaaggtgcgcaagatcgatgcgatcctctcgtcgatgaccatcaccgacgagcgcaagcgttcggtcgacttcaccaacaagtactacaacaccccggcgcgcttcgtgatgaaggaaggcgccagcctcaacgatcccaaggccgacctgaagggcaagaaggccggcgtgctgcgtggcagtaccgccgaccgctacgcctccgccgaactgaccccggccggcgtcgaagtggtgcgctacaactcccagcaggaagccaacatggacctggtggccggtcgcctcgacgcggtggtcgccgactcggtgaacctcgaggacggcttcctcaagaccgatgccggcaagggctacgccttcgtcggtccgcaactgaccgatgccaagtacttcggcgaaggcgtcggcatcgccgtgcgcaagggcgatagcgagctggccggcaagttcaacgcggccatcgacgcgctgcgcgccaacggcaagtacaagcagatccaggacaagtacttcagcttcgacgtctacggttcgaactga

SEQ ID NO: 318572 - DNA, 690 bp, Pseudomonas aeruginosa
atgaccccgctgccgggcgcccatgcgatgaagccgggctccgcggccaagccgttcttcggcgtggtcccggcgctggtggacaacctcggcaacctgatcgagggcgccgccgagggcaacctggtgatcctcgactcctggccgggccaggcgcggaccctgttcggcgaccatgaccgcttcgtcgacacctacttcaagaccttcaagggcatgtacttcaccggcgacggcgcgcgccgcgacgaggacggctactactggatcaccgggcgggtcgacgacgtgctcaacgtctccggccaccgcatgggcaccgccgaggtggaaagcgcgatggtcgcccacccgaaggtcgccgaggcggcggtggtcggcatgcagcacgacatcaaggggcagggcatctatgtctacgtcaccctcaactccggggtcgagccgagcgaggcgctgcgccaggagctgaagcaatgggttcgccgcgagatcggtccgatcgccacgccggatgtgatccagtgggcgccgggactgccgaagacccgttcgggcaagatcatgcggcgcatcctgcgcaagatcgccgcggccgagtacgacaccctcggcgacatctccacccttgccgacccgggcgtggtccagcacctgatcgagacccatcgctcgatgcaggccgcctga

SEQ ID NO: 318573 - DNA, 1293 bp, Pseudomonas aeruginosa
atggatgagctgcaccccgggtacctggtcggcctgctggttatcctggtcgcctgctcggcgttcttctcctgcgtcgagaccgccctgctcaacctcgaccgttaccgcctgcgcctgcaggccaagcaaggcctgcgcggggcccggcgcagcagttggctgctgctgcacgacgaccgcctgcgcggcaccctgttgttcggccgcaccctggtcaacgtcagcgccgccgccctggccagttgggccgcgctgcgccactggggcgtcatcggcctggccgtcgccatccccggcatgaccctgctcctgctgctgttcggcgccctgctgccgcgccgctacggcgcccttcgctcggaacgcgtcgccctgccgctcagcctgccgctcctgatcctgcagcgcctgtgctggcccctgctgtggctactgaccctgctgagcaacgcgctgctgcgcctgctcggcgtcgctgcggcggaacaggacgacagcggacgcagccgcgacgaagaggccctgcatccggccgacaacccccaggccagcgaggtcaaccggcatgacatgctgctcggcctgctggacctggagaaggtcacggtcaacgacctgatgatcccgcgcaacgaaatcgaaggcatcgacctcgacgacgaactcgaggtcatcgtcgagcagttgcgcaccaccagccacacccgcctgccggtctaccgcgacgacgtcaaccagatcgaaggggtcgtgcacatgcgccagatcgcgcgcctgctgacccagggccgcctgaccaaggagaatctccgccaggcctgcatggagccgtatttcgtgccggaaagcacgccgctgtcgacccagttggtgaacttccagaaggagaagcgccgtatcggcgtggtggtcgacgaatatggcgaggtgatcggcatcgtcacgctggaggacatcctcgaagagatcgtcggcgacttcaacgacctcgacagcctcgacaacccggatatccaggcccaggaggacggcagcttcgtcatcgacggcagcgccaacctgcgcgagctgaacaagtcgcttggctggcaattgccctgcgacggcccgaagaccctcaacggcctggtcaccgaagccctggagcagatccccgattgcgcggtgtgcctgcgcatcggcccctactgcctggaaatccagcagtcggcggaaaaccgtgtgaaaagcgtgcgcgcctggcatccccgcgcgctgaccccgctggtcgaaagcgacgccagcgtctga

SEQ ID NO: 318574 - DNA, 801 bp, Pseudomonas aeruginosa
atgcatcccctgctgcccagcctcatcgctgctgttctctatctcggcaccgccgcctaccagggtgcctgtgtgtccaagcgcaccgcgccgggcaaacccctgctgctcctgttcggactcctggcactggtcgcccacgccttcagcctctaccagcaattgctgaccccggccggcctggtgctggacttcttcaacgccgccagcctgatcgccgccgcggtaatcctcctgaccctgctggcgaccttgcggataccggtggagaacctgctcctccttctattcccgctgggcgccctcaccaccctgctggcggtactcattccccacggcaccgtcgagccgatcaacgaacaaccaggcatcctggcccacatcctgctctcgatcctggcctacggcctgctcaccatcgcggtgttccaggcgctcttgctgctgctccaggactaccgcctcaagcacaagcatccgtccgggctgatccgcaacttcccgcccctgcaaaccatggaaagcctgctgttcggcttcctctggggcggctggtcgctgctttcgctgtcgctgctgtccggatggctgttcgtcgacaacctgttcgcccagcacctggcgcacaagaccatcctgtcctgcttcgcctgggtggtcttcgccgtgctcctctggggtcgccaccagctcggctggcggggccacaaggcgatccgctggaccctggccggtttctgcctgttgatgttggcgtacttcggcagcaagctggtgcgggaattcatcctgcacatctga

SEQ ID NO: 318575 - DNA, 1374 bp, Pseudomonas aeruginosa
atgttcgaaaaccttacagaccgcctctcgcagacgcttcgccatgtcaccggcaaggccaagctgaccgaggacaacatcaaggacactctgcgcgaagtgcgcatggccctgctcgaggccgacgtggccctgccggtggtcaaggacttcgtcaacaaggtcaaggagcgcgccgtcggtaccgaggtctcgaagagcctgaccccgggacaggcgttcgtgaagatcgtccgcgccgagctcgaggagctgatgggggcggccaacgaggacctggcgctgagcgtcgcgccgccggcggtgatcctgatggccggcctgcagggcgcgggcaagaccaccaccgcgggcaagctggcgcgcttccttaaggaacgcaagaagaagtcggtgatggtggtttccgccgacgtctaccgacccgccgctatcaagcagctggaaaccctggcgggcgaggtcggcgtaaccttcttcccttccgacgtcagccagaagccggtggccatcgccgaggcggcgatccgcgaggcgagactgaagttcatcgacgtggtgatcgtcgataccgcaggccgcctgcacatcgatgccgacatgatggacgagatcaagcaggtgcacgcggcgatcaagccggcggaaaccctgttcgtggtcgatgccatgaccggccaggacgccgccaacaccgccaaggccttcaatgacgccttgccgctgaccggcgtggtcctgaccaaggtcgacggcgacgcgcgtggtggtgccgcgctctcggtgcgggcgatcaccggcaagccgatcaagttcctcggcatgggcgaaaagagcgaagcgctcgatccgttccatcccgaccgcgtggcctcgcgcatcctcggcatgggcgacgtgctcagcctgatcgaacaggccgagcagaacctcgaccgcgacaaggccgagaagctggcgaagaagatcaagaagggcaagggcttcgacctggaagacttccgcgaccagttgcaacagatgaagaacatgggcggcctcggcgggctcatggacaagctgccgatgctcggcggggtcaacctggcgcagatgggcaatgcccagggtgctgcggagaaacagttcaagcagatggaggcgatcatcaactcgatgacgcccggcgaacggcgcgatccggaaatgatcagcggctcgcgcaagcgccgcatcgcccttggctccggtacccaggtgcaggacgtcggccggctgatcaagcagcacaagcagatgcagaagatgatgaagaaggtcaccgccaagggcggcatggccaagatgatgcgaggcatgggcagcatgttcccggggggcatgcccaagctttga

SEQ ID NO: 318576 - DNA, 252 bp, Pseudomonas aeruginosa
atggtaaccatccgtcttgctcgtggcggctccaaaaagcgccccttctaccacctgaccgtgaccaacagccgcaatgcgcgcgatggtcgcttcgtcgagcgcatcggtttcttcaacccggttgcgactggtggcgaagtgcgtctgtccgtcgaccaggagcgtgctacctactggctcggccagggtgcacagccgtctgagcgcgttgctcagctgctcaaggacgctgccaaggcaaacgcctaa

SEQ ID NO: 318577 - DNA, 537 bp, Pseudomonas aeruginosa
atgagtgaaatgccgacacccgccgacgacctggtcgtgatcggcaagatcgtttcggtgtacggcatccgcggtgaggtgaaggtgtattcctttaccgacccgttggacaacctgctggactatcgccgctggacgctccggcgcgacggcgagattcggcaggccgagctggtcagggggcgcctgcatggcaaggtcctggccgccaagctcaaggggctcgacgatcgcgaagaggcccgcaccttcaccggttacgagatctgcatcccgcgtagcgagttgccctctctcgaggaaggtgagtactactggcaccagctggaaggcctgaaggtgatcgaccagggcgggcagttgctcggcgtgatcgaccatctgctggaaaccggtgccaacgatgtcatggtggtcaagccctgcgcgggcagcctggacgaccgcgagcgcctgttgccctacaccgggcagtgcgtgctgtcgatcgacctggccgctggcgagatgcgggtggactgggacgcggacttctga

SEQ ID NO: 318578 - DNA, 759 bp, Pseudomonas aeruginosa
atggacaagcgtttgtgggtgggcgtcgtcagcatctttccggagatgttccgcgcgatcagtgactatggcatcaccagccgtgcggtgaagcaggggttgctcacgctgacctgctggaatccacgggactacaccgaggaccgccaccagacggtggacgaccggcccttcggcggtggccctggcatggtgatgaagatcaagcctctggagggcgcgctggcggatgccaggcaagccgccgggggcaggaaggcgaaggtgatctacctttcgccgcaaggccgccagctgacgcaggcgggcgtacgcgaactggccgaagaggaagcgttgatcctcatcgccgggcgctacgaaggcatcgacgagcgcttcatcgaagagcacgtcgatgaagaatggtcgatcggcgattatgtcctgtccggcggtgagttgccggccatggtgctggtcgatgcagtgacgcggttgctgcccggtgcattgggtcatgcagattccgccgaggaggactccttcacggatggcctgctcgactgcccgcactacacccgacccgaggtgtacgcggacaaacgtgttcctgaagtgttgctcagtggcaaccatgaacacatccggcgttggcgtttgcagcaggcccttgggcggacctgggaacgacgcgccgatcttctggatagccgctcgctttctggagaagagcagaagctgctggcggaatatatccgtcagcgggacgatagttaa

SEQ ID NO: 318579 - DNA, 351 bp, Pseudomonas aeruginosa
atgaccaacaagatcattcagcagatcgaagctgaacagatgaacaaagagatcccggcgttcgcccccggcgataccgtgatcgtccaggtcaaggtgaaggaaggcgaccgtcagcgtctgcaggccttcgaaggcgtcgttatcgccaagcgcaaccgtggcctgaacagcgccttcaccgtgcgcaagatctccaacggcgtgggcgtggaacgtaccttccagacctacagcccgatcgtcgacagcctgagcgtcaagcgtcgcggcgacgtgcgcaaggccaagctgtactacctccgcgccctgtccggcaaggccgcgcgcatcaaggaaaaactggtctaa

SEQ ID NO: 318580 - DNA, 426 bp, Pseudomonas aeruginosa
atgacccccagagagcaagaaatcctgcgtcgcaccgagctttccgaaacccgtgtgaccaaggcggtattcccgcccaccaccaatcaccacaacaccctgttcggcgggactgcgctggcctggatggacgaggtctcgttcatcaccgcgacccgtttctgccgcctgccgctggtgaccgtttccaccgatcgcatcgacttcaaccacccgatcccggcgggctcgatcgtcgaactggtcggacgggtggtcaaggtcggcaacaccagcctcaaggtggaggtcgaggtgtacctggaaagcatgtacgccgacggtcgcgagaaggccatacacggcctgttcagcttcgttgccatcgacgacgaaaagcggccggttccggtcctgccggggttcccggccagccaggcggcttga

SEQ ID NO: 318581 - DNA, 681 bp, Pseudomonas aeruginosa
atgtccaatcaacaacattcccgcctgggccagatcctgatcaacaaggggctgattagcgccgcccaactggacgccgcgatccaggcgcagttgagcaaccacaagcgcctgggcgaaaccctgatcgagcagggcctgctgagcgaacggcaactgaagaaggcgctgaagaagcagaccaacctgcgcctggccgcgaccctggtcgccgccctgctcagtccgttccagatggccagcgccgacatccagcgtatgcagccgccagcggccatgagccgccaggaattgccgaagaacctgcgtccgctgaccgacgtcgagatgagcaacgtcaacgcccagggcctcaacgaaagcctcgagggcctgttcctgaaggccgagggcggcgacggactggccgcggtgaagcaactggcgaagctggtgatgccgatgctcgacagcctggaggcggaaacctcgatgagcgacgttcgctacgaaaccggcaagacgcaaagcacgctcaaccccgacggctcggtcaacctgcgcctgccgagcagtatcggcgaggtgcgcttcgacaatattcgcattgccggcgcgccgcgcgagcagacgttcggcagcgtcagcctgcaacagatcgacctgtcccaggcctccctgaagatcagcctgcggccctga

SEQ ID NO: 318582 - DNA, 1836 bp, Pseudomonas aeruginosa
atggaccagaacgctatcctgctcgccctcggcggcatcggtgccgccgccctgctcagtcaatggctggcctggcgcctgcgcctgccagccattcttttcctgctgctgtccgggatcgtcgccggcccgctactcggctggctcgatccggacgagatgttcggccccctgctgttcccactggtatccctggcagtggcgctgatcctcttcgagggcagcctgaccctgcatttcagcgaatggaaggaaatcggcaccgtggtgcaccgaatggtgaccatcggcgcgctctcgacctggggcgtgatcgccctggccgcccactacctgctcgacttcagctgggaaatggccctgctgttcggcaccctgaccctggtcaccgggcccacggtgatcgttccgatgctgcgggtggtccggcccaaggccgcggtggcgaacatcctgcgctgggaaggcatcgtcatcgatcccatcggcgccctgctggcggtagtggtgtacagcttcatcatctccagcggcgaaggcgatggctggctacacagcctgcagaccttcggtggagtgatcctctgcggcagcctgttcggcatcctcggcggctgggcgctgggcatcgtcctgcgccgccactggctgccggactacctgcacaacctggcgacgctggccgcggtgctgggcgtattcatcgcctcgaaccgggtgatgcacgaatccggactgctcgccgtcaccctgatgggaatgggcctggccaacatgaagggcgtcgacgtacggcagatcctgcacttcaaggaaaacctcagcgtcctgctgatttccggcctgttcatcctcctggccgcgcgcctggacatcaatgccctgctcggcctgggcccggcggcgctgctggtgctgctgctgatccagttcgtcgcccggccgctgaacgtggcgctgtcgacctggggttcgccgctgagctggcgcgagcgcgccctgctcagctggatcgccccgcgcgggatcgtcgccgcggcggtctcggcgatcttcgccatccgcctgagcgccgaaggccatgcccaggcggcgctgctggtgccgctgacctttctggtgatcatcggcacggtggtcctgcaaagcgccaccgcccgccccctggcgcgcctgctgaaggtcgccgagccctcgcccagcggctacctgatcgtcggcgccaatccggtcgggcgcgccatcggcaaggccctgaagagcctcggcagccgcgtgctgctgactgattcgagctgggaaaacatccgcgccgcccgcatggacaacctgcccacctatttcggcaatcccacctcgcagcacgccgaagcccacctcgacctggtcggcatcgggcatttgctgggggtttctccagccggcgagctgaataccctggcggccatgcgcttccgccacgagttcggccatcgccagctgttcggcctgccgaccagccaggaagccaagcgtaccgacaagcaccgctccagcgacgaacaccgtggccgcccacttggccagcgaccgctgacctacgcgcagttcgccagcctgctgtcgcgcggcgccgaaatccgcaccaccctgctcaccgacaccttcggctggaacgactaccaggcgctgcacggcgagtccgcgatcctgctgttcgcccgcgatccgaacggcaggatgcacgtcgccacgccacagtccacgctggcgccgggcaccggctggacgctgctgtcgctgatcgacgcggaaccgtcagtcagcaagtcgcaggccacggaaatcgccgactag

SEQ ID NO: 318583 - DNA, 897 bp, Pseudomonas aeruginosa
atgagtaccctcgaacatcccctgatcgaccgtttcctcgatgccctgtggctggaaaaaggccttgccgacaacacccgcgaggcttatcgcaacgacctccagcagttcaacgcctggctcgatggccgcgggctgcgcctggagggcatcggccgcgacgccatcctcgatcacctggcctggcgcctggaacagggctacaaggcccgctcgaccgcgcgcttcctctccggcctgcgtggcttctatcgctattgcctgcgcgacggcctgatcgccgaggatcccaccttgcaggtggacctgccgcaactgggcaagccgttgccgaaatccctctccgaagcggacgtcgaggcattgctggcggcgccggaagtcgacgacccgctgggcctgcgcgatcgcaccatgctcgaagtgctgtatgcctgcggcctgcgggtcagcgaactggtcggcctgaccctggagcaggtcaacctgcgccagggcgtggtcaaggtgttcggcaagggcagcaaggagcgcctggtgccgctcggcgaggaagccatcggctggctcgaacgctacctgcgcgaggcccgcggcgacctgctcggcgggcggcccagcgacgtgctgttccccagcctgcgcggcgaacagatgacccgccagaccttctggcatcgcatcaagcatcacgcgcaggtggcggcgatcggcacgtcgatttcgccgcacaccctgcgccacgccttcgccacccacctgctcaaccatggcgccgacctgcgggtggtgcagatgctgctcggccacagcgacctgtcgaccacccagatctatacccatatcgcccgggcccgcctccaggatctgcacgcacgccaccacccgcgaggctga

SEQ ID NO: 318584 - DNA, 729 bp, Pseudomonas aeruginosa
atgcgcgtgacccgttttctggctgctgccgccctcggcctgatgagtaccctggccctggcagacaatgccgatcagaacatccgcaagaccctgcaggccctgcaaccggacctgcccatcgactccatcgccagcagcccgctgcaggggctctaccaggtgcagctgaagggcggccgggtgctctacgccagcgccgacggccagttcgtcatgcagggctacctctaccaggtgaaggacggcaagccggtcaacctgaccgagaaggccgagagccaggcgatcgccaaggcgatcaacggcgtgcccgccagcgagatggtggtgtatccggccaagggccaggccaaggcgcacatcacggtgttcaccgataccacctgcccgtactgccagaagctgcatgccgaggtgccggacctgaccgagcaggggatcgaggtgcgctacatggcgttcccgcggcaggggccgcagtcggcgggcgacaagcaactgcaggcggtctggtgtgcgaaggagccgaccaaggcgatggacgccatgatgaacggcaaggagatcaagtcttccgagtgcaagaacccggtcgacaagcagttccagatgggccagatggtcggggtgcagggaacgccggcgatcgtccttgccaacggccagttgctccccggctaccagccggccaagcagttggccaagctggcgctggaggccaaatag

SEQ ID NO: 318585 - DNA, 1305 bp, Pseudomonas aeruginosa
gtgaaaccggtcaaagtaggcatctgtgggttggggaccgtcggtggcggtaccttcaatgtactcaaacgcaacgccgaggagattgcccgccgtgccgggcgcggtatcgaggttgcgcagatcgccgcccgccggccgaacccgaagtgcgataccggtgcgacccccatcaccgccgatatcttcgacgtagcgtgcaatcccgagatcgacgtggtcgtcgagttgatcggcggctacaccctggcccacgagctggtgctcaaggccatcgagaacggcaagcacgtggtcaccgcgaacaaggcgctgatcgccgtgcacggcaacgagatcttcgccaaggcccgcgagaagggcgtgatcgtcgccttcgaggccgctgtcgccggcggcatcccggtgatcaaggcgatccgcgaggggctgtcggccaaccgcatcaactggctggccgggatcatcaacggtaccggcaacttcatcctcagcgaaatgcgcgagaagggccgtaccttccccgacgtgctcgccgaggcccaggccctgggctatgccgaggccgacccgaccttcgacgtggaaggcatcgacgccgcccacaagctgaccatcctcgcctcgatcgccttcggcattccgctgcagttcgacaaggcctacaccgaaggcatctcgaaactgaccagcgccgacgtcaactacgccgacgccctcggctatcgcatcaagcacctgggcgtggcgcgtcgcaccgagagcggcttcgagctgcgcgtgcacccgaccctgattccctcggatcgcctgatcgccaacgtcaacggcgtgatgaacgcggtgatggtcaacggcgacgccgtcggctcgaccctctactacggcgccggtgccggaatggagccgaccgcttcctcggtggtggccgacctcgtcgacgtggtccgcgccatgacctccgatccggagaaccgcgtaccgcacctggcgttccagccggacgcgctgtccgaccacccgatcctgccgatcgaagcctgcgaaagcgcctactacctgcgcatccaggccaaggaccacccgggcgtactggcccaggtggccaccatcctgtccgagcgcggcatcaacatcgaatcgatcatgcagaaggaggccgaggaacaggacggcctggtgccgatgatcctggttacccaccgggtcatcgaacaacgcatcaacgatgccatcgccgccctggaagcgctggaaggcgtgtccgggccggtggtccgcatccgtgtcgaacaactgaattga

SEQ ID NO: 318586 - DNA, 1410 bp, Pseudomonas aeruginosa
atgcgttacatcagcacccgcggccaagcgcccgccctgaacttcgaagatgtcctcctcgccggcctggccagcgacggcggcctctacgtcccggaaaacctgccacgcttcaccctcgaggagatcgcctcctgggtcggcctgccctaccacgagctggccttccgggtgatgcgcccgttcgtcgccggcagcatcgccgatgccgacttcaagaagatcctcgaggaaacctatggcgtcttcgcccatgacgcagtggcgccgctgcgccagttgaacggcaacgaatgggtgctggagctgttccacggcccgaccctggccttcaaggatttcgccctgcaactgctcggccgcctgctcgaccatgtgctggccaagcgcggcgagcgcgtggtgatcatgggggccacctccggcgataccggctccgcggccatcgaaggctgccgccgttgcgacaacgtcgacatcttcatcatgcacccgcacaaccgcgtgtccgaggtgcagcgccggcagatgaccaccatcctcggcgacaacatccacaacatcgccatcgaaggcaacttcgacgactgccaggagatggtcaaggccagcttcgccgaccagggcttcctcaagggtacccgcctggtagcggtgaactcgatcaactgggcgcggatcatggcccagatcgtctactacttccatgccgcgctgcagctcggcgcgccgcatcgctcggtggcgttctcggtgccgaccggcaacttcggcgacatcttcgccggctacctggcgcgcaacatgggcctgccggtcagccagctgatcgtcgcgaccaaccgcaacgacatcctgcaccgcttcatgagcggtaatcgctacgacaaggacaccctgcatccctcgctgtcgccgtcgatggatatcatggtctcgtccaacttcgaacgcctgctgttcgacctgcacggccgcaacggcaaggccgtcgccgaactgctggatgccttcaaggccagcggcaagctgtcggtggaagaccagcgctggaccgaggcgcgcaagctgttcgactccctggcggtcagcgacgagcagacctgcgagaccatcgccgaggtataccgctccagtggcgagttgctcgacccgcacaccgccattggcgtgcgtgccgcccgcgaatgccggcgcagcctgagcgtgccgatggtgaccctgggcactgcgcatccggtcaagttccccgaagcggtggagaaggccggcatcggccaggcaccggcgctgcctgcgcacctcgccgacctgttcgagcgcgaggagcgctgcaccgtattgccgaacgagctggccaaggtacaggccttcgtcagccagcacggcaatcgcggcaagccgctctga

SEQ ID NO: 318587 - DNA, 1011 bp, Pseudomonas aeruginosa
atgactgccttcgcatccccccgcagcgcctggcgcgccttcatcctcgcgctggcattcgccgccggcacggcacagggctcgctgctgttcggcgccgtcggcctggccaacgaccagtacgcgcgtccggtcgccgacaccgagatcgccagcaccgccgtgctcgccgattgtcgtggcttcgtcgggaccatcgccaggatcgtcctgctggacggctcgatccgctgcaacgaggctttcccctatggcttcgccagcccgatcagtaccagcgtctactatccggcggacatcgccgcgtccgacgccaagcttccggtcatcactttcgtcggcggcatactttccaacgccggcaactatcacgaactgatgaaactgtgggccagccacggcttcatcgtggtgatctcctccgacttcatcaattccttcccgctgatgcacgccctcggcatccttgaggtcgcgaaactggacagggacccggcctcggccctgcatggccgggccgacttttcccggacgctggtcgccgggcactccgccggcggccaggccacactgcagagcgccagcctctctgcacaagccctgcaactcatcgagccacggttgaagctggtcggcgccctgccgatcgagccaggccccctggccatcggttccacggtaaagaccccgaccctgctgctgaccggactggccgatgtggtcgtgccgccgctcagttggccgatcctctggcagggcccgttgatccgcgacgtgcccgcctggggcgccacggccaccacggcgacccacttcagcccgctgcgacagatcgagtacaacgagttcgccggcatcagcgtcgcctgggtgctgtaccagggaaagaacgatgcccaggcccgcgactatttcgtcgggcgctactacaagctggccagcgacatccagttcaacgatccactgaggctgctccgcccctcgcgcaacaaactcgccgctgccctttga

SEQ ID NO: 318588 - DNA, 285 bp, Pseudomonas aeruginosa
ttggacagcctgaagcaacgactggccgatgccttcgctccccatcccttcaccctcagccagccccggcccgatggcggacgggtggtcacgctggtcgatccgcagggggaaaccctgttgcagcgggtcatcgccaaggtgcagttgaacgacgaaagctatctcgaggatgccgtgcagaccattcgccgggaattgcaggtgctggtcgggcggatggaggaagacgtgctggcgaccttccgcgagcgggatcacgtgctgctgtattcgtcgcgctag

SEQ ID NO: 318589 - DNA, 1200 bp, Pseudomonas aeruginosa
atggaacattcgcccaaaccgctggccggcctgaaggtggtcgagctcggcaccctgatcgccggccctttcgcctcgcggatctgcgccgagttcggcgccgaagtgatcaagatcgagtcgcccgacggcggcgatccactgcgcaagtggcgcaagctctacgaaggcacctcgctgtggtggttcgttcaggcacgcaacaagaaatccctgaccctcaatctcaagcacgccgaaggccaggcgatcctgaaacgcctgctcggcgatgccgacatcctgatcgagaacttccgccccggcgtactggaaaagctcggcctgggctgggatgtcctccacgcgctgaacccgcgcctggtgatggtgcgcctgtcgggcttcggccagaccggcccctacaaggaccagccgggcttcggcgcggtcggcgagtcgatgggcggactgcgctacattaccggcttcgaggaccgcccgccggttcgcaccgggatttccatcggcgactcgatcgccgccctgtggggcgtgatcggcgcgctgatggcgctgcgacaccgcgaggtcaacggcggcgagggacagatggtcgacgtcgccctctacgaggcgatcttcgccatgatggaaagcatggttccggaattcgacgtgttcggtttcatccgcgagcgcaccggcaacatcatgccgggcatcaccccctcctccatccacaccagcgccgatggccgccacgtacagatcggcgccaacggcgacgcgatcttccgccgcttcatgcaggccatcggccgcgacgacctggccagcgacccgcgactggccagcaacgacgggcgcgatgcgcgccgcgacgaactctatggggttatcgaccgctgggtcgcctcgcagcccctggaggaagtgctggcggtgctggcgcgagccgaagtcccggccagccgcatctactccgccgaagacatgttccgcgatccgcaattccttgcccgcgagatgttcctctcggcacgcttgccggacggcaagccattccgcatgcctggcatcgtacccaagctgtccgccacgccaggctcggcggattgggtaggcccggaactgggcgagcataccgatgccctgctcgccgagctgggctacgacagcgagggcatcgccgccctgcgccgggaaggcgccatctga

SEQ ID NO: 318590 - DNA, 621 bp, Pseudomonas aeruginosa
atgcaacggaaatcatcggcccattatcagcgtgtctttcgccagcgcctgcgcgagcagggcctggtgaagaaggaagtctggatcttgccggagaacgccgcggcgctcgccggcatcgagcggatgctgcgtcgcccggctgccggagcggctcatttggagaaggaggaagacatgacggaagcccgggtatggaacgctcgctcgctggccgaggccctgagcggcaccgagctgttcagcagcggcgaggcccagatcgagctgatcgagggggcggaagcgagtctctacgtgatcatgcgcgaatacggcgacctgccggtgttcgtcgcgccccagggcgagcagatcatcgtcgaggcgctgctctggccggaaagcgacgttaccgacgcgaccgccttcaacgaagaggtcctgctcagccggcaactgttcccgctgtcgagcatcggcctgctcaacctgccgggcgaggagcgctgctacagcatgttcggcgcgttgagcacgacttcgtcgctggccagcgtgctgcacgaaatcgaaaccctggccggcaacgtgatccgcgccacggaagtctacgccggctacctgaaagcccgggcctga

SEQ ID NO: 318591 - DNA, 696 bp, Pseudomonas aeruginosa
atgacggtatggagcaagctgctgagcgccctgcgcggcggagccaacgaggttggcgaggcgatcgtcgacagccaggcgctgcgcatcctcgaccaggagatccgcgacgccgacgtcgaactgcgcaagtcgcgggaagcgctggcctcgatcatggcccgccaccgcctggcccaggagcgcgtcgagaagggcgcggcccaggtcgccgagtacgagcaatacgcgatcaaggcactggaggccggcaacgaggagctggcccgggaggtcgcggagaagatcgcgaccctggagaaccagctcgagggcgagcgtgcccaggtcgcggaattcgccgccagcgtagcccagttgcgcaagtcggtgagccaggccgagggcaacatccgccagctcaagcaacaggtggatacggtcaaggccaccgagagcgtgcagaaggcgcagatggccgttgcccagcgctacggcaactcgaagagcaagctgcagaccgcggtggactccctggagcggatcaagcagcgccaggccgaacgcgcggcgaccatggatgccgcggccgaactggccagcgcggcggcgccggacgatgcgctggacgccaagctgcgcgcggctgggatcaaggcctcgggcaacagcgtggatggcgtgctggcgcgcctgaaggaaaagggcaaggcctga

SEQ ID NO: 318592 - DNA, 642 bp, Pseudomonas aeruginosa
atggaaggtttcctgcagacggcgctgtcgttcccgaccgtgctgttcagctttcttctgatcctagcgatcatctactggggcatcgtcgccctgggcatggtcgagatcgatgtgctcgatctcgacgccgagtcggtcgtcgatggcgccggccaggccgaaggcctcgccgcgctgctggcgaagctgaaactcaacggcgtaccggtcaccctggtgctgaccctgctgtccttcttcgcctggttcctctgctacttcgtccagctgtggctgctcagcgcattgccgctcggctggctgcgctacccgttgggcgccgtggtggcggtgggcgcgctgttcctggcggcgccgctggcggccacgctgtgccggccgttgcggccgctgttccgcaagctggaaagcaccagcagcaagtcggtgctgggccaggtcgcggtggtgcgcagcgggcgggtcaccctgcaacatggcgaggcgttgctggaagacggcggcgccgggctgatcctgaaagttcgtgcggaagaaaacaaaggcttcaagcgcggcgatcgcgtcgtgctgctggagtacctggaggcggagcacgcctatcgggtcgttaccgaggaagagttccgcggtatctga

SEQ ID NO: 318593 - DNA, 2067 bp, Pseudomonas aeruginosa
atggatatgacgtcgctgatgcccctcctgctgggagtgggcctggtcgttctgctggtcgtgggcctgctggccctgttcaaggccttctacatcaaggtcccgcaaggcaccgcgctgatcgtcaacgacatgtcgtcgacgcccaaggtgcatttcaccggtgcgctggtctatccggtgatccacctgaaggagttcatgcgcatctcgctgatcaccctggaggtcgaccggcgcggcaaggacggcctgatctgccgcgacaacatgcgcgcggacatcaccgttgccttctacctgcgggtcaacgagacccaggacgacgtgctcaaggtggccaaggccatcggcgtcgaccgtgcttccgaccgttcggcggtgaacgagctgttcaatgccaagttctccgaggcgctgaagaccgtcggcaagcagttcgacttcgtccagctgttcgagaatcgccaggacttccgtgaccgcatcatcgaggtgatcggcaacgacctgaacggctacgtcctggaagacgtcgccatcgactacctggagcagaccgcgaagaactcgctggacccgagcaatatccttgatgccgagggcatccgcaagatcaccgagctgaccgccacccagaacgtcatcaccaacgaactggagcgcaacgaagagctggcgatcaagaagaagaacgtcgagacccgcgaggcggccctggccctggagcgccagcaggctgacgccgaggcccggcagaagcgcgagatcgagaccatccgtgcccgcgaggaagcggaaaccgcgcgggtcaaggaagaggagcggctgaaggccgagcaggcgcggatccaggcgcagcaggaaatcgacgtgcgcaccgagaaccaccagcgcgaggtcgaggtggcgcagcagaaccgccagcgcgcggtggtcatcgaggtggagaaggtcacccgcgccaaggacctggagatcgtcgcccgcgagcgtgaggtggagctgcagaagatcgagaaggaaaaggcgctggaagagcagcgcaagaacatcgccaatgtgattcgcgagcgcgtcgcggtggaaaagaccgtggcccaggaggaggagcggatcaaggaggtgcgcgaggtttccgaggccgagcgggtcaagcaggtgatcctgctgcaggcccaggcggaagccgagcaggagctggtacgccaggtcaagcaggcggaagccgacgaggcccgctccaagcacaaggcggtggaaatcaacaccatggcgcaggccgagctggaagcggcgtcgaagcaggccgaggcgaagaagcgtctggccgagggcatcgaggccgagcgcgcagcgccgggcctggccgatgcgcgggtgctggaagtcaccgccgcggcgaaggaaaaggatggcttggcagcggcgcgggtacgtgccgaacaactgatcgccgaagccaggggcgacgaagagcgcggcctggccgacgcccgggtgctcgaggcgcaggccgcggccaaggagaaggacggcctggccgaagccaaggtgctggccgagaagctcggcgcccaggcgcgcggcgaggagcagctcggcgcggccaaggccaaggccaccaaggaccagggcagcgcggaagcggaagtactgctgcagcgcctgaatgccgaggccgaggggcttggcaagaagttcggcgccctggatgccctcagcgacagcgctcgccagcacgaagagttccgcatgcagctggagaagagcttcgaggaggccatggcagccatcgccgcgaacaaggacatcgccaaggaccaggccgaggtgctcgccaccgcgctgggcaaggcgaacatcgagatcgtcggcggcgagggcgacttcttcaactccttcgccaagtcgctgtcggtgggcaaggccatcgaaggtgtggtcggcaagagcccggtggtgcaggacgtcctcgcccgcctgctcaacggccgtggcgcagccgctgcggtgatgccggaacgcaagagcggccacgagaacgagccggcggcggaagtctga

SEQ ID NO: 318594 - DNA, 5241 bp, Pseudomonas aeruginosa
atgtcggacactcaagccgcaactcccgcgcaggacgtattggacaaggccgttgccgagggcggcgcctacgaggtgctgcacaagcgcctgctggagcagggccagcgcctgcggcagaccgccgaaaggctcaacgccagtcgcctggaggagttcggcgacagccagatggatgtgatcggccgggtccgcatccgtaccgagaacaactgcatcgcccgcgatatcgtccaggtcggcgattgcctgctgttcggctacaacgtgttcatcggcctgcgcaaggaaaccggcgtggccgacgtgttctccctctaccgcctggtggagggtagcgaaggctacgaggcggagcctgtgccactgggggacagctttctcgccgcgccgggcttcgtcaacgacttcaacgagctttacacctactacaagaacacccgcctgctgcaactggcgatccgcgacggcaagctgctggccagcttccagatcggcgagcggatcaccgacatccgcgtgttccgctggtcgatctccagcgacggcagcgaagtccgctacatcgacaaccgcggcgagcgcgacatcgccttgccggcaccgttcgacttcgaatggcagcgggctacccgcgagatggtggtggagggccgcttcccgcacctgaacatcctcgacaccctgttcgtcgagaccattggcggcgacctgaccatcaaggtcgagaacaacaccgaggtcggcctgggcatctatcgcgaagaggtgatggacaagacccagtcgctggacgacgcgcaggttgagttcgcccgcctcggcagcctgctgctgctcaaggtcctgccctatcgcgaggagcagtggcgctacctggtgttcaacagcctgaccggcaaggtcgagcgcatcgacgccatcggcctggcctgcatccagttgccggaggaccacgggatcatcttccccggcggctactacctgcagaacggcgagtaccgcaccttcgagcaatccatggaaggcatgcgcttcaagcgctcggtacgctcgcccaacggcgaggacgtgcagtacgttttctaccatcccgagcaggggcggaacgtgctgctcacctacaacctgatcaaccgccagttgcagaatccgctgttcggccacggctacgcgcgcctggaggacgggcgcatggtgatcttcgccgccgaaggcgaggaaccgacccgcatccatccgatgcaggtctggcagacgccgttctgcaccgaggagtacgcggcccgccaaccggcgcgtagcggttttctcgggcggatcggcaatgccgagctggtgcgcggcgtctccgacctctacgacttgtgccgggagatcgagaccccggcggtttcgatccagcgctactcgctgctgtgccagaacacccagcgcctgttcgacgtctaccactggctcggcagcgaccaactggacggcctggcgccgctgttgcgcgaagtggcggcgaccgccgagctggtgctcgacgagtacgagaaggtcgaaagtatccgccgccagtcggcccaggcgatggtcgacgcggaggagcggcacaaggcgctgctctccggcttgctgcccgacggctgggaccgggtgcagcagttcgtcgacgggctcaacggcatcaccgcccagcgtgggttgctgctgaccatccgcgagcaccgctacatcgacgtggcgcgactcgacgccatggaggccgaactgctcgcgacccacgagcgggtggccgccgccaccgcgaccttcctcgccagcgaacaggccctgcagcccttgctggagcgcctgcagagcctcgatggcgaggcgcagaaagccgagaccgtggcccagctcggcgagccgctggcggccctggaggcgatggccggcgacctcgacatgctgtcctcgctgatggcttcgctgcgcatcgacgacgcgacccagcggacccgcatcatcgagtcgatctcggagatctacgcccgcctgaaccaggccaaggcgcgcgccgagcagcggcgcaagggactcggttcgagcgagaccgtggcccagttcggcgcccagttcaaactcttcggccagggcatcaccaacgccctggcccaggcccaggaccccgagcgctgcgacgagcaactgtcgcgcctgctggtgcaactggaggaactggaaagccagttcggcgaccatgagcagttcctcggcgacatcctggccaagcgcgaggagctgctggaaaccttcgaagcgcacaagcagaccctgctcgacgagcgccagcgcaaggcccagggactgctcgacgccgcccggcgaattctcgacagcctgcaacgacgcaccgcgcgcttcacccaggcggaggaactgaacgcgttcttcgccgccgacccgctgatcctcaagttgcgcgaactggccgaacgtcttcgcgaattgaaggacagcgtcaaggccgacgacgtcgaggcgcgcctgaaggccgcgcgcgaccaggcggtccgcgcattgcgcgacaagagcgagctgttcgaggagggcggcgacgtcatccgcctgggcccgcgccaccgcttcagcgtcaacacccaggaactcgacctgaccctgatgccgcgcggcgacgcgctgtacctgcacctgaccggcaccgatttcctcgaaccgctgcaggacccgcggctcgatgagttgcgcgagttctggcaggtgaacctggaatccgaatcggagacgctgtaccgcgccgaatatctcgccggcgaagtgctcgccgccgccgacgcgggccgcgatggcttcagcctggagcgcttgcaggcgctgctggcgcagccggacgagctggcgcgggcgatccgcgatttcgccgcaccgcgctacaaggagggctacgagaaaggcattcacgaccacgatgcggcggcgatcctggttcgcctgctgccgttgcgcgagagcgccggactgctacgctacgcaccctcggcgcgggccttcgccagcctgttctggagccgccggcgcgaggagcgggaagtcgccggctggcccgagcgggcacgcagcagccgcagcatccagcagatgttcggtcgtgacgacggcctgctcgcccttcgcggcgaagtggccgcggcgatgcgtgcgctgctcgccgaacagcccatcgcgctggacccgcagcatatcgacgaggcggccgagtacctggtctgggaattgtccgccgagcgtcccgaattcaccttcagcaaatatgcccggcaattgcaggaaggactcaagctgcgcctgcaaggcgcgcgtctatgggacgactaccggcagaccctggagcgtctcggcgagcggcccgccgcccagtgggaactggccggcaactggctgcgcggactatgtggcgacgccgagttccagccgctggcggcctacctggacgaggcggtggcgctctcgttgctggacgaggagatgccacgacggatcaccgaggtcgacctgcgcttccaggtcgacggcctgatgggcgagcatccgcgcatcttcgaacgcggcctggcgctggcggtggacgacttcttcggccgcctgcgtcgccatcgccagcaattcctgccggggctgcggcgctaccaggcgctgcgccaggagatcgtcgaacgcgagcgcgaggcattgcgcctggccgagttcaagccgcgaccgctgtcctcgttcgttcgcaacaagctgatcaatgacgtctacctgggtgtcatcggcgacaacctggccaagcagatggggacggtgggcgagaacaagcgcaccgacctgatgggcctgctgatgctgatctccccgccaggctacggcaagaccaccctgatggagtacgtggcgcatcgcctggggctgatcttcatgaagatcaacggtcctgccctcggccacgaggtgcgctcgctcgaccccgggcaggcgccggacgcgacttcgcggcaggaactggagaagctcaacctggcgctggagatgggcaacaacgtgatgctctatgtcgacgacatccagcacacccatccggagttcctgcagaagttcatctccctctgcgacggcacgcgccgggtggaaggggtgtggaagggccggaccaagacctacgacatgcgtgggcggaagttctgcgtggtgatggcgggcaacccctacaccgagtccggcgaggtcttccgcattcccgacatgctcgccaaccgcgccgacatctacaacctcggcgacaccctcagcggcatgcaggaggcgttctccctcagctacatcgagaacgccctgacctccaacccggttctcgcgccgctggccacccgcgacatggccgacgtctatcgcttcgtcgccaaggccgagggcaagccgttctccagcaacgagctggcccacggctacagcggtgccgagatcaacgagatcagcagcaccctgcaacgcctcatgcaggtgcgcgacgtggtgctcaaggtcaaccagcagtacatcgccagcgccgcccaggccgaccagtaccgcagcgagccgccgttcaagctgcagggcagctaccgcaacatgaacaagatggcggagaagatctccgcggtgatgaacgatgccgagctgctgcaactgatcgccgaccactaccagggcgagtcgcaactgctgaccaccggagccgaggagaacctgctgaagctcgccgaactgcgcggcaaccagagccccgagcaggccgagcgctgggcgcagatcaagcgtgacttcctgcgcaacaagtccatgggcggcagcgacgccgacgtcggcggacggctggttgcgcagctcaacgaccttgtggaaagcgtccgtggcctggctcgcgaaccccagccggtacaaccggcgccctgggacgagttgttggctggattgcgccagctcggccagggtgcgccggcgctgaacgtcgaggtgacggcgcctgcgcagccgggcgtgcagcaggtgctggagagccttgccgcctgcctgcaggacagtttcctgccgctgatcaaggtgatggaccgcaagatcgacgtcgacctgcgcacgcacaaccgcatcaacgagatatccagccgcctcgacgaactgggccggttgctgggcggcgagcagaggccgctggagaacgatcaaccctga

SEQ ID NO: 318595 - DNA, 693 bp, Pseudomonas aeruginosa
atggacttcgacggattggaccgccagctgcgcgacagcctggccgatctgaagctgagcaacgaggagcgggacgaactgcgccaactgggcagcgagctggcacccgaccaggtgcgtttcctgcgcaaccgtgccttcgacctggtgcgtgagctggtcctcctggaggagcagggcgaacggatagccgccctgaagtggctggagcaggtggtgcgcaccctggaggttaccgcggcgccgccgcgcagccgcgccagcgcctatttcagtcccggcgaggagtgtcggcggaagatccgcgaactgtgccggcaggccaggcagagcctggacatctgcgtgttcaccatctccgacgaccagctcagtgcggaaatcctggcctgccatcggcgcggcgttccggtgcggatcatcagcgacgatgacaagcagttcgacgaaggcagcgacatccatgcgctgcgcgaggccggcgtaccgctgcgaatcgacgacagtcccttccacatgcaccacaagttcgccctggtggatggcgcctggctgctcaacggcagtttcaactggacccgcagcgccagcgtcaacaacgaagagaacctgctggtaaccgacgacgccgtgctgatcggcgcctatcggcgcgagttcgaggaactctggggccgctacgccccgcgctga

SEQ ID NO: 318596 - DNA, 540 bp, Pseudomonas aeruginosa
atggccctgcaatccacgccctataaagccgatatttccctcaccgacctggaccgcggggtctacgagacgttgcgcctgaccgtggcccggcacccctccgagaccgaggagcgcctggccgtgcgcttgctggcctacgtgctgtggtacggcgagcagatcgccttcgggcgtggcctgtcggacgtggacgaaccggcgctctgggaaaagagcctggacggccgggtcctgcactggatcgaagtcggccagccggacgccgagcgcatcacttggtgctcgcgtcgctgcgagcgcttcagcctgctcgcctatggcaacctgcgggtctggcagaccaaggtgctggacagtgtgcgcagcctgaagaacatcaacgtcgcggcagtgccccaggaacccctggagagcctgtcccgcgacctgccgcgttcgatcaactggaccgtgatgatcagcgagggcaccctgttcgtcaccgacgagaacggccagcacgagttgcagctggagtggctgcagggcgagcgttga

SEQ ID NO: 318597 - DNA, 1716 bp, Pseudomonas aeruginosa
atgcgtatcgaaccccgccccctgcccgaaaccctgcccgatctcggcgaccttccgccattgctggcgcgcctgtacgcggctcgtggcgtgcgttgcgccgaggagctggacaagggcctggcgcggctgattccctaccagcggctgaaaggcatcgaagagggcgtggcgctgctggtggacgccctggagggcggccagcggattctcatcgtcggcgacttcgacgccgacggcgccaccgccagcagcgtcggcgtgctggccctgcgcatgctcggcgcggcctgggtcgattacctggtgccgaaccgcttcgagtacggctacggcctgaccccggagatcgtcggcgtggccctggagaagcgtcccgacctgctggtgacggtggacaacggcatctccagcgtggacggcgtccaggcggcgaaagccgcggggctcaaggtgctggtcaccgaccaccacctgcctggcccggaactgccggcggcggatgcgatcatcaaccccaaccagccgggctgcgaattccccagcaaggccatggccggggtcggggtgatcttctatgtgatgctggcgttgcgggcgcgcctgcgcgagctggactggttcgcccggcgcgggctgaaggaaccgaacctcgccgagctgctcgacctggtggcgctgggcagcgtcgccgatgtggtgccgctcgatgccaacaaccgcatcctggtccaccagggcctcgcgcgcatccgcgccggccgcgcccggccgggcttgcgcgcgctgctggaggtggccgggcggcctccggtacggatcacctccaccgacctgggtttcatcctcggtccgcgcctgaacgcggcgggtcggctcgacgacatgtccctcggcatcgaatgcctgctctgcgacgacgaagcgctggcccgcgacatggcggtgcagctcgaccagttgaaccaggaccgcaaggccatcgagcagggtatgcagcgcgaggcgctggcgcagctcaaggagctgagcctggagcaactgccgttcggcttgtgcctgttcgacgccgactggcaccagggcgtgatcggaatcctcgcctcgcgcctgaaggagcgctaccaccggccgaccatcgccttcgccgatgccggcgacggcagcctgaaaggctcggcacggtcgattcccggcttccacatccgcgacgcgctggacgcggtagccgcccgtcatcccgggctgatcagcaagttcggcggccacgcgatggctgccggactatcgttgccgcaggaaaacttcggcgctttctccgccgccttcgatgccgaagtacgccgccaactggccgaggaggacctggccgggcgcctgctctccgatggccagttgagcatccaggagttccacctggagctggcgcgcgcgttgcgccaggccggtccctggggccagcactttcccgagccgatgttccacggggtgttccagctggtgcagcagcggatcgtcggcgagcgtcacctgaagctggtgctgaaaagcgaatgcggctcgctgcaactggatggcattgccttcaacatcgaccgcgagcagtggcccaaccctaccgtgcgctgggccgagctggcctacaagctcgacgtcaacgaattccgcggccaggaaagcgtgcaactgatgatcgtccacatggcccctcgctga

SEQ ID NO: 318598 - DNA, 1497 bp, Pseudomonas aeruginosa
atgaagaaggtttctacgcttgacctgttgttcgttgcgatcatgggtgtttcgccggccgcttttgccgccgacctgatcgacgtgtccaaactccccagcaaggctgcccagggcgcgcccggcccggtcaccttgcaagccgcggtcggcgctggcggtgccgacgaactgaaagcgatccgcagcacgaccctgcccaacggcaagcaggtcacccgctacgagcaattccacaacggcgtacgggtggtcggcgaagccatcaccgaagtcaagggtcccggcaagagcgtggcggcgcagcgcagcggccatttcgtcgccaacatcgctgccgacctgccgggcagcaccaccgcggcggtatccgccgagcaggtgctggcccaggccaagagcctgaaggcccagggccgcaagaccgagaatgacaaagtggaactggtgatccgcctgggcgagaacaacatcgcccaactggtctacaacgtctcctacctgattcccggcgagggactgtcgcggccgcatttcgtcatcgacgccaagaccggcgaagtgctcgatcagtgggaaggcctggcccacgccgaggcgggcggccccggcggcaaccagaagatcggcaagtacacctacggtagcgactacggtccgctgatcgtcaacgaccgctgcgagatggacgacggcaacgtcatcaccgtcgacatgaacagcagcaccgacgacagcaagaccacgccgttccgcttcgcctgcccgaccaacacctacaagcaggtcaacggcgcctattcgccgctgaacgacgcgcatttcttcggcggcgtggtgttcaaactgtaccgggactggttcggcaccagcccgctgacccacaagctgtacatgaaggtgcactacgggcgcagcgtggagaacgcctactgggacggcacggcgatgctcttcggcgacggcgccaccatgttctatccgctggtgtcgctggacgtggcggcccacgaggtcagccacggcttcaccgagcagaactccgggctgatctaccgcgggcaatcaggcggaatgaacgaagcgttctccgacatggccggcgaggctgccgagttctatatgcgcggcaagaacgacttcctgatcggctacgacatcaagaagggcagcggtgcgctgcgctacatggaccagcccagccgcgacgggcgatccatcgacaacgcgtcgcagtactacaacggcatcgacgtgcaccactccagcggcgtgtacaaccgtgcgttctacctgttggccaattcgccgggctgggatacccgcaaggccttcgaggtgttcgtcgacgccaaccgctactactggaccgccaccagcaactacaacagcggcgcctgcggggtgattcgctcggcgcagaaccgcaactactcggcggctgacgtcacccgggcgttcagcaccgtcggcgtgacctgcccgagcgcgttgtaa

SEQ ID NO: 318599 - DNA, 1107 bp, Pseudomonas aeruginosa
atgagtctgctgttcgagcctcttagcctgcgtcaaatcaccttgcccaaccgcatcgccgtatcgcccatgtgccagtactcggcgcaggagggcctggccaacgactggcatctcgtgcacctgggcagccgcgcggtgggcggcgccggcctggtgatagtcgaagccaccgcggtgttgcccgaggggcgcatcaccgctgacgacctcggcatctggagcgacgcgcatgtcgagccgttgcatcgcatcacccgtttcatcgaatcccagggcgcggtcgccggggtccagctggcccacgccgggcgcaaggcgagtacctggcggccgtggctgggcaagcacggcagcgtgccgatcggcgacggcggctggataccggtggcgccgtcggcgatcccgttcgatccccagcacacgacccccgaggccctgagcgaggcgcagatcgaggcgctggtgcaggccttcgtacgcgccgccgagcgctccctggctgccggcttcaaggtcgcggaggtgcatgcggcccacggctacctgttgcatcagttcctctcgccgctgtcgaaccagcgtcgcgaccagtacggcggctgcttcgagaaccgcatccgcctgcttctgcaggtcaccgccgcggtgcgcaaggcctggccgcaagagttgccgctattcgtgcggctgtccgccaccgactgggtggaggatggctggaaccccgacgagaccgtggaactggcccggcgcctgaaggacctgggcgtggacctgatcgacgtgtcttccggcggtaccgcggcgaatgcggaaatcccggtaggaccgggctaccagaccgagttcgccgaacgggtgaagaaggaggccggcatcgccagcggcacggtgggcatgatcaccgagcctgtgcaggccgagcatatcctgcgcaccggtcaggccgacctgatcctgcttgcccgtgaactgctgcgcgatccgtactggccgttgcacgccgccgacgaattgcgcaacgagcagatgccctggccgccgcagtacctgcgagccgctcatcgcagcacgccgccgcgcaaatccctggaaatgcagtga

SEQ ID NO: 318600 - DNA, 351 bp, Pseudomonas aeruginosa
atgcacgccaacgccggttctccccacgcctccctgcctgacagcgatgtcgccctgctggccaatatcctggtcctggcgacacgcaacatgaacaacatgaccaccatgctggcgcacctttcggtggagctcagccagagcgaagagccacgcctgcaacgggtcggtcatcgggtcctgaacgaactctcggagctgggggccgccctggagacccagtgggacctgatcggcgcgctggcgcgtttctcacccctgctcgaacgtaccctgccgcgccaggaacccctggtcaccgagatccacctcaccgaactgccgggccaggcgctgccgccctccgcctga

SEQ ID NO: 318601 - DNA, 642 bp, Pseudomonas aeruginosa
atgaacgatgcttctccccgtctgaccgaacgcggcaggcaacgccgccgcgccatgctcgacgccgctacccaggcctttctcgaacacggtttcgaaggcaccaccctggacatggtgatagaacgggccggtggttcacgggggaccctgtacagctccttcggcggcaaggagggcctgttcgccgcggtgatcgcccacatgatcgaggaaatcttcgacgacagcgccgatcagccgcgccccgccgccacactgagcgccaccctcgagcatttcggccggcgctttctcaccagcctgctcgatccccgctgccagagcctctatcgcctggtggtggcggaatccccgcggtttccggcgatcggcaagtccttctacgagcaggggccgcagcagagctatctgctgctcagcgagcgactggccgcggtcgctcctcacatggacgaggaaacgctctacgcggtggcctgccagtttctcgagatgctcaaggccgacctgttcctcaaggccctcagcgtggccgacttccagccgaccatggcgctgctggaaacccgcctcaagctgtcggtggacatcatcgcctgctacctggaacacctgtcgcagcgccccgcgcagggctga

SEQ ID NO: 318602 - DNA, 426 bp, Pseudomonas aeruginosa
atgaatgcccccgctaagagcctgttggatatcgatgcctttcccctggtccaggtccgcgagatgccccgcgagctggccgatgtcgagcgctggttggaggaggtcgaagcgctgctggccgtcgagcgcgatttcgccctggtctatccgccgctcccgcaggaagaagctgaaggcgaccagcaggcgcgcaagcgcctagtgttgtggctcaaggaaaatcgccagcgcttcgtcgagcattgccggggcatcctgctcagtgccaacggccagccggacaacctcgccgacctgcagcaactggcgccggtgctgcaggctgtctacggcccgccggtgagcgtggcgccggacctggcgtccgcccgcggcatggcgaaggcactgctgagcgggccggcgacggggatgaactggtga

SEQ ID NO: 318603 - DNA, 1242 bp, Pseudomonas aeruginosa
atggatagcccgtccactctcgctcgtccgcacccccaggccagcccgcgatggctggcagttgccaatgtgatcttcgccggcatcgccgctgccctgcatgtcggcaaggcgaccatcgccctgccgtcgctgcaacggagcttcggcggcgacctcgccgcgctgagctggatcatgtccgcctttccgttcgtcggcgtattcggcggcatcgccgccggcctcctggtgcgtcgctggggagatcgccggctgctgaccggtgggctggcgattctcggcggggcgagcctgctcggtgcgtcgatgcaggacttcgcctggttgcttgccactcgcttcgtcgaggggctcggtttcctcatcgtggtagtggcggcgcccgccgtgttgcacaggatcaccagcgagacgcggcgcagcgtggtgttcggtctgtggagcaccttcatggcaggcggaatcgccctctcgatgctgttcgggccgctgctcgcggactggcgtgccgactggcaactgagcgcactgctggtactggtcgcggcgctgctgctgccgctcagcgtccctgccgacgatgggtgcagggcggcaggcgtgaggccggccggtcttggcacgttgctcaaggttccggcgatcaccctgctggcgctcggcttcaccacctacaacctgcagttcttcgccctgatgacgttcctccccgtgttcctcatgcagcgcctgggcgtcgccctggagactgcgggactcatcggcgcggccatcgtcgcggcgaacgccctgggcaatgtcgcggcgggtttcatcctttcccgcggcatacgtcccggcgccttgctggcgagcaccgcgatcctgatgggactcaccggtgcggcgttcttccatgccgcgatgccggggctcctggcgattgcgctggggttcgtcttctcggcggtcgccggcatgctccccaccaccgtgctggcgaccgcgccgctggcctcacccgcgccttcgctgacgccactggccatcggctgggtaatgcagggcaactacctggggcaggtgatcggccccttgctgatcggcctgatcgtcagccgtttcgactggtcgggcgcgatcggcctgatgctggtcgcgggcgcggcgggggccgtcctggggttctgcctgctgcgtgcgctggacggcctgcctcgcgccattgccacgggttccgcggctcgccccgcggattag

SEQ ID NO: 318604 - DNA, 342 bp, Pseudomonas aeruginosa
atgaacgaccgactgcagatcgaagacctcctcctgggcgacggcaaggaggtagtgaagggtgcgctgatcaccacccagtacaagggcaccctggaagacggcacgctgttcgactcctcctacgagcgcggccggccattccagtgcgtgatcggcaccggacgagtgatcaagggttgggaccagggcctgatgggcatgaaggtcggtggcaagcgacggctgttcgtcccttcccacctggcctacggcgaacggcaggtcggcgcgcacatcaagccccactccaacctgctgttcgagatcgaactgctggaagtgctcacccgcgacgactga

SEQ ID NO: 318605 - DNA, 1707 bp, Pseudomonas aeruginosa
atgcaaagactgtcgcgtatcggccgcaacaccctcgccgtctccgtttccaccttgctcctcagcgcctgcaaccagggcgacgatgcgccgaagcctgcggcggtcgcgccgcaaccggccgcaccgagcatggctgcactgagcatcccgctatgcctcaacggccagtgcgcggtgatcgaccaggacgccaagctgctcgtgccgttcgacaacgactacgacaatatcgtcgccagcgcctaccagggcaccctgatggcggcgcgcgaggagcgctggaacctgatccaggcgaaggacggcaaggtgttgcgcgacgatatcggcgaagccctgtcgctgctcacccccaacctctatggcttcgtccgcgatggcaagtacggcgtggtcgacggccagggcaaggaagtccaggcgccgcgtttcgacgacatctaccccaacagtgccaacgaattcatcatctacgagatcgatggcaagcgcggcatcctcgatgctaagggcaagcagctcaccgaggcgctctacgacaccaccctggtcaacggcagcgtcgccgaacacggcggcttgatcagcgccgagcgtggcgaggagaagtggatcatcaacctcgctaccggcgaacagaaggccgtggcctacgagagcctgggcgacctccacgacggcgtgatgagcgccagcgtcatcggcaagggctcccaactggtggatgccaagggcgacgtggtcggtgacggcaagagctacgattacctgggcaccccggccaacggcctggtcgcgttccgcgagaagtacgacagcccctgtggctacctcgactaccagggcaaggtggcgatcgccgcccagttcgccggttgcggcgccttcggcaagcagggcgggctggcccagcagcgcatggaagatggctcgtcgggcaagtacggcctgatcgatcgcagcggcgcctggaaggtgcagccgcagtacgattcggccgacagcgccggcctcaccgcgcttggctacaccgtcgacgtgcccggcctggctgccgtcggcgtgagcaccggcctgttcagcgccgacttcggcatcttcaacctcgacgaaggcagcgagtgggtgaagccgggttatgcgcagatcggcgcgctgggcaacgacctgttcgtcgtggcgaagaagggcgggccgcagaagaccgtcagcttcatgggttcggaaagccaggtgccggtggtgggcctgatggaccgcagcggcaagatgctgctggagccggacgaactgatcagcatccagtctgcgtatgacggtcgtttcctggaaggtctcgacggtatggacaacgctgcccacaccgtgttgctcgatcgccagggacgcacgctggttccagcgctctggcagaagctggaggtgaatccgcagcagggttacatcctgggctacgaagtcagcggcactggcgacgaggcgacggaaaccttgcgcgcactgtacgacctgaacggcaagccgcgcttcaccgtggccaccaccgattgcggcgccgaacagttgctcgacggcaatggcaaggcgatctggccgcaggacccgaccccgtattgccagtcggacgacgagcaggacgacgaaggcgagccggagcaggagccggcgcccgtcgaagagagcgaggaaaccagcgagagctga

SEQ ID NO: 318606 - DNA, 804 bp, Pseudomonas aeruginosa
atggaccgtaaccgccgcctctccgcccgactctgcctcctgctgctgggactcgccagccaggccgaagcccgcgaaccgcagccctgcgcgtcgcgactgcttgacgccgtagccaggcaggtcggccacgatggctggatagccccttcgtacgaatcttccggtccgttcctcgccgtggcctgcaagccctggccggacgaccccgcgcagacggtgatcgccatggcctacctggatccgggcgacaccgccgtggaaggcgaacgccacccgcatctgctattggccaaggccgacagccgcagcggcaggctgctcgaacgctacgacagcgacttcgaagaagacgcctccgtcgccgtcggcagcgacagcctctggctggacaccgcgcgctatcgcctgagcccgacggtgcgcgccttcggcgtggtattccatagcgtggcgcgtggcgccagttgtccggaagccggcttcgacaacctgctgaccctggtggtgccggccggcgaaggcaagctgcggccggtgctcaatacctacctggaccagtggaggacgctgaaaggctcggtctgctccgccgagcccgggttcgaacaggaagtctcgcacctgaccctggaactcggccgcggacgctccaacggctttgccgacctggtcatcacctcgcgggtcagcgacggcgaaacggagaacggcaaacccttgcgcacggtgaagcgcacgctgcgctatgacggcgagcgctacccgttcgaggagtattcggacttctggcaccgccagtga

SEQ ID NO: 318607 - DNA, 642 bp, Pseudomonas aeruginosa
atgaaaacacgcgtcatcctcgtcgacgaccacgccctcaccctgatcggcatgcgctatctgctgagtgcgtacgacgacctgcggatcgtcgcccaggcccaggacgccgatggcttgctggcgcagctcgaagcgcacccctgcgacctgctgatcaccgacctgatgatgcccggcagccagcaggccgacggcttgcgcctggtgcagaaggtccggcggcgctatccggacctgccgatcatcgtcgtcaccatgctcggcaacccggcactcgtttcatccctgctcaagctgggcattcacggcctggtgagcaaacgcggcatgctcgacgatctgcccaaggcaatccgccacgccggccgtcgaccattcatctcgcgctccatcgcacacctgctggaagtgggcgaagccgagcacggcaagccgctggccagcctcgaacaactcaccccgcgcgaagtggaagtgctgcgcctgtacggcagcggcctggcggtcggggaaatcgccatccgactgtgccgcagcaagcagaccatcagcgcgcaaaagagcagcgccatgcgcaagcttggcctggacagcaatgccggactctttatctacatccgggaaaacggcctggcctga

SEQ ID NO: 318608 - DNA, 1863 bp, Pseudomonas aeruginosa
atgaccatctcccgccgcgacttcctgaacggcgtagccctgaccatcgccgcaggcctgacccccgccgagatcctccgcgccgcccccggcggccgctactatccgcccgcgctcaccggcctgcgcggtagccatccgggcgccttcgaagtcgcacaccagatgggctgggagaagaagaccttcgatgtcgaccacctgccgatcgaagaggaatacgacctggtggtggtcggcggcggcatcagcggcctcgccgccgcctggttctatcgcgaacggcaccccgcggcgcgcatcctggtcatcgagaaccacgacgacttcggcggccatgccaagcgcaacgaattccaggccggcgggcgcactatcctcggctacggcggcagcgagtcgctgcaatcgccgaacgccctctatagcgaagacgccaaacacctgctgaaacgcctgggcgtcgagctcaagcgcttcgagacagccttcgacaccgacttctaccccggcctgggcctgtcccgcgcggtgttcttcgacaaggccagcttcggcgtggacaagctggtcagcggcgacccgacgccgatggttgccgacgaggtcccccgcgatcgtctcaatgcccgctcctggcgcgccttcatcggcgacttcccgctgagccgcgaagaccgggaggcgctcatcgcgctgtacgagtcacctcgcgactatcttgccggcaagagcgtggaagagaaggaaacctacctggcgaagaccagctaccgcgactacctgctcaagaacgtcgggctctcggaaacctcggtgaagtacttccagggccgcagcaacgacttctctgccctcggcgccgacgccctgccggcggccgacgcatacgccgccggcttccccggcttcgacgccctcggcctgccgcaacccagcgaggaggcccaggcggaaatggacgagccgtacatctaccatttccccgacggcaacgcctcgctggctcggctcatggtgcgcgacctgatccccgcggtggcgccgggccgaggcatggaggacatcgtcatggcccgcttcgactactcgaagctggacctcgccgggcacccggtgcgcctgcgcctgaacagcaccgccgtcagcgtgcgcaaccgcgccggcggcgtcgatgtcggctacagccgcgccggccgcctgcaccgggtacgcggcaagcactgcgtgatggcctgctacaacatgatggtgccgtacctgctgcgcgacctctccgaggagcaggcccacgcgctgagccagaacgtcaagttcccgctggtgtacaccaaggtattgctgcgcaactggcaggcctggaagaccctcggcatccacgagatctacgcgccgaccctgccctactcgcggatcaagctggacttcccggtcgacctcggcagctaccggcatccacgcgacccgcggcagccgatcggcgtgcacatggtctacgtgccgaccaccccgaacgccggcatggacgcccgcacccaggctcgcgtaggccgcagcaagctctacgcgatgagcttcgagcaactggaaaaggacatccgcgaccagctccaggccatgctcggcccggcgggcttcgaccaccgccgcgacatcaccggcatcaccgtgaaccgctggtcgcacggctactcctacttcatgaataccctctacgacgacgaggcggaaagcgaagcgctgatggaactggcgcgaagcaaggtcggcaatgtcgccatcgccaactcggatgcggcctgggatgcctacgcccatgccgccatcgaccaggcggtgcgggcagtccgcgaactgggttga

SEQ ID NO: 318609 - DNA, 696 bp, Pseudomonas aeruginosa
atgaatacccgtggtttgctcgaccaattgctcaagtccgggcaggaaatgttgcagaacaagtccggcggcaagcccggcgccagcggcggcggacagctcggcagcctgctttccggcgccggcggcggagccctggcggccggcgccatcggcctgctgctgggaaacaagaaggcgcgcaagttcggcggcaaggcgatcacctacggcggcctcgccgcgctcggggtgatcgcctacaaggcctacaacaactggcagcagcaacagaacggcgccgcgccgcaggcgcagccgcagaccgtcgaccgcctgccggaagcccaggccgaagtgcatagccacgcgatcctccaggccatcgtcggtgcggccaaggccgacggccacatcgacgagcgcgaacggcagatgatcgaaggcgaggtggccaagctgaccagcgaccgcgaggtgcagggctggctggagcgcgagctgaacaagccgctggacccggccgagatcgcccgtgccgcgagcaccccggagatcgccgccgagatgtacctggccagcctgctgatggtcgacgaggaaagcttcatggagcgctcctacctcgaggagctggcgcggcagctgcgcctggaaccctcgttcaagctggagctggagagccaggccagacaggcgctgcaacgcctggcctga

SEQ ID NO: 318610 - DNA, 906 bp, Pseudomonas aeruginosa
atgttcgactggaatgacctgcgtttcttcctcgagttgcagcgcagcggtcgcctgctgaccgccgccaagcgtctcggcaccactcacgccacggtggcccggcacatcgagaacatcgagcgcgacctcggcacccaactgttcgcccagcacaccggcggctaccagttgactccggccggccaggcgctgctcaagcacgccgaggcgatggagaacaccgcgctgctcgcccaggaagaaatgagccagagcatctcgccgctggggcagatccgcatcggcgtcaccgaaggcctcggcagcgtcttcctcgctccgcgcctggcgcaattgatgcgccactacccgggcctggaggtcgagctggtctcggtgccgcgcttcgtcagcatcaccaaccgcgaagcggacatcgccatctccctcgaccggccgagcgccgacctggtgatcacccgcctgctgacccgctatcgcctggcgttgttcgccagccccgcctacctggaacaggcgccgccgctgcgcgaccgcgacgacctcggcaggcaccagtggatcggctacgtcgacgacctgctgttcagccaggaactgatgttccaccacagtttctgccgccacccgcaggtcgtgttccgcagcaccagcgtggtcgcccagcagcaggcggcacaggccggcatcggcctggcgatcctgccgcacttcatgggtagccgcgatccgttgctggtaccggtgctgcccgaggaaagcatccagcgcgagtactggatgagcacccggcgggagctgcaccgctcggtgcgcctgcgggtggtctgggacttcctgctggagctgtgccagcgcgagcgagaggttctgctcggcccttcggcaacgccgccgccatga

SEQ ID NO: 318611 - DNA, 1674 bp, Pseudomonas aeruginosa
atgcccgaggtactggatacctacgactacctcatcgttggcgccggacctgccggctgcctgctggccaaccggctttccgccgaccctgccaaccgtgtcctgctgctggaagccggcggcccggacaactatccctggatccacattcccgtcggctacctctactgcatcggcaacccgcgtaccgactggtgcttcgacaccgacgaggtccccgggctcaacggtcgttccctgaagtacccgcgcggcaaggtgctcggaggatgctcctcgatcaatggcatgatctacatgcgtggccaggcccgcgactacgaccagtgggtggccgaaggcaatccgggctggagctggagagagctgctgccgctgttccgcaggatggaggaccatttcgccgggaccagcgaaatgcacggcgccggcggcgaatggcgggtagaacgccagcggctctcctggaagctgctcgatgccttccagcaggcggcggcgcagaccggcatcgccagcgtcgaggatttcaacggtggcgacaacgaaggctgcggctacttccaggtcaaccagcgcggcggggtgcgctggaatgcctcgaaaggcttcctgcgcggcatcgcccagcgcgccaacctgacggttctgacccatgccgaagtccagcgagtgctcctcgaggacggccgcgccagggccctgtcggtccgttggcagggccgcgagcagcgcttcgaggcgcgccgcgagatcgtcctgagcgccggcgcgatcggttcgccgtgcctgctgcaacgctccgggatcggcccgcgggacctgctggagcggctcggcgccggggtcgtccacgagttgcccggggtcggtggcaatctccaggatcacctgcaactgcgcatgatctacaaggtcgacggcgttcccaccctcaaccagatcgccggcagcctatggggcaagctgggcatgggcctgcgctacctggcgagccgcagcgggccgttgtcgatggcgccgagccaactgggcgccttcgcccgctccgatccgcagcagccctcggccaacctcgaataccacgtccagccgctctcgctggatcgcttcggcgagccgctgcatgccttccctgcgttcaccgcgtcggtctgcgacctgcgtccgcacagccggggaacggtgcgcatccgctcgctcgacccgggcgaggcgccgtcgatccagcccaactacctgagcgatccgcgcgacctgaaggtcgccgccgacgccatacgcctgacccgccgcatcgccgccgcaccggcgctggccgccttccgtccgcaggaatacaagcccggcccggaataccgcagcgaagaggatctgcagcgcgctgcggcggagatcggcaccaccatcttccaccctgccggcacctgccgcatgggccaggggccgcaagcggtggtggatgcgcaattgagggtgcacggaatccccggcctgcgcatcgccgatgcctcgatcatgcccagcctgacctccggcaacacctgttcgccggtgctggtgatcgccgagaaggcggcgcagatgattctcgccgagcgccgccgcgaggccgcgccgcaggtcgtcgaaagcgccatggcggccggcggcaaggaggcggtggaggcctga

SEQ ID NO: 318612 - DNA, 1620 bp, Pseudomonas aeruginosa
atgaccgagtacgcaacgaccccttcctacacagtgcctgcgaccacgccccaggaggagcgcaaggtgatcttcgcctcctcgctgggcacggtcttcgagtggtacgacttcttcctctacggcgccctggcggcggtgatcagcaagcagttcttcgccggcgtcaacgacaccacggccttcatcttcgccctgatggccttcgccgccggcttcctggtgcggcccttcggcgcgctggtgttcggccgcctgggcgacatgatcgggcgcaagtacaccttcctggtgaccatcctgttgatggggttgtcgaccttcgctgtcggcctgctgcccacctatgcctcgatcggggtcgccgcgccgatcatcctggtcaccttgcgcatgctccagggcctggccctgggcggcgagtacggcggcgcggcgatctacgtcgccgagcacgccccggcgaacaagcgcggtagctacaccagttggatccagtccaccgcgaccctcggcctgttgctctcgctgctggtgatcctggcctgtcgccagttgaccggcgacgagttcgagacctggggctggcgcctgccattcctgctgtccatcgtcctgctgggcatctccacctggatccgcctgtccatgcgcgagtcgccggcgttcctcaagatgaaggccgagggcaaggtcagcaaggcgccgctgcgcgagtccttcacccagtggggcaacctgaaggtggtgctgaccgcgctgttcagcatcaatgccggccaggcggtgaccttctacacggcgcagttctacgtgctgttcttccttacccaggtgctcaaggtcgatggcggcaccgccaacggtctgctgatcgtcgccctggtgcttggcgcgccgttcttcatcgtcgccggctggctgtccgaccgcatcggccgcaagccggtgctgctggccggcctgttgctcgccacgctgttctacttcccgctgttcaagggcctgacccactacgccaacccggccatcgaccaggccagccggcagtcgccgatcagcgtggtggccgacccggcgacctgcactttccagttcgacccggtaggcaaggcgaccttcgacagcccctgcgacaaggtcaagaccttcctggtcaaggccggcctgccctactcgacggtggcggcgcccgccggcagcgacgtcagggtgcggatcggcgagaccgagatcgccggcttcgacgccgaagcgatggcggccgcggtgaagacggcaggctacccgcagcaggccgacggcagccaggtgaacaagccgatggtgatcgccatcatcttcgccctggtactgatctccaccctctgctacggcccgctggcggcgctgatggtcgaactgttcccgacccgcatccgctattcctcgctgtccctgccgtaccacatcggcaatggctggttcggcggcttcctgcccacggtctcgttcgccctggtggtgtacaccggcgacatcttctacggcctctggtatccggtgctgatcaccggcggtagcctggtctgcgccttgctgttcctccgcgaaacccgccataccgacatccaccggtga

SEQ ID NO: 318613 - DNA, 1629 bp, Pseudomonas aeruginosa
gtgaagaactggactgttcgccagcgaatcctggcaagtttcgccgtgatcatcgcgatcatgctgctgatggccgctactgcgtacgtgaagatgttgacggtggaaaagggcgcctaccgtgtccaggacgacgccatgccggggatgtacttcatcacgctggtacgcagttcgtggaccgacaactacttgcagacccaggaactgttcggcatcaccgacgaccacgagctgagcaaggccgaggccgacagtatcctcgccagcgaggagcgcctggaccagcagatcgcctcctaccagaagaccatgaaccccgacgaggcccgcgaccacgagttgctcgccggtttccaggccgtgcgcaaggactacctggagcagcacgacaaggtgctcgagctttaccgcgagaagcgcttcgaggaagccggcaagctcgtcgccggcccgttgaccgagcactggcgcgagggccgcaagtacctcaacgagatgatcgagctgaacaaggacatcgccgaccgcgcctcggacaacatcgtaaacgcggtggacgatgccgaactgagcatgctggtgaccctgctgctggcggtggtggtagccggcatctgcgggttcctgctgttgcgggcgatcacccagccgatccagaagatcgtccgcagcctcgacctgatggccggtggcgacctcaccgcacgcctgaacctcggccggcgtgacgaattcggcgccatcgagaccggtttcaacggcatggccgaagagctcaagggcctggtgtcgcaggcccagcgttcttcggtgcaggtcaccacctcggtcaccgagatcgccgcgacctccaagcagcagcaggccaccgccaccgaaaccgccgcgaccaccacggagatcggcgccacttctcgcgagatcgccgccacctcgcgcgacctggtgcggacaatgagcgaagtctccggcgccgccgagcagacgtcgaccctggccggttccggccagttgggcctggcgcgcatggaggaaaccatgcaccacgtgatgggcgcggccgacctggtcaacgccaagctggcgatcctcaacgagaaggccggcaacatcaaccaggtggtcaccaccatcgtcaaggtcgccgaccagaccaacctgctctcgctgaacgccgccatcgaggcggagaaagccggcgagtacggccgcgggttcgccgtggtggccaccgaggtgcgccggctggcggaccagaccgcggtcgccacctacgacatcgagcagatggtgcgcgagatccagtcggcggtatcggccggggtgatgggcatggacaagttctccgaggaggtccgccgcggtatcgccgaggtcggccaggtcggcgagcaactgtcgcagatcatccagcaggtgcaggcgctggcgccgcgggtgcagatggtcaacgagggtatgcaggcccaggctaccggtgccgagcagatcaaccaggcgctggtgcaactgggcgaggccaccgggcagaccgtggagtcgctgcgccaggccagcttcgccatcgatgagctgaacctggtggcgaacgggctgcgcaacggcgtatcccgcttcaaagtctga

SEQ ID NO: 318614 - DNA, 510 bp, Pseudomonas aeruginosa
gtgtcccgctccaccggcgatcatcgacgcaccagcaagctgttcctgctgttccgcatggaaggcgaccgctatgccctggatgcccgcgaagtggtcgaagtgctgccgctgctgcgcctgaagcgcattccggaggcgccggaatgggtcgccggggtgttctcccatcgcggcgtcctggtcccggtgctcgacctctgcgcaatggccttcggccgcgcggcgctggcccgcaccagcacgcgcatcgtgctggtcgaataccgcgcccgccaggaccgggagccggtctggctcggactgatcctcgaacaggccaccgataccctgcgttgcgaaccgtcggcgttccgcgactatggcctggacaacggcgaggcccgctatctcggtccggtctatgaaggaccacggggactggtgcaatgggtgcgggtcgaggcattgctgcccgacgaagtgcgcgccctgctgttcccgccggagtgcggcgaggggacggcatga

SEQ ID NO: 318615 - DNA, 1269 bp, Pseudomonas aeruginosa
atgaacgatcgcttcgaacgcctgctcaagagcaggatcggcctggatgccagctcggtgggcagcgcggtgatcgagcgcgcggtacgccagcgcatgagcggcctcgcgctgcacgacgaggacgaatactggatgcgcctgaacggctcgccgggcgaggtgcaggcgctgatcgaagcggtggtggtgccggagacctggttcttccgctacccggagtcgttcaccaccctcgccaggctggccttcgagcgcctgccgagcctgggcggcggacgcgcgctaaggatcctcagcctgccctgttccaccggcgaggagccgtattccatcgtcatggccttgctcgatgccgggctctccgagtacctgttcgaggtcgacgccctcgacgtcagcgctcgggtgatcgagcgcgccagcctcggggtgtacggcaggaattcctttcgcggcgacgaactggggtttcgcgaccgccatttcagcgaggttgccgagggctaccagttggccgagcaggttcgccgcaaggtgcgcttccgctgcggcaatttgctcgatcccgggctactggcgggcgaggcaccctacgatttcgtgttctgtcgcaacctgctgatctatttcgaccgcccgacccagagcgaggtggtcgaggtgctcaagcgcctgttgcggtcggacggcgcgatgttcatcggtccggccgaggcgagcctgctcagccagcacggcatgcagccgatcggcgtgccgctgtctttcgtgttccgccggaccagcgaggcgccccgcggcgcgcggcccaaggcggtgagcgacggagcgcgcccggtcgttgccgccgccgtggagcgtgcgagtattcggccttcgccgccgccaccggcgaaaccgcgccagcggctgtccagcctggttccgccagccagcggccagcccctcgccagtcccgtcggcgagttcgacgaaatcgcccgcctggcggatgccggccagcaccgcgaggcgcgcgccgcctgcgagcgccaactggccgcgcgtgggccgtcggccacggtcttctactggctcgggctgctcagcgatgtcgccgggcaggagcaggaagcccaggatttctaccgcaaggccctgtacctggagccgcagcacgccgaggcgctggcgcacctggcggcgctgctcgccgctcgcggcgaccatgccggcgcccggcgcctgcagcaacgtgcggcccgtggagtgaacaaagatggttga

SEQ ID NO: 318616 - DNA, 690 bp, Pseudomonas aeruginosa
atggttgaggcgagcctgaccttgctcgatacccaacaggtggatgactgctggaaccgcatcggcgtgcatggcgacaagtcctgcgaacgcctggccgagcatgtccattgccgcaactgcgaggtttacgctgccgcggcgacctacttgctggaccgcatcgccctgcgccaggaccagctcgacagcgccgaaacgatggacagccagcgcgaacagagcgacctcggcgagacgcgttcgatcctggtgttccgcctgggcgaagagtggttcggcctggccaccggcagcctggtggaagtggcgccgatgaatcctatccattccctgccgcaccagcgctcgcgcgccctgcaaggggtgaccaacgtgcgcggcgcgctggtcgcctgcctttccctcggcgaactgctggatctcgaacccggcgccgcgccggtcagcgagcgccgggtggttccgcgcatgctgatcatttccgccgccggcggtccggtggtggcgccggtggaggaagtcgacggcatccatgcgattccgctggcgcggatactgccgcccaaccacgccgacggccaggcctcgcgccggcacgtggccggcgtgctgcaatggcgcgagcggagcatcaccctgctcgacgaaggccctctcctgcaagccgtagcgcggagcctggcatga

SEQ ID NO: 318617 - DNA, 2310 bp, Pseudomonas aeruginosa
atgaccccggaccagatgagagacgcgtcgctgctcgagctgttccggctcgaggcggaggcccagacccaggtgctcaacgccggcctgatggcgctggagcgcagcccgacccaggccgaccaactggaagcctgcatgcgcgccgcgcactcgctgaaaggcgcggcgcggatcgtcgggctggacgccggcgtgcgcgtggcgcacgtcatggaggattgcctggtggaggcgcaggacggacgcctgctcctgcaatcggaacatatcgatgcgttgctccagggctgcgacctgttgctgcgtatcggcaccccgccagccggcgacgcaggctgggccgaaggcgccgggcgggaagagatcgacggcctggtgctgcgcctcgaaggcctggtgcgcagcggcctgccgctggcccgcgcggagctgccggcgacgactcccggtctgccggaagcggtccccgaggcgccgccagcggcgtcagcggccgccagcgacgacaacgacgaggagcccgccgggcaggcgggcggcgaacaggccgaggagcgccgcagccgggtcctgcgggtcaccgccgaacgcctggaccggctgctggatatctccagcaagtcgctggtggagttccagcgcatcaagccgctggccgattccctgcaacgcctgcgtcgcctgcagtccagcgccagccgcgcgctcgacgtggtacgcgagacggtccaggaaaccgccctcgacccgcaggcccaggccatgctcggcgaggcgcggcaactgattggcgaatgccagcagatgctggtgcagcacatcgccgatctcgacgagttcgcctggcagggcggccagcgtgcccaggtgctctacgacgcggcgctggcctcgcggatgcggccattcgccgacgtccttagcggccaggcgcggatggttcgcgacctgggccgctcgctgggcaagcaggtgcgcctgctggtcgagggcgaaagcacccaggtcgaccgggatgtcctggaaaaactcgaagcgccgctcacccacctgctgcgcaatgccgtcgatcacggtatcgaggcgccggaaacccgcctcgccgccggcaagccggccgagggcaggatcaccatccgcgcccgccaccacgccggcatgctggtcctggaactgagcgacgacggcggcggtatcgatctgcagcgtctgcgcgagaccgtgctcaatcgccagttcgccaccgccgagaccgtggcgcaactgagcgaggaggaactcctggcgtttctcttcctgcccggcttcagcatgcgcgagcaggtcaccgaggtgtccggtcgcggcgtcggactggacgccgtgcagcacatggtccgccagttgcgcggcggcgtgcgcatggagcaacgccaggggcagggagcgctgtttcacgtcgaggtgccgctgaccctgtccgtggtgcgcagcctggtggtggagatcggcgaggaggcctacgccttcccgctggcgcacatcgagcgcatgtgcgagctggaagcggaggagatcgtccagctcgaaggtcgccagcacttctggtacgaggggcgccatgtcggcctggtctcggctgcgcaactgctgcagcggcccgagagcagccgcaccgaaggggccatcccggtagtagtggtgcgcgaccgcgatgcggtctacggcgtcgccgtggagcgtttcgtcggcgagcgtaccctggtggtgatgcctctcgatccgcgcctgggcaaggtgcgcgacgtttccgccggcgccttgctggacgacggttcgccggtgctgatcctggacgtcgaggacctcctgcattcggtcggcaagctgctcagcagcggccgcctggagcgcatcgatcgcagccggcggcaggccggcggggcgcaacgcaagcgcatcctggtggtcgacgactcgctcacggtgcgtgagctggaacgcaagctcctgctcggccgcggctacgacgtggcagtggcggtggatggcatggacggctggaacgccctgcgctcggagcatttcgacctgctcatcaccgatatcgacatgccgcgcatggacggtatcgaactggtcaccctggtgcgtcgcgacagccgcctgcagtcgctgccggtgatggtggtgtcctacaaggatcgtgaggaggaccgtcggcgcggtctcgacgccggcgccgactattatctggcgaaggccagtttccacgatgaggccttgctggatgccgtcgtcgtcctgatcggagaagcacagggttga

SEQ ID NO: 318618 - DNA, 1008 bp, Pseudomonas aeruginosa
ttgaggatcggaatcgtcaatgacatgccgttggccgtcgaggcgctgcgccgcgcgctggccttcgagccgcagcaccagatcgtctgggtcgccagcaacggtgccgaggcggtgacccagtgcgccgccgatacgcccgacgtggtgctgatggacctgctcatgccggtgatggacggcgtcgaggcaactcgtcggatcatggcggaaagtccttgcgcgatcgtgattgttaccgtcgatatcgagcagaatgtgcaccgggttttcgaagcgatgggatatggggcgctcgatgcggtgaacacgccggcgctgggcatcggcaacccgcaaacggcggcggcgccgttgttgcgcaagattcagaacgtcggctggctgatcggccagcgcgataaccgtggcaaggtccaggtggtgccgccgaaggccggcggggcgcgccagcgtctggtggcgatcggcgcctcggctggcggtccggcgtcgctcgcggtgttgctcaagcaactgccggccagtttcaatgccgcggtggtgctggtgcagcatgtcgacgaggtattcgccgccggcatggccgaatggctggccagcgaatcgaagctgccggtgcgcctggcgcgcgatggcgagccgccgataccggggcagatcctgctggcggggaccaacaatcacatccgcctgctgcgcaacggttcgctggtgtacaccgccgaaccgcgttctttcgtctaccggccgtccatcgacgtgtttttcgagagcgtggcgaattattggcgtggcgatgccgtgggcgtgctgctgaccggcatgggccgcgacggcgcccagggcctcaagcagatgcgcgagcgcggtttcctcaccatcgcccaggaccaggccagttgcgcagtctacgggatgccgaaggccgcggcggcgatcgatgcagcggtgcagatcctttccctggaaaagatcgccccgcgcctggcggaggtattcgattag

SEQ ID NO: 318619 - DNA, 1044 bp, Pseudomonas aeruginosa
atgcacaaccctcatgagagcaagaccgacctgggcgcccctctggacggcgcggtcatggtactgcttgtcgatgatcaggccatgatcggagaggctgtgcgtcgctcactggcgagcgaggcgggcatcgacttccatttctgttccgatccgcagcaggcggtggcggtggccaaccagatcaagccgacggtgatcctccaggacctggtgatgcccggcgtcgacggcctcacgctgctcgctgcctaccgcggcaacccggcgacccgcgacatcccgatcatcgtcctgtcgaccaaggaagagccgacggtgaagagcgcggcgttcgccgccggcgccaacgactacctggtcaagctgccggacgccatcgagctggtggcgcggatccgctaccactcgcgttcgtacatcgccctgcagcaacgcgacgaggcctatcgggcgctgcgcgagagccagcagcagttgctggagaccaacctggtgctgcagcggctgatgaactccgacggcctgaccgggctctccaaccgtcgtcacttcgacgaatacctggagatggagtggcgccgctcgctgcgcgagcagtcgcaactgtcgctgctgatgatcgacgtggactatttcaagagctacaacgacaccttcggccacgtcgccggcgacgaggccctgcgccaggtcgccggggccatccgcgagggctgcagtcgctcctcggacctggcggctcggtacggcggcgaggagttcgccatggtcctcccgggcacctcgccgggcggcgcacggttgctggcggagaaggtccggcgcacggtggagagcctgcagatcagccacgaccagccacgcccgggctcgcacctgaccgtcagcatcggcgtcagcaccctggtgccgggcggcggcgggcaaaccttccgggttctcatcgagatggccgaccaggcgctctaccaggccaagaacaatggccgcaaccaggtcggcctgatggaacagccggtgccgccggccccggcgggctga

SEQ ID NO: 318620 - DNA, 903 bp, Pseudomonas aeruginosa
gtggtggaaaccctggacgacctgaccagcggcctggccgactcccgcgacctgctggacatggcggtcgaggaagacgacgagggtgccgtcgacgacgttgccaacgaagtcgagcgtctgcgcgagatcctcgagaagctggagttccgccgcatgttcagcggcgagatggacccgaacaacgcctacctggacatccaggccggctccggcggcaccgaggcccaggactgggccaacatgctgctgcgcatgtacctgcgctgggccgacaagcacggcttcgacgccactatcatcgagctgtccgagggcgaggtcgccggcatcaagggcgccaccgtgcacatcaagggcgagtacgccttcggctggctgcgcaccgagatcggcgtgcaccgcctggtgcgcaagagtccgttcgactccggcaaccgtcgccacacctcgttcaccgcggtgttcgtatcgccggaaatcgacgacaacatcgagatcgagatcaacccggccgacctgcgcatcgatacctaccgctcctccggcgcgggcggtcagcacgtgaacaccaccgattcggcggtgcggatcacccacgtgccgaccaataccgtggtggcgtgccagaacgaacgctcccagcacgccaacaaggacaccgcgatgaagatgctgcgggccaagttgtacgagctggaaatgcagaagcgtaccgccgcgtcccaggccctggaggactccaagtccgacatcggctggggccaccagatccgctcctacgtgctcgaccagtcgcggatcaaggacctgcgtaccggtatcgagcgcagcgactgcgacaaggtgctcgacggcgatctagacgaatacctcgaagccagcctcaaacaggggctgtaa

SEQ ID NO: 318621 - DNA, 1506 bp, Pseudomonas aeruginosa
atgagcgaccaacaactcgaccagcacgaactgcaacaggaagaaaacaagctgatcgcccagcgcaaggaaaaacttgccgccgtgcgcgaagcccgggccatcgccttccccaacgacttccgccgcgacgcctacttcgcggacctgcagaaacagtacgccgacaagaccaaggaagagctggaagccgcagcgatcccggtcaaggtggccggtcggatcatgctcaaccgcggttccttcatcgtcctccaggacagcagcgagcgcctgcaggtctacgtcaaccgcaagaccctgccggaagaaaccctggccgagatcaagacctgggacctgggcgacatcatcggcgccgaaggcgtgctggcccgctcgggcaagggcgacctgtacgtcgacatgaccagcgtgcgcctgctgaccaagtcgctgcgtccgctgccggacaagcaccatggcctgaccgacaccgagcagcgctaccgccagcgctacgtcgacctgatggtcaacgaggaaacccgccacaccttccgcgtgcgttcccaggtcatcgcccacatccgccgtttcctcagcgagcgcggtttcctcgaagtggagaccccgatgctgcagaccatccccggcggcgccgcggccaagccgttcgagacccatcacaacgcgctggacatggccatgttcctgcgcatcgccccggagctgtacctcaagcgcctggtggtcggcggtttcgagaaggtcttcgagatcaaccgcaacttccgtaacgaaggcgtctcgacccggcacaaccccgagttcaccatgctcgagttctaccaggcctacgccgactacgaagacaacatggacctgaccgaggaactgttccgcgaactggcccaggcggtactcggtaccaccgacgtgccctacggcgacaaggtcttccacttcggcgagccgttcgtgcgcctgtcggtgttcgattcgatcctcaagtacaacccggagatcaccgccgccgacctcaacgacgtcgagaaggcgcgggccatcgccaagaaggccggcgccaaggtcctcggccacgaaggcctgggcaagctgcaggtgatgattttcgaggaactggtggagcacaagctggagcagccgcacttcatcacccgctaccccttcgaggtttcgccgctggcccgccgcaacgacgaagacccgagcgtcaccgaccgcttcgagctgttcatcggcggccgcgagatcgccaatgcctattccgagctgaacgacgccgaggaccaggccgagcgcttcatgttgcaggtcaaggagaaggacgccggcgacgacgaggcgatgcactacgacgccgacttcatcaatgccctggaatacggcatgccgccgaccgccggcgaaggcatcggcatcgaccgcctggtgatgctgctgaccaactcgccgtcgatccgcgacgtgatcctgttcccgcacatgcgcccgcaggcctga

SEQ ID NO: 318622 - DNA, 714 bp, Pseudomonas aeruginosa
gtgtcccgagtagctcccagagacagcgccgcgcaggccgccagcgcggtagccgaaagcgttcgttaccagggccgcaaggccagccgccagggcagcgagcagcggcgccaggcgattctcgatgccgccatgcgcctgatcgtccgcgacggcgtacgggccgtgcgccaccgcgcggtggccgccgaggcccaggtgccgttgtcggccaccacctactacttcaaggacatcgacgatctcatcaccgacaccttcgccctcttcgtcgagcgcaacgcagaggcgctgtcggcgttctggagcagcgtggagggcgacctccaggagatggccgcggtgctggccgacgaccccggcgcccgtggctcgctggtggaacggatcgtcgagctggccgtgcagtatgtccaggtccagctcaccgagcgccgcgagcacctgctggccgaacaggccttccgccaggaggcgttgctcaacccgcgcctgcgcgaactggccgatgcccaccagcggattctctccctcggcgccgtgcatttcttccaggtgctcggttccgggcagcccgagcaggacgccaaggtgttgacgtcgattattctgcagatggaatatcagggcctcgtggacggggtcgagcaactggccgtggacgaaatgcgcgccatactcagacggtacctgaatctggtcatgggcctgtga

SEQ ID NO: 318623 - DNA, 552 bp, Pseudomonas aeruginosa
atgaaagcctggcgttgcctggtggtcctgagtttcctgctgttgggcggttgcctggtcaccttcaaggagccgataccgccgcgcgaggcggcgccgagccatctgctcgggacctggagccgcgagaacgagtggaaggaagaacaattcctggagatcacccgttccggcagcaatgtctaccgtgcgctcagctacgtggacagcaaggacaataccgagagcctggaagactacggcttcaccgtctcccaccagggcaagcgctggtacctgtcggccggcctgccgaagagcctgggcggcaacttcatcatcgccggcttcgagatcaccgacggtgacgagctggtgatctacaacctcgacgtcgagcgcatcgtcgaggacctcggcgccggccagctcgacggcgagaccgtcgacagcgatcagggcaagggcgcgctggtgcgcagcccgttggcgaaggtcttcgcctacctgaacgatcccgccaattccgacgtgttcgtcgaggccgcccgcttccagcgggtcacccaatga

SEQ ID NO: 318624 - DNA, 1296 bp, Pseudomonas aeruginosa
atgagccagcgcaaggcgcagaacgactaccagaagatcatccgctccctgtccgatcgcatcgtcgaggcgcagacgccgatccgcgtgctggatgcgatcaaatgggacgacgggatccgccaggacttcctcaagggccgcggcaagcatgcgccgaaggtcgatcgcggctactacgacagccgcccgctggccttcgacgccagcgccaagaagcaggaattccagaacatcgagcgcgacatcacccgccagttgggccagttcaacccggtcgggcagatcatgcggcggatgtgcaaggaataccggatggtcattcgcatgctcgaggcgcgcggcaccccggacctcgggctgatctcccaggaactctacggctcggcctcggacgccttccatgccggcgatccgaccctggccgacctcggcctgatgctctccgactacctgaacaacatcgccgaccgcggcgatctcaaggacgaacccaagaccctgaccgccaaggaggtcgtaccgatcctccaggcgcggctgaacaccgtgttcggcgaggaggagggcaccatccgcgtgttcgagtccgacggcatcgtcgccgacgcggcggccggcgccgactacatcaaggtacgcgccgacgccctgttcaacgagcgcgacgtgcgcgcgctggaggtccacgagggcctggtgcacgtcggcaccaccctgaacggcctgagccagccgatctgcaccttcctcgccaagggaccgccgtcctccaccgtgacccaggaaggcctggcgatcctgatggaggtgatcgccttcgcctcctacccgacccgcctgcgcaagctgaccaatcgcacccgggcgatccacatggccgaggagggcgccgatttcctcgacgtgttccacttctaccgcgagcaaggctacagcctggaggacagctaccagaacgccagccgggtcttccgcggctcgaccccggatggcctgccgttcaccaaggacctgtcctacctgaagggcttcatcctcatctacaactacatccagctcgccgtgcgcaagggcaagctcgaacagatccccctgctgttctgcggcaagaccaccctggaagacatgcgcaccctgcgccaactggtggacgagggcctggtggcgccgccgaagtacctgccgccgcagttccgcgacctcaacgcgctgtcggcctggatgtgcttctcgaacttcctcaaccacctcagcctggaccgcatcgaagcggactacgcgaacatcctctga

SEQ ID NO: 318625 - DNA, 747 bp, Pseudomonas aeruginosa
atggccagccacgaactcgactaccgcatcctcggcgaatccatgcagaccgtggagatcgaactcgaccccggggaaaccgtgatcgccgaggccggggcgatgaactacatgaccggcgacatccgcttcaccgcgcggatgggcgacggctccgacggcagcctgctgggcaagctgtggagcgccggcaagcgcaagctcggtggcgagtcggtgttcatgacccacttcaccaacgaaggccagggcaagcagcacgtggcctttgccgcgccctatccgggcagcgtggtggcggtggacctggacgatgtcggcgggcgcctgttctgccagaaggactcgttcctctgcgcagcctatggcacccgggtcggcatcgccttcaccaagcgcctgggcgccggtttcttcggcggcgagggcttcatcctgcagaagctcgagggcgatggcctggtcttcgtccacgccggcggcacgctgatccgccgccagttgaatggcgagacgctgcgggtcgacaccggttgcctggtggccttcaccgacggcatcgactacgacgtgcaactggccggcggcctgaagagcatgctgttcggcggcgaaggattgctgctgaccaccctcaagggcagcggcaccgtctggctgcagagcctgccgttctcgcgcctggccgggcgcatctacgacgccacctttcgcgcccgcgaagaggtaaggaccaacaacggatga

SEQ ID NO: 318626 - DNA, 906 bp, Pseudomonas aeruginosa
atgaagcgcctgctgatcccgctgctggtactcggcgcgctgttcctcggtggctgcagttcgctgctgttctatcccgagccggtggtgcagatcactccggcgcgcgccgggctggagtaccgcgacgtcaccctgaccaccgccgacggcgtgcgcctgcgcgcctggtggctgccggcgaagaaaggcgtgccggtgaaaggcactgtgctctacctgcacggcaacggcggcaacctgtcctggcacctcggcggcacctggtggctgcccgccgagggctaccaggtgctgatgctcgactatcgcggctacggccagtcggagggccagccgggactgccggaggtctaccgcgacatcgacgcggcgttcgcctggctcgaccaggcgccggaggtgaagggcaccgagcgcgtgctgctggggcagagtctcggcggcgcgctggcggtccactacctggccgagcatccgcagcgccagggccagttcaaggcgctggtgttcgacggggtaccggcgagctaccgcggcatcgcccggcacatgctggacggttcctggctgacctggccgctgcaggtgccgctgtcctggctggtgcccgacgacgacagcgccatccattcggtggcgcggctttctggcgcacccatgctgttctttcacagcatcgacgataccattgtgcccctcgagaacggcatcgccctgtaccgccaggcgcggccgccgaaggtcctgcaactgacccgaggcggccacgtgcagaccttcgccgaagcgacctggcaggaagtgatgctgcgcttcctcgacgatccccatggcttcaccggcctgcgccggctggccgaaatcccgaaccgcgaatccgcgaaacccgaaggcaatccatga

SEQ ID NO: 318627 - DNA, 324 bp, Pseudomonas aeruginosa
atgagcgaccgtaacgtactcccctgcatcctgaccggcatcggtaccatcttcgtcaccgtcggcgtgctctggtactacggctacctgcatttcgccaagccgcaggacgccctgttgctggccgacttcaccatgctgaagagcctgcccggcgaagatgtgaagctgtccctggagccggccaagcaggtcgcgcagtgcatcgatggcgtcctggtgctgttcgacaccgagcagaagggcctttccggcgtgctggtggacaacaggaagcacgccgtgcgctgcgccggacaggaagtcccgcaggaagtgaaatga

SEQ ID NO: 318628 - DNA, 522 bp, Pseudomonas aeruginosa
atgaccgaggtccgcgtctggcagggagacatcacccgtcttgcggtggatgccatcgtcaacgcggcgaactcctcgctgctcggtgggggcggtgtcgacggcgccatccaccgcgccgccggtgccgaactggtggcggcctgccgcctgctgcacggttgcaagaccggcgaggcgaagatcacccgtgggttccgtctgccggcggcccacgtgatccacaccgtcggcccggtctggcgcggcggcgacaacggcgaagcggagctgctggccagctgctaccggcgcagcctggcgctggccgagcaggccggggcggccagcgtcgcgttccccgccatcagctgcggcatctacggctatcccttggagcaggccgcggccattgccgtcgaagaggtctgccggcaacgcccggcgcacagcagcctggaggaaatcgtcctggttgccttcgatagctcgatggccgagcgctaccagcgcttgctcggcgagcggcctgtggcccgctga

SEQ ID NO: 318629 - DNA, 786 bp, Pseudomonas aeruginosa
atgcgtaagtacattgccctccccgccgtatccctgctggccctggcgctggccgcctgctccacgccgccgaacgccaacctggaacaggcccgcagcaacttctccgcgctgcagtcgcagcccgacgcgaccaaggtcgcggccctggaaaccaaggacgccggcgactggctggccaaggccgacaaggcctaccaggatggcgaagaccagcgcgacgtggaccaactggcctacctgaccaaccagcgcatcgaactggccaagcagaccatcgtcctgcgcaatgccgaggcgcagttgcagaacgcctccgcccagcgcgcccaggcccgcctcgacgcgcgcaccgcgcaactggacaagctgcgtagccaactgaatgccaagcagacctcgcgcggcaccatggtgaccttcggcgacgttctgttcgatctcgacaagtccgacctgaagcccggcgccatgcgcaacatccagcaactggccgagttcctccagcagaacccggagcgccaggtgatcgtagagggctacaccgatagcaccggttccgccaactacaaccagcgcctgtccgagcgtcgtgccgactcggtgcgcatggccctgctcagccgcggcatcagcccggaacgcgtagccacccgtggctacggcaaggaatatccggtggccagcaacggcaccagctccggccgtgccatgaaccgtcgggtggaagtcaccatttccaacgacgccaagccggtcgcgccacgctcctccgtcagcggctga

SEQ ID NO: 318630 - DNA, 405 bp, Pseudomonas aeruginosa
atggagcaaaaagcgatgagcaagcaacacaccggttccctgcgtggcctcaagctggccctgctggccgtaggcagcagcctggtcctggccggctgcgccggcaacccgccgaccgagcagttcgccgtgaccgaatccgcggtgaataacgcggtgagcgccggcggcccggaatatgccccggtcgagatgaagtccgctcaggacaagctgagccaggcgcgcatcgccatgaacgacaaggaatacgaccaggccaagcgcctggcgcagcaggccgagtgggacgcccgggtcgccgagcgcaagacccaggccgccaaggcgcagaaagccgtgaaggatgcccagcagggcgtcatggaactgcgtgaggaaggcatgcgcgatacgcagcactaa

SEQ ID NO: 318631 - DNA, 2217 bp, Pseudomonas aeruginosa
atgagccacgaacacgccgacacttgctgtcacggtcacggacatgatcatgggcaccgccacgcgcctcgcccggcggtggccgccatcggaaccctggccggcaacgccgagttgcgctggagcgacctgcgcatcgaagcgatggactgcccgaccgaggaacgcctgatccgcgacgccctcggtcgccagccggcagtggagtcgctggaattcaacctgatgcagcgcctgctgcgcgtccagcatcgcttcgacagcgtcgagccgctgcagaagctgatcgccggcctcggcatgcaagcggtgccgctggatgccggcgaaaataccgacggcccctcgcaagcgccggcgaaaccctggtggccgctggccctggccggcgcgatggcgctggcctcggagatcgtcgaatggttcggcctggcgccggactgggtggtcgccggcctcgccctgctggccatcctcggcgccggcctgccgacctaccgcaagggctggatcgccctgaagaaccgcaacctgaacatcaacgccctgatgagcatcgcagtgaccggcgccgtgctcatcggccagtggccggaagcggcgatggtcagcgtgctgttcgccatcgccgagttgatcgaggcgaagtccctggatcgcgcgcgcaacgccatccgcggcctgctgcaactggctccggaacaggccaccgtgctggtcggcggcgaatggaaggaactgccggccaagcaagtggaactggaagccaccgtgcgcgtgaagcccggcgaacgcatcgcactcgacggcgaggtgaccagcggccgctccagcgtcaaccaggcgccgatcaccggcgaaagcctgccggtggagaaggaggtcggcgagccggtgttcgccggcagcatcaacggcgagggcgcgctggagtaccgcgtcacccgccgcgccgacgacagcaccctggcccggatcatccacgccgtggaggaagcccagggttcccgcgcaccgacccagcgtttcgtcgacagtttcgcccgcgtctacaccccggtggtattcctcatcgccctcgctaccgcggtgctgccgccgctgctgttcggcggcgcctggctggactggatctaccgcgccctggtgctgctggtgatcgcctgtccctgcgcgctggtgatctccaccccggtgaccatcgtcagcggcctttccgccgcggcgcgcctgggcatcctgatcaagggcggggtgttcctcgaactcgggcgcaagctgtcctgggtcgccctcgacaagaccggcaccatcacccatggcaaaccgcaacagaccgactacctgccgatcgcggaggctgacgggacggatgcgcgcctgctcgccgccagcctggccgcgcgttccgaccacccggtatcgcgcgccgtggccaacgcagcggaagaggacggccttgccctgggcgtggtcgaggacctcgccgccttgccgggacgaggcgtcagcggacgcatcgacggcgtcctctaccacctcggcaaccatcgcctggtggaggaactgggcctctgctcgccggccctggaagagcgcctggacgccctggagcgccagggcaagacggtcatcgcgctgtgcgatccgcagcgcgtgcgggccctcttcgccgtcgccgacggggtcaaggacagcagccgcgaggcgatccgcgagctgcacgcgctggacgtgaagaccctgatgctcaccggcgacaacccgcacaccgcagccgccatcgctgcccaggtaggcatcgacgcagctcgcggcaacctcctgccggaggacaagctgcgtgaagtggaagcgcgccaggccgacggctcgcgggtcggcatggtcggcgacgggatcaacgacgcgccggccctggcccgcgccgacatcggcttcgccatgggcgcggcgggcaccgacacggccatcgagaccgccggcgtcgcgctgatggacgacgacctgcgcaagttgccgcaattcgtccggctgtcgcgcaccacccacgcgatcctggtccagaacatcaccctggccctgggcatcaaggcggtgttcctcgcccttaccctggcaggcgaaggcaccctgtggatggcggtattcgccgacatgggcgccagcctgctggtggtgttcaacggtctgcgactgttgcgcaagcgtttctaa

SEQ ID NO: 318632 - DNA, 471 bp, Pseudomonas aeruginosa
atgaagatcggtgagctggcgaagagaaccggttgcccggtggagaccatccgctactacgagcgcgaaggactgttgcccgagcccgcgcgtagcgaaggcaactatcggcaatacaccctggcgcacgtcgagcgcctgtcgttcatccgtcactgccgctcgctggacatgacccaggaggaaatccgtaccctgctggcgttgcgcgaccgtcccgaggcggattgcggcaccgccaaccggctgatcgacgagcacctgcatcacgtcgaggtgcgcatcgccgaactccaggcattgcgcgagcaactgcaggatctcggctcacgctgtacggtcgccggcaacagccaggcctgcggcatcctccgcgaactggagcagcccgcgccgctgtcgcctatccccgaggaatgcgccgaggccgggcacatgcacgttcccggcgtgcaccgccggcatggctga

SEQ ID NO: 318633 - DNA, 345 bp, Pseudomonas aeruginosa
atgaagatccgtgagcttgtccgccattgggaacacaccgccaagggccgcatggcccgcaaccactacagcatcccgctggacgtcgaaagcgccgcgcgcctcgccgcgctgcacgagatgtatccgcggcgcagcgtcgaggaactactgggcgagctggtcggcgccgccctggaagaactggaggcgagctttccctacgtgaaggggagtcaggtggtggccaccgacgaacagggcgatccgctctatgaggatgtcggccctaccccacgcttcctgtcgctctcgcgcaagtacctgcacgaactggtcgcgcaacaggacacctccagtcactga

SEQ ID NO: 318634 - DNA, 2637 bp, Pseudomonas aeruginosa
atgccggaaatcgatgcgcgcctgcgcgaggacgtccaccaactgggcgaattgctcggcgacaccatccgcgagcagtacggcccgcggttcctcgacaagatcgagctgatccgcaagggcgccaaggctgcccgccgcggttccgcggagggcgcccagcagctcaccgccaccctcgacgggctcgaggaagacgaactgctgccggtggcgcgggccttcaaccagttcctcaacctggccaatatcgccgagcaataccaccgtatccgccggcgccggccgaacgagccggaacccttcgagaacctggtgctggaagagctgctggggcgtctcaaggacgccgggcatgcccccgggcaactggctcgccagctcgccgggctggagatcgaactggtgctgaccgcccatcccaccgaggtggcgcggcgcacgctgatccagaaatacgatgcgatcaccgcgcaactggcggccaaggaccatgccgacctgctgccggaggagcgcagtcgcatccagcagcgcctgcagcggctggtggccgaggcctggcataccgacgagatccgcaaggtccggccgaccccggtggacgaggcgaaatggggcttcgcggtgatcgaacattctctctggcaggccttgccgaacgtccttcggcacgtcgacgaggtactcctgcgcagcaccggcgaacgcctgccgttgaccgccgcgccgctgcgcttcgcgtcctggatggggggcgaccgcgacggcaatcccaacgtcaccgccagcgtgacccgcgaggtcctgctgctggcgcgctggatggccgccgacctgtacctgcgcgatatcgaccgactggccgccgagctgtccatgcagcaggcctcgccgcagctgctggcgcgggtcggcgatagcgccgagccctatcgcgccctgctcaagcaattgcgcgagcgcctgcgcgtgacccgcaactggacccaccaggccctggccggcgaggtgccggccgcggagggcgtcctggagcacaaccgcgacctggtcgagccgctgcaactgtgccacgagtcgctgcacgcctgcggcatgggcgtgatcgccgatggcgcgttgctcgactgcctgcgccgcgccgccaccttcggcctgttcctggtacgcctggacgtgcgccaggactcggcccgccatgccgccgcgctgagcgagatcaccgagtacctggagctgggcagctacgacgagtgggacgagaagacccgcctggaattccttctcgaggaactgaacagccgccgccccctgctgccggcgcactaccagccttcggcggataccgccgaggtgctcgccacctgccgggcgatcgccgccgcaccaccggcgtcgctggggtcctacgtgatctcgatggccggccagccgtccgacgtgctggcggtgcaactgctgctaaaggaaagcggcgtcgactggccgatgcgcgtggtgccgctgttcgagaccctcgacgacctggacaacgccggcccctgcatggagcgcctgctgacgctgccgggctaccgttcgcggctgtccggggtgcaggaagtgatgatcggctactccgattcggccaaggacgccggtactctcacggcggcctgggcgcagtaccgggcgcaggagaaactggtggagatctgccgccagcacgaggtcgagttgctgctcttccacggccgcggcggtaccgtcggtcgcggcggcgggccggcccacgcggcgatcctgtcgcagccgccgggttcggtggccgggcgcttccgggtcaccgaacagggcgagatgatccgcttcaagttcggtctgccggacatcgccgaacagaacctcaatctctacctcgccgcagtgctggaagcgaccctgatgccgccgccggctccggagccggcctggcgcgcgcagatggaccgcctggcgaaggacgcgctgctggcctaccgcagggtggtgcgcgacgatccgcagttcgtcgagtatttccgcctggccacgcccgagcaggaactgggtcgcctgccgctgggcagccgcccggccaagcgccgcgaaggcggggtggagagcctgcgggcgattccctggatcttcgcctggacccagacgcgcctgatgctgccggcatggcttggctgggagaccgccttgctgaacgccatcgagcgtggcgagggcgcgctgctcgggcagatgcgcgagcgatggccgttcttcaccacccgcatcgacatgctggaaatggtcctggccaaggccgacgcggatatcgcgcggctctacgacgaacgtctagtgccgctcgagctgcgtccgctggggcgtcgtttacgcgacctattgtcgcaggcggtgcgcgtggtactgggactgaccgggcagtcgctgctgctcgcccacgccagcgagacccgcgagtcgatcagcgtgcgcaacagctatctagacccgctgcacctgctccaggctgagcttctggcccgttcgcggcgctgccagggcgacgcctgcggcggcctggagcaggcgctgctggtgacggtcgcgggggtcgccgccggactgcgcaacaccggatga

SEQ ID NO: 318635 - DNA, 648 bp, Pseudomonas aeruginosa
atgcgtgtgattctgctcggggcacccggtgccggcaaaggcacccaggcacggttcatcaccgagaagttcggcattccgcagatctccaccggcgacatgctgcgcgccgcagtcaaggccggcagcccgctcggccagcaggtgaaaggcgtgatggacagcggcggcctggtatccgacgacatcatcatcgccctgatcaaggaacgcatcaccgaggccgattgcgccaagggcttcctgttcgacggcttcccgcggaccatcccgcaggccgaagcgctgaaggacgccggtgtgaccatcgaccacgtggtcgagatcgccgtcgacgacgaggagatcgtgtcgcgtatcgccggtcgtcgcgtgcatccggcctccggccgcgtgtaccacaccgagcacaacccgccgaaggtcgccggcaaggacgacgttaccggcgaagagctgatccagcgcgaggacgacaaggaagagaccgtgcgtcaccgcctgtcggtctatcattcgcagaccaagccgctggtcgacttctaccagaagctgtcggccgccgaaggcaccccgaaataccacagcatcgccggcgtcggctcggtcgagcagatcaccgcgaaagtgctttcggccctgagctga

SEQ ID NO: 318636 - DNA, 681 bp, Pseudomonas aeruginosa
atgtccactctgttggccctggatacctccaccgaagcctgctccgtcgccctgctccacgaggggcgggcgctcagtcactacgaggtgatcccgcgcctgcacgcccagcgcctgctgccgatggtccgcgacctgctcgacgaggccggcgtcgccctgtccgcggtggacgccatcgccttcgggcgcggtccgggcgccttcaccggcgtgcgcatcgccatcggcgtggtccagggcctggccttcgccctgcagcgcccggtactggcggtctccgacctggcgatcctggcccagcgggcctaccgcgagcagggtgcggagtgggtcgccgcggccatcgacgcgcggatggacgaggtctactggggttgctaccagttgcaacagggcgagatgcgcctggccggcagcgaagcggtactgccgcccgagcgggtcgccgtaccgtgggacgccgctgccgcggactggttcggcgccggcaccggctggggctacgtcgagcgcatgccgcagcgcccggccgcgctggacgcgagcctgctgccgcatgccgaggacttgctcagcctggccggcttcgcctgggcgcgcggcgaaggcgtggaggcggaacaggcgctgccggtgtacctgcgcgacaacgtggcgacgccgaaaaaagcgccctga

SEQ ID NO: 318637 - DNA, 348 bp, Pseudomonas aeruginosa
atgcgtatcgacggactttcttcctcttcgttgccgctggagcgcagcgcccgaccgggctccgcggtcacgccgtatcgcgacgtgcagcgcgaggtcgaggcgcggcgcgagcagccggcgccggtttccggcagccagggcttcgagcaggcgccgcaggcgcgcaaggtccaggccagttcggcgggcggcgacagcctgccggtcagcgcccgcgacctgctggcgttccagcgcccggtaagcagccatgcggcgatggccctggccagctacaactccaccgccagcctcaacatcgacgccggcgccgaggatgtcctcggcctcgacctctacgcctga

SEQ ID NO: 318638 - DNA, 867 bp, Pseudomonas aeruginosa
gtggtttcccttccttatttcctcggttgtccatcctggaacgaggcggcctggcgcggcagcttctatccgcgcgaattgcgttccgccgactacctcggacactacggcggcatcttcaacgcggtcgagggcaataccaccttctatgcccggccttcggcggaaaccgtgcggcgctgggccgagacgatgccggcggggttccgcttctgtgccaagtttccccgcgatatcagtcacgaaggcgacctgcgcgaacggctcgaggccgccggcgacttcctcgaactgctggcgccgcttggcgaaagggtcagcccgctgtggctgcaactgtcggcggcgttcaccccgcagcgcctgggcgaactgctgtatttcctcgatgagctgagtccgcgacggattgccgtggaagtacgccacccggcgttcttcgacaaaggcgaggacgagcgcctgctcaaccgccacctgcgcgagcgtggcgtggagcgcatctgcctggattcgcgggcgctgttcagttgccgttcggacgatccggcggtgctccacgcccagtcgaagaagccgcgcctgccgatccgtccggcggccttcagcgatacgccacaggtgcgtttcatcggcggtcccgacctgccggccaacgaggtgttccttttgccctgggtcgacaaggtggccgactggatcgaggccggcctgactccatacgtattcctgcatacccccgacaatcacctggcggcccagcaggcccagcgtttccatgcgctgctgggccagcgcctgccaggcttgccggcgctacccgagccgatcccggccccggaagtggagcaactgggcctgctctga

SEQ ID NO: 318639 - DNA, 825 bp, Pseudomonas aeruginosa
atgaccagccaacgccaacgcgccgaacgtttccgcgacctgcaccaggggctcggcatgctggtcctgcccaatccctgggatgccggttcggcgaagatgctcgccagcctcggcttcgacgcccttgccaccaccagcgcaggcctggcgttctccctgggccggcgcgatgcggaaggcgcggtgagccggactgaggcgctggaaaacgcccgggcgatcgtcgccgccaccgatctgccggtcgccgccgacctggaaaacggctacggcgatgctccgcaagactgcgccacgaccatccgcctggccgccgaggccggtctggtcggtggttccatcgaggatgccagcgggcgcgccggacagcccatctatgagttctccgccgcgctggagcgggtcgctgccgcggtcgaggcggcccgtgcgttgccatttccgttcaccctctgcgcccgcgcggagaacttcctgcatggtcgcgaggatctcgacgacaccctgcggcgtctgcgcgcctacgccgatgccggcgccgatgtgctctacgcgcccggtttgaaccgccgcgaacagatcgtcgcggtgctcgaagcggtggcgccgaagccggtcaacgtgctggtcggttcgccgcgcctggagctgtcgctggacgagctggaagccctcggcgtcaagcgcgtgagcctgggctcgaatcttgcccgggtcgccttcggcgctttccatcaggcggcgcaggcgctggcgcggcgcgacctggaagcgacccgtgcggcgatgcctttcgaccgtatcaacgacctgttccgctga

SEQ ID NO: 318640 - DNA, 696 bp, Pseudomonas aeruginosa
gtgcgccgcctggcctggttgctgccattactgctgctggcgggggccgtcggcgccctgcgctaccagtggttcgatctgccggcgcgctggaatccctggctgccgctggacgtgcgcgaaccgccgaacctgctgacccgctacaagctatggcggctggccgacgaccggagcctctgcgacgccgccctggccacctcgcaactgcgctaccagcgggtagccgacgacccgccatcggctacctgcccgttgagcaacagcctgcgcgtgcgtggggcggcgctggagttgagcagcagctttctcgccagttgctcgctggcggtgagctatgcgttgttcgagcggcacgtgctgcaaccggcagccctggacatctatggccagccgctggcgcgggtcgagcatgtcggcagcttcgcctgccgcaacgtctacaaccgcgaggacggtcggcgcagccagcatgcctcggccaatgccctggacatcagcggcttccgcctggccgacgggaggcggatccgcctggccacggactgggccggcgagagcgccgacgggcgcttcctgcgccgcgtgcgggacggcgcctgcgccagtttcaatgcggtgctggggcccgactacaacgccgcccaccgggatcacttccacctcgacatgggcctatggaaggtctgccggtga

SEQ ID NO: 318641 - DNA, 786 bp, Pseudomonas aeruginosa
atgaccgattccgccgctcctcgcctgcatgtccaagccctgtccgccggttgcgccgaggctgcgcggcgctgggcggagcggctcggcctgccgctggcggcggacgacgaggcggagttcgccgtgcaggtcggcgagcagggcttgcaggtcttgcaactgggggcggactcccccggtccggtgcgggtcgatttcgtcgagggcgccagcgcccaccggcgcaagttcggcggcggcagcggacagatgatcgccaaggcggtcggcgtccagccaggcatccgtccgcgggtcctggacgccacggccggcttgggccgggatgggttcgtcctcgccagcctgggctgcgaggttaccctggtcgagcgccagccgctgatcgccgccctgctcgaggatggcctggagcgcgcccggcgcgatcccgacgtggcgccgatcgccgcgcggatgcgtctgctcggcggcaactcggcggacctgatgcgcgcctgggatggcgaggcgccgcaggtggtctacctcgacccgatgtttccccatcgcgacaagagcgcattggtgaagaaggaaatgcgtctgttccggccgctggtgggcgacgatctcgacgccccggcgctgttgcaggcggccctggccctggccagccaccgggtggtggtgaagcgcccgcgcaaggcgccgatcatcgaagggcccaagcccggctatagcctggaaggcaagtccagccgctacgacatctatccgaagaaggccctgggcaagggctga

SEQ ID NO: 318642 - DNA, 1278 bp, Pseudomonas aeruginosa
atgcagcagaccatcgattgtccgattcgccggcgcctggcgcacctgccctgggccaacgacgggcgtgccggtgtccgccactggctggagatgcagcgcgatccgctggcctggttgcagaagatgcacgtcgcgcagccggacctcgcggttgcccgcatgggcccgcagcgcctctggtgcctgttccatccgcaggcggtgcaggaattgatggtcgatcgccgcgatgacctgcaacgctggcagccggcgctgtgcatgctgaaacagtggaacgggcgcagcttcatgatgcgcgagggcgcccccgcccaggcccggcgcaaagaagtacggccgcacctggcgccgccgccggccagcgaggttcgccgcctggccgcggagtggggcgagcgggtggaggaggggcgcgaatacgacctcgacctggaaatggctgcgttcagcgtcaccctcagcggtcacgcgctgttcgacgtcgacctgcaaccgtcggcctatcggatcgccaaggcggtgcgcctgctgtcgcgggtggcattgctggaaatgagcaccggcctgccgctgggccactggttcccgagcaaactgtgcccgcgcaagcgctgggcgctgggccagttgcgcgaggcggtgggcgaggtggcggagcgctcgccgcggccgctggcggacctgcgcgatgaactctgcaccctgctcatggcgtcccaccagtccaccggcgtgaccctgacctggagcctgttgctgctggcccagcgtcccgagttgctcgcgcggctacgcgccgagctggcgcgagtgaattggacggcgatccgctcggtcgccgacctgcgcgattgcgcgctgctcagggcggtcctgcaggagtgcctgcgcctgtacccgccggcctacggcctggcgccgcggcaggtgacggcggacatcgaggtgttcggccagcggctgaagcgcggcgacgtgaccatggtctcgagctggatcacccagcgcgatccccgttggttcgaggcgccgctggagttccgtcccgagcgcttcctcgaaccggcgcgctggccgcgcggcgcctacttccccttcggcctcggcgaccgcgcctgccccggcaccgcgatggcgatgatcgatctggcggcggcgctggcctactgggtcgagcactgggacatcatgcacgacggcgacctggcgccgcgcggctggttttcgctgcgtccgcagcgagcgcgggtgcgtttccgccgtcgcgcctga

SEQ ID NO: 318643 - DNA, 639 bp, Pseudomonas aeruginosa
atgtcagaatccacctcctccgtcggtcccggccggcccaaggacccggccaaacgggaagccattctcgaggcggccaagcgcctgttcctctgcaacggctacgacggcagcagcatggaagccatcgcctcggaagccggcgtttccaagctcaccgtctacagccacttcaccgacaaggaaaccctgttcagcgaagcggtgaaggccaagtgcgccgagcagcttcccgccctgtacttccagctggccgaaggcgcgccactggaaaaggtcctgctgaatatcgcccgcggcttccaccggctgatcaacagccacgaggcgatcgccctgacccgcctgatggccgcgcaggccgggcagaaccccaagctttccgagctgttcttcgaggccgggccgaagcaggtgatcgacgagatggaacgcctcctcgagcaggcccgccgcagcggcaagctggcgttcccggacgcgcgccacgccgccgaacacttcttcatgctggtcaagggctgcgccaattaccgtctgttgatcggctgcgccgaaccgctggacgaggccgaaggcgagcggcacgtggaagaagtggtggcgctgttcctgcgcgccttcgccgcgggcggctga

SEQ ID NO: 318644 - DNA, 1104 bp, Pseudomonas aeruginosa
atgtaccgccatatcccgctcgtcgccctgtccctgttttcctccctgttcctcgccgcctgcggcaacggcacgccgccgccagccgcggcgcgtccggcgatcgtcgtccagccccagccggcgggggaggtgagccaggcctttccaggcgagatccgcgcccgccacgagccggagctggccttccgcatcggcggcaaggtcatccgccggctggtggaagtcggcgagcgggtaaagaaggaccagcccctggccgaactcgatccccaggacgtgcgcctgcaactggaggcggcgcgggcccaggtcagtgccgccgaggccaacttgcagaccgtgcgcgccgagtaccggcgctaccgcaccttgctcgaccgcaacctggtcagccattcccagttcgagaacatccagaacagctaccgcgccggcgaggcgcggctgaagcagatccgcgccgaattcaacgtcgccgacaaccaggccggctacgccgtgctgcgctcgccccaggatggcgtgatcgccagccggcgcgtcgaggtgggccaggtggtggcggccggacagacggtcttcagcctggccgccgacggcgaacgcgaggtgctgatcggcctgccggaacacagcttcgaacgtttccgcatcggccagccggtgtcggtcgaactctggtcgcaacgcgacagacgcttcgccgggcatatccgcgagctctcgcccgcggccgatccgcaatcgcgtaccttcgccgcccgggtggccttcgacgaccgcgcgactccggccgaactgggccagagcgcgcgggtctacgtcgccgccgccgaggcggtgccgttatcggttcccttgtcggcgctgaccgcagaggccggccaggcgttcgtctgggtggtcgagccgggcagctcgaccctgcgccggcaggcggtgcgcaccggtccctatgccgaggaccgggtgccggtgctcgaaggcctgaaggctggcgactgggtggtggccaccggggtccaggtgcttcgcgaagggcagcaggtgcgtccgatcgaccgggccaaccgcacggtgaaactggcggccaaggagtag

SEQ ID NO: 318645 - DNA, 3078 bp, Pseudomonas aeruginosa
atgtccttcaacctttccgcctgggcgttgcagaatcgccagatcgtcctgtacctgatgatcctgcttggcgcggtcggcgcgctgtcctacagcaagctggggcagagcgaagacccgccgttcaccttcaaggccatggtggtgcagaccaactggccgggtgccagcgccgaagaagtggcccggcaggtcaccgagcgtatcgagaagaagctgatggaaaccggcgactacgatcgcatcgtgtccttctcccgccccggcgtctcgcaggtgaccttcatggcccgcgaggacatccattccagcgagatccccgaactctggtaccagatccgcaagaagatcagcgacattcgcgccaccttgccgcaaagcatccagggcccgttcttcaacgacgagttcggcaccacctacggcaacatctatgcgctcaccggcaagggcttcgactacgcggtgatgaaggactatgccgaccgcctgcaactgcaattgcagcggatcaggaacgtcggcaaggtcgagctgatcggactgcaggacgagaagatctggatcgacctgtccaacaccaagctggccaccctcggcctgcccctggcggcggtacagaaggcgctggaggaacagaacgcggtggcctcctccgggttcttcgagaccgccagcgaccgcgtgcagttgcgcgtttccgggcgtttcgattcggtggaggagatccgcgacttccccatccgcgtcggcgaccgcaccttccgcatcggcgacgtggccgaggttcgccgcggcttcaacgatccgccggcgccgcgcatgcgcttcatgggcgaggacgccatcggcctggcggtagcgatgaagccgggcggcgacatcctggtgctgggcaaggccctggaaaccgagttcgcccgcctgcagcagtcgctgccggccggactggaactgcgcaaggtgtccgaccagccggcggcggtacgtaccggggtcggcgagttcatccgggtgctggccgaggcgctggtgatcgtcctgctggtgagcttcttctccctcggcctgcgcaccggcctggtggtggcgctgtcgatcccgctggtgctggcgatgaccttcgccgccatgcattacttcggcatcggcctgcacaagatctccctcggcgccctggtgctggcgctgggattgctggtggacgacgcgatcatcgcggtggagatgatggcggtgaagatggagcagggctacgaccgtctcaaggcggccgccttcgcctggaccagtaccgccttcccgatgctcaccggcaccctgatcaccgccgccggcttcctgccgatcgccaccgcgcagtccggcaccggcgaatacacccgctcgctgttccaggtggtgaccatcgccctggtggtctcctggttcgccgcggtggtcttcgttccctacctgggggccaagctgctgccggacctggccaggttgcacgcgcagaagcacggcggcagcgccgatggctacgatccctatgctacggccttctaccagcgcttccggcgtctggtggagtggtgcgtgcgctaccgcaagacggtgatcgtcctgaccctcgcggccttcgtcggcgcgctgctgctgttccgcctggtgccgcagcagttcttcccgccctcggcgcgcctggagctgctgctggacatcaagctggcggagggcgcctcactgcgctctaccggcgaggaagtccagcgcctggaaaaaatgctgcagggccatgacggcatcgacaactacgtggcctacgtcggcaccggctcgccccgcttctacctgccgctggaccagcaattgccggcggccagcttcgcccaggtggtggtgctggccaaggacctggagagccgcgaggcgctgcgcaagtggctgatcgagcggatgaacgaggacttcccgcacctgcgcagccgcatcagtcgcctggagaacgggccgccggtgggctatccggtgcagttccgggtttccggcgaggacatcccgcaggttcgcgaactggcgcgcaaggtcgccgacaggatgcgcgagaacccgcacgtggtgaatgtgcacctggattgggaagagccgagcaaggtggtgtacctgagcatcgaccaggagcgcgcccgtgccctgggggtgagcaccgccagcctgtcgcagttcctgcagagcgcgctgaccggctcgcacgtgagcttcttccgcgaagacaacgagctgatcgagatcctcctgcgcggcaccgagcaggagcgtcgtgacctgtcgttgctgccgagcctggcggtgccgaccgagaatggccggagcgtggcactgtcgcagattgctacgctcgaatacggcttcgaagagggcatcatctggcaccgcaaccgcctgccgacggtcaccgtgcgcgccgatatctacgacgattcgctgccggcgaccctggtcgcgcagatcgccccgaccctggaaccgatccgcgccgagctgccggacggctacctgctggaggtgggcggcacggtggaggacgcggcgaagggccagagttcggtgaacgccggcgtgccgctgttcatcgtggtggtgttgagcctgctgatggtgcagttgcgcagcttctcgcggatggcgatggtattcctcaccgcaccgctgggcctgatcggcgtgaccctgttcctgctgctgttccgccagccgttcggcttcgtggcgatgctcgggaccatcgccctggccggcatgatcatgcgcaactcggtgatcctggtggaccagatcgaacaggacatcagccatggactggatcgctggcacgccatcatcgaggctaccgtgcggcgtttccggcccatcgtgctgaccgcgctggcggcggtgctggcgatgatcccgctgtcgcgcagtgtgttcttcgggccgatggcggtggcgatcatgggcgggctgatcgtcgccaccgtgctcaccctgctgttcctgccggcgctctatgccgcctggttccgcgtgaagaaggacgaggcgcgggcctga

SEQ ID NO: 318646 - DNA, 681 bp, Pseudomonas aeruginosa
atgttccgactcactgccctctgcgccggcctgctgctctcggccaacgccctcgccctgtccctcgccgacctgtcgcagaacgacgcctccagcggcctgaaggacgccctgacccagggcgcgcagatcgccgtccgccagcttggccagccgggcggcttcaacaacaacccggacgtgcgcatcgaactgcccggcaagctgggcaaggcggcgaagctgatgaagcagttcggcatgggcgcccaggtcgaccagctcgaggcgagcatgaaccgcgccgccgaggctgccgtgccgcaggcccagggcctgctggtggaggcggtgaagaagatgaccgtggccgacgccaagggcatcctcaagggcggtgacgacgccgccaccgaatacctggacaagtccagccgcgaacagctgcgcgcgaagttcctgccgatcgtcaagcaggccaccgacgaggtcggcctggtcaagcagtacaacgccttcgccagccaggcggcgacccttggggtggtcgatgcgaagagcgccaacgtcgagggctatgtcaccgagcaggccctcgacgggctcttcgagatgatcgccaggcaggagaagagcatccgccagaacccggcggctgccgccaccggcctggccaagaaggtcttcggcgcggccaggtga

SEQ ID NO: 318647 - DNA, 399 bp, Pseudomonas aeruginosa
atgaaaaaactgccattgctgctcgccgccagcattctcgccggctgcggtacccagcaatcgacttcgaacgccagcttcgatggtgaggtcttctaccgcgagcgtatcgccctgccgccctcggcgcgcctgagcgtgagcctggaagacgtgtccctggccgacgccccctcggtgcaactggccagccagacccgcgagatcaccagccaggtgccgctggcgttccacctggagtacgacccgaagcaggtcaagccgggccacagctatgcggtgagcgcgcgcatcgagctgaacggccagttgctgttcatcaacaccacccgccactcggtgaaactcgacggcagcgacccgcagccctatcgcgtgcaggtcgaatcggcgcgctga

SEQ ID NO: 318648 - DNA, 2505 bp, Pseudomonas aeruginosa
atgccccgctaccctttccgccgctttggttttggcgccctgcgccgcctgctgtacctctgggtacgctcggaaaccatcaaccaatcggccttcaccctgaagatcgaccgcagcaagccggtgctctacgtgctgcaacagccttcggtcagcgatctcgcggtagtggataccgaatgccgcaaggccgggctgccgcgtccggtgatgccggtagcggtaggcgacgccatcgagccggcggcgttcttctacctgacgcccgaacccgactggctcggccgccaggataagcgcggcgcctcgccgaccctggtgcgcatgctcgccgcggtcggccagaacggtctcgacgacgcgcagatcattccggtcagcgtgttctggggacaatcgccggacagcgaatcgagcccctggaagctgctgttcgccgacaactgggcggtcaccgggcgcctgcgcaagctggcgcgcatcctgatcctcggacgcaagacccgtgtgcagttctccgcgccgatccacctgcgcgagctggtggaacagggcaagggccacgagcgcacgctgcgcatggtcaaccgtatcctccgggtgcacttccgcaacctgaagaccgcggtgatcggtcccgacctgtcgcaccgccgcaacctggtcaagggcctgctgcgcgcgccgctggtacgccaggcgatcagcgaggaatgcgagagcgaacggatatcccaggagaaggccgaaggcatcgcgctgcgctacgccaatgaaatcgcctcggacttctcctatccggtgatccgcttcctcgaagtcatcctcagctggttctggaacaagctgtacgaaggggtcaaggtcaaccacatcgagcgggtgcaggacgtggcccagggcaacgagatcgtctacgtgccctgccaccgcagccacatcgactacctgctgctctcctacctgctgttccgcaacggcctgaccccgccgcacatcgccgccgggatcaacctgaacatgccggtgatcggctcgatcctgcgccgcggcggggccttcttcatgcgccgcagcttcaagggcaaccagctctacaccgcggtgttcaacgagtacctgcacaccctgttctcccgcggcttctccaccgagtacttcgtcgagggcggccgttcgcgcaccgggcgcatgctccacccacgcaccggcatgctcgccatcaccctgcgcagcttcctccgtgactcgcgccggccgatcgtcttcgtgccggtctacatcggctacgagcgcgtgctggaaggccgcacctacctcggcgaactgcgcggcgcgaccaagaagaaggagtcgatcttcgacctgttcaaggtggtcggcgccctgaagcagcgttttggccaggtctgggtgaacttcggcgagccgatccatctcgaccagttcctcgaccgccaccagcccgactggcaggaccaggacctcggcccggaataccgccccgactggctgccgcagaccaccaacctgctggccaaggacgtcgcccgccacctcaacgacgcggcggcgatcaacccggtcaacctggttgccctggcgctgctctccaccagtcgccaggccctcgacgaaagcgccctggcgcgaatcctcgacctctacctggcgctgctgcgcaaggtgccctactcgcccagcgcgaccctgccggacggcgacggccaggccctgatcgaatacgtgaagagcatgaacctgctggccgagcagaaggacgcgctgggccgcatcctctatctcgacgaacagaacgcggtgctggcgacctactaccgcaacaacgtcctccacgtcttcgccctgccggcgctgatcgccagcttcttccagagcaactcgcggatcagccgcgaacagttgctgcgcttcgcccgcgcgctctatccctacctgcaggcggaactgttcatccgctggagcctggacgaactcgacgcggtgatcgaccagtggctggcggccctggtggaacaggacctgctgcgccaggagaacgacaccttcatccgcccggcgccaagctcgcggcaatatgtgctgctgatcctcctcgctcgttcggtgacccagaccctgcagcgcttctacatggccatcgccctgctgctcaacgccgggcagaacgccctgaccgccgaggaactggagaacctctgcaccgtgatggcccagcgcctgtcgatcctgcatggcctgaacgccccggagttcttcgacaagagcctgttccgccacttcatccagacccttctcgacctgcgcgtgctgcgcaaggacgaggccggcaagctgagctaccacgaactgctcggcgaactggccgaaggcgccgccaagcgcgtgctgccggcggagatccgtctgtcgatccgccaggtggcgctggagcgccccgccgaggaagccgccgccgaaagcaacgacgcggccgccaactga

SEQ ID NO: 318649 - DNA, 924 bp, Pseudomonas aeruginosa
atgatcgaaacaagaaacctcggcaaacgcttcggctcgcgggtggcggtggacgacctgtccttccaggtggagacgggggaggtactgggcttcctcggtccgaacggcgccggcaagtccaccaccatgaagatgctcaccggcttcctggcgccctgcgccggcaccgcgagcatcttcggcttcgacatccgcaaccgcacgctgcaggcgcagcggctgatcggctacctcccggaaggttcgccctgctacgcggaaatgaccgtgcagggcttcctcgatttcatcgccgagatccgtggctaccgtggtgccggcaagcgcgagcgggtcgcccgggcactggggctgctggaactggacgaggtgcgccggcagaccatcgaaaccctctccaagggcttccgccggcgtgtcggcctggcccaggcgatcctccacgaaccgcgggcgctggtgctcgacgagcccaccgacgggctcgatccgaaccagaagcaccaggtccgcgaactgatccgcggcctcgcgcaggagcgcatcgtgatcatctccacccatatcctcgaggaagtctcggcgctgtgcagccgcgccctggtgatcggcggcgggcggctgctggcggacagcacgccgctggagctggccagccgctcgcgctaccaccaggcggtgacgctctacagcgacgagcccctggatgccgtggcgctggcggtgctgccgggcgtggcgggcatcgaggagaaccccgccgaaggcagcctgaccgtcctggcgcagccgggcgcggtgatcttcccccaggtcagcgggctggtcgccgagcgcggctggcggatccgcgaactggacgtggagcgcggccggctcgacgaggtattccgcaacctgacccgggggacggaggcatga

SEQ ID NO: 318650 - DNA, 735 bp, Pseudomonas aeruginosa
atgaagcaactgccggtgatcttcaagcgcgagctggcgagttatttcgccacgccgctggcctatgtgttcatcgtgatcttcctggtcctggcgggcgtgttcaccttctacctgggcaacttctacgaacgcaaccaggccgacctggcctccttcttcgccttccatccctggctctacctgttcctggttcccgcgctggccatgcgcctgtgggcggaggagcgcaagtccggctcgatcgagctgctgatgaccctgccgctgacccgcttcgaagccgtggccggcaagttcctggccgcctgggcgttcgccggaatcgcactgctgctgaccttccccatggtgctcacggtgaactacctgggcgagccggacaacggtgcgattctcgccggctacctgggcagttggctgctggccggcggctacctggccatcggttcgtgcatgtcggccctggcgaagaaccaggtgatcgctttcatcctcgccgtggccgcctgcttcctgttcatgctcagcggctttccgctggtgctcgatgcgttcagccagtgggcgccgcagtggttgctcgatgcggtggcctcgctgagcctgctgacccgcttcgatgccgtcagcaagggcgtcatcgacctgcgcgacctgctgtatttcgtcagcctgatcgtcgcctggctggccgccacggcggtggcggtcgagctgaagaaagccgaatga

SEQ ID NO: 318651 - DNA, 1848 bp, Pseudomonas aeruginosa
atgaaacgcgtgttgtcctctggcgccgggctgttgctgatcgcgctggcgttcctggccttcaacatggtctccggcctgctgttcagcggcgcgcggctcgacctgaccgagcagaagctctacaccatcagccccggcaccaagcggatcctggccggcctcgacgagccgatcaacctgtacttcttctattcggatagcggtgcccgggaactggtgccgctgcgcaactacgccaggcgcgtcgaggaactgctgcgcgcctacgagcgcgaggcgaacggcaggattcgcctgcaggtgatcgatcccgagccgttctccgagaacgaggacaaggccaccgagttcggcctgcaaggaattcccctgcagcagggcggcgacaacctgtacttcggcctggccggcagcaacgccctggacggagtccaggtcatacccttcttcccgctcgatcaggaggagttcctcgaatacgacatcagtcgcctggtgcagaccctggcccagccgcagcggccggtggtcggcctgatgtcgtcgctgccgctcaatggcggcttcgacatggccagccggcagccgacctcgccgtggatggtcatggaggaaatccgccagcaattcgacctgcgcagcctcaagagcgatgccacggaaatcccgccggaggtctcggtgctgctgctggtgcatcccaagcagttacccgagcagacgctatacgccatcgaccagttcgtcctgcgcgggggcaagctgctggcgttcgtcgaccccttcagcgaggccgacagcggcagcgatttcgccgctacgctggatggcgacaagtcgtccgacctcgcgccgctgttcgaggcctgggggctgcggctgctgccgggcaaggtgctcggcgacggcgcctatgcgatgtccatcagtcttggccgggaccagcgtccggcccggcatccggcctggctcagcttgccgcgcgaggcgctggaccaggacgacatcgccactgccggcctggaaagcctgaccctggcgacgcccggtatcctcgaaaggctccccggagcgagcaccagcttcacccctttgctgcaaagctcgacccaggcgatgccattcgacgcctcgcgcttcggcctgctgcgcgaccccggcgatctgatgcgcgagctgcgcccgagcggccgacggcatactctcgccgcccgtatccaggggccggcgaagagtgccttcgcggagggcattgaggggcatcgggaaggcctgaaggaggcgcgcaacatcaatgtcatcgtcgtggccgataccgacctgctcagcgatcgcatgtgggtccaggtgcaggacttcttcggccagcgcgtgccgcagccctgggccgacaacggcgcgctggtggtcaacgcgctggacaacctgtcgggcaccgacgcgctgatcagcgtgcgctcccgcggccggttcagccggccgttcgtggtggtcgagcgcctgcagcgcgaggccgagacgagcttccggcagaaggaggagcagctcaagcagcgcctcgccgataccgagcagcaactcgccgccctccagcagggtgccgacccggagaaggccgtcgaactgacgcccgatcagcaggccacggtgcgccagtacatgcaggagaagctgcgcatccgcaaggagctgcgcgaggtgcagtaccagttgaacgccgatatcgacgcactgggccgcaccctgaagctggtcaatatcgccctggttccctcgttgctcacggtcggcgtgctgctcggctggctctggcggcgccggcgcatggcccggggagggcattga

SEQ ID NO: 318652 - DNA, 981 bp, Pseudomonas aeruginosa
atgcggcgcaatacgctgatcgtcctgctggcgctggtggcggcgctggccggaaccttcgcctggctgcagcgcgagcgcgcagccgaggtacctgccttgccggcggcagagcgctggctgccggaactggacaacgcgacgctgagtggcctgcacatgcagtttgccgacggttcgccggatatccgggtcgagcggcgtgcgggcgcgtgggtcctgccggccaaggccgactatccggccgaccggctacgcttgtcggcgctgctcgaggcgttggcagaggcgcgcaaggtcgaggcgaagagcgccaacccgaagaaccacgcgctgcttggcctggcggagcgtggcgaggggcaggcgctacgcctgagcctgcagcggcagtccagcgagcctctggtgctgctggtaggcaaggatgcgcagcatggcggtagcttcgtacgacgactgggcgacccgcaggcctggctgatcgacaagcgcctgccgttgccgaacaacgaactggagtggctcgaccggcggatcgccacgctgcccttcgcccgggtgcgcgaactgcaactgcgctatccgaagggcgagcgtctggatctctatcgcgacgacgccgggcagccgaacctgcaggtccggcaattgccctcagggcgcaagctggcctatgaggcagcggccaacggcgcggcgacgctgttcgccgacctgcgtttcgccgatgtagcgccgctggcgcaggtgggattcaggcaggcgccattgctcctggcgttcagcctgcggacgttttccggcgcgcgcctggatggcgagattcggcgccagggcgagcaatactggttgttgccgaagagcgtcgagggcttcgccgagggcgaggtcgccgcccatcctgactgggcctatcggatcgaagaggaccgctaccgcgccctggcccggcacctgccggagctgctggcgcgctga

SEQ ID NO: 318653 - DNA, 423 bp, Pseudomonas aeruginosa
atgaacccggttctccccgaacaggcccaggaggcactggacgccttcggtcacaccgccagttgggaacagcgtgcgcgtctgctgctgcaatggggcgagcgcctggcgccgctcgcggaacacgaacgccaggaagagcatcgcgtgcacggttgcgaaagcctggtctggctgctcggcgagcagcgcgacggccactggcgcttccgtgccgacagcgacgcgcgcctgatccgcggcctgctggcggtgctgctggcacgggtcgacggcatcgagacccgcgaactggcgcgcctggacctcaacgactggttcacctgcctgggtctttcccgccaactgtcgccctcgcgcagcaacggcctgaacgccgtgctacaacgcatgcgcgaactggccggccagaccgccggctga

SEQ ID NO: 318654 - DNA, 1206 bp, Pseudomonas aeruginosa
atgtccctgccgtctccctggcgcgccgactttccggccttttccgccttcgccgcggaaggcctgacctacctcgacagcgccgccaccacccagaagccacaggccgtactcgacgccctgaacagctactaccttggcggcgccgccaacgtccaccgcgcccaacatgtccccggcgagcgcgccacccgggccttcgaggccgcgcgcagccgcgtcgcccactggctgcacgccggcaacccggccgaggtgctgttcacccgcggtaccacagaggcgatcaacctggtggcctatggcctggagcggcatttccggcctggcgacgaactgctggtcagtgccctggaacaccatgccaacctgcttccctggcagcagttggccctgcgccgcggcctggtcctgcgcgtattgccgctggacgagcgcggggtgatcgacctggagcaggctcgccatatcatcggcgagcgtacccgcctgctggcgatcagccagttgtccaacgttctcggcacctggcaaccggtggtggagttgatccagctggcccgcgagcgcggtgcctggaccctggtggacggcgcccagggcagcgtccacggacgccacgacctgccgggcctgggctgcgacttctacgcattctccggccacaagctctacggccccgacggcatcggcgtgctctggggtcgcccacaggccctggagcaactggcgcactggcagttcggcggcgagatggtacgccacaccggcttccacgaagccagcttccatgccgctccgctcggcttcgaggcgggcaccccggcggtttccgcggcgatcggcctgggcgcgaccatcgactggctggccaccctggacgaagccgaagtcgccgcccacgaaggcgccctccacgcccgcctgctcgccggcctgctggcgcgcgacggcgtcagcctgctcggcgaaccgcaggcggcgctggccagcttctgcgtcgacggtgtgcacgtcgccgatctcgcccacctgctcggcgaacagggcatcgcggtgcgcgccggccaccattgcgcgatgccgctgctgcaacgcctcgaggtacccggcgccctgcgtgtctcgctgggcttgtacaacgatgccgacgacctggagcgcttcttcctggccctcgaccgctcactggagttgctgcgatga

SEQ ID NO: 318655 - DNA, 1035 bp, Pseudomonas aeruginosa
atgtcgcaatccctgttcagcctggccttcggcgtcggcacccagaaccgccaggaagcctggctggaagtgttctacgcgctgccgctgctcaagccttcgagcgaaatcgtcgccgccgtcgcaccgatccttggctacgcagccggcaaccaggcgctgaccttcacttcgcagcaggcctaccagttggccgacgccctgaagggtatcgacgccgctcagtcggccctgctctcgcgcctggcggaaagccagaagccgctggtcgccaccctgttggcggaagacgccgcgccgtcctccaccccggaggcctacctcaagctgcacctgctctcccaccgcctggtcaagccgcacgctgtgaacctgagcggcatcttcccgctcctgccgaacgtggcctggaccaacatcggcgcggtggacctggccgaactggccgaactgcaactggaagcgcgactgaagggcaagctgctggaagtcttctccgtcgacaagttcccgaagatgaccgactacgtggtcccggccggcgtacgcatcgccgacaccgcccgcgtgcgcctgggcgcctacatcggtgaaggcaccacggtgatgcacgaaggtttcgtcaacttcaacgccggcaccgaaggcccgggcatgatcgaaggccgcgtatccgccggcgtgttcgtcggcaaggggtcggacctgggcggcggctgctcgaccatgggcaccctttccggtggcggcaacatcgtcatcagcgtcggcgaaggctgcctgatcggcgccaacgccggcatcggcatcccgctgggcgatcgcaacatcgtcgaggccggcctgtacatcaccgccggcaccaaggtcgccctgctcgacgagcagaacgccctggtgaaagtggtcaaggcccgcgacctggccggtcagcccgacctgctgttccgccgcaactcgcagaacggtgcggtggagtgcaagaccaacaagaccgccatcgagctgaacgaagcgctgcacgcgcacaactga

SEQ ID NO: 318656 - DNA, 624 bp, Pseudomonas aeruginosa
atgagcatcgcctgggccctgttcgtacccgcctgcttcgccctcaacctggcgccggggccgaacaacctgctgtcgctgaacaacgccgcccggcacggtttcgccaccgcctcgctggccggcggcgggcgcctgctggcattcgccggcatgctcgccctggccgcctccgggctggcgctggtgctgcacacctcggcctggctgttcctggcgatcaagctgctcggcgctgcctacctgttgtggcttgcggtgcaattgtggcggaccgatgcgcagccactggcgaacgaagccagcccggcgcgtcccagcctctggcgcctggggcgccaggagttcctggtggcggcgggcaacccgaaggccatcctgattttcaccgccttcctgccgcagttcgtcgatcccggccaaccgctgggcgcccagttcgcccagctcggagcggcattcctgctgctcgaatggctggccatcgctctttattcctatgccgggctccacctcggccggctgctcgccggccagcgggcccggcgtctgttcaaccgcggttgcgccgcgctgctcggcagcgcgggactgggcctgctgctcagccgccgtccggcctga

SEQ ID NO: 318657 - DNA, 348 bp, Pseudomonas aeruginosa
atgacctacgttctctacggcatcaaagcctgcgacaccatgaagaaggctcggacctggctcgacgagcacaaggtcgcctacgacttccacgactacaaggccgtcggcatcgaccgcgaacacctgcggcgctggtgcgcggagcacggctggcagaccgtcctcaaccgcgccggcactaccttccgcaagctcgacgaagcgcagaaggccgatctcgacgaagccaaggcgatcgagctgatgctggcccagccgtcgatgatcaagcgcccggtgctggaactgggcagcaggacgctggtcggcttcaagcccgacgcctacgccgccgcgctggcctga

SEQ ID NO: 318658 - DNA, 354 bp, Pseudomonas aeruginosa
atgagttgcatcggtcgccagatagaccaattacgcctgcagataccgggcttcgcctgcaagcccggctgccacgattgctgcgggccggttaccgcctcgtcggaagagatggcccgcctgccggtgaagagcgaggccgaacacgacgccgccctggccgagtggaactgcgtccatctcggaccgaacggctgcgaggcctatgaggaacgtccgctgatctgccggctgttcggcaccacgccgaacctgccctgcccggaggggcgggggcccgaagtgccggtggcggagcaggtggagcgacaggtgcatgcgctgatcgccagcactcgccaggtgctggtgtag

SEQ ID NO: 318659 - DNA, 294 bp, Pseudomonas aeruginosa
atgaggcgcgccgagatgctgttgctgaagagcctggctgagacactgatggccgaccgggacaaccgccacgacgacttgcaggcgaccatgcggctggcgcacctgagttcgccggagatgatcctgtacatggtcaaccgggtgctcgagctcgaagagagcatcgagcggatcgccgcggttctccagaaactctctgcggacgagccgatgcccctagaggaaacgccgcccgaaccagccttcgaaccggccctgcagtcccgcgccaccgagaccgcggaaacctag

SEQ ID NO: 318660 - DNA, 360 bp, Pseudomonas aeruginosa
atgacaagcaagggacttacttccgcactgctgctcgcctcgatgttcgccgccacctccggctgcctccagcagaacgcactgacccagggctaccgcaccacccagcccgggcaacccggccaggcccaggtcgcctccgccaacaccccttgcacccccagcgccaccaatgacctgatcgctaccggtcgcagcctgctggacatcaccaccaacctgatcaagacccgcaaccagatgagcgacggcggcagcatcatgcgcgacgtcgacgacgtgcagaaggtcggcaagggccatgccgtactggacagcgtcgagagcatgaccggcggtccgcagcagccctgcggctaa

SEQ ID NO: 318661 - DNA, 1662 bp, Pseudomonas aeruginosa
atgcaaaccgtgtacaccgttctgaccctgctgctggtcgtcggcgccacccgcctggctgcccagttgctgcccttgccgctaccactgatccagatcgccgccggggccctgctggccttgccgtccctcggactgcacattgccctcgacccggagctgttcctcttcctgttcattccgccgctgctgttcgtcgacggctggcgtattcccaagcgggaagtctggcggatgcgctggccgatcctgatgatggcgttcggcctggtgttcttcaccgtggtcggcgccggctatttcatccacctgctgatcccggaaattcccctggcggcttccttcgccctcgccgccgtgctgtcgcccacggacgccctggcggtctcggcgatcacccaggggcggctgcccaagcgcctgatgcacctgctggagggcgaggcgctgatgaacgatgcctctggcctggtggcattcaagttcgccatcgccgcggcgatgaccggcgtgttctcgctggtggacgccagcctcaacttcctcctggtcgcggtcggcggcctggccatcggggtgttcctcagctggtcgctgggccgcatccgcgcctggatgatctcccgtggctgggacgacccggcgacccacgtggtactgatgctgttgctgccgttcgcctcctacatggtggcggaacacctgggcgtctccgggattctctcggcggtagcggccggcatgatgcagagctgggtcgacctgctgccgcggcagacttccacgcgcctgctcaaccgcagcgtctggtcgatgctggagttcgccttcaacggcgtggtgttcctgctgctcggcctgcagttgccggacatcatgaagtcggtggccaaccaccacggcgacctgctctggcgttcctcgctgctgctggcctacgtggcggcgatcaccgccgtgctgatgctgatccgctacggctgggtctatggctactggaagctgtcgctgcgcatcgatcgctggcgcggcaaaagcccgcccgggctgagcggcatctccctgcgccgtctctccgccctcagtgcattgagcggcgtgcgtggtgcggtgaccctggcggcggtgctgtcggtaccgatgagcctgatggatggcagcgccttcccgcagcgcgacctgatcatcttcatcgccaccagcgtgatcctgatttccctgatcggcgcgaccatcggcctgccgctgctgctgcgcgggctgccggcgagcaacaatggcgcccacgagcgcgagcggcgcgaggcctggcgcaagaccgcggaggcggcgatccgggccctggagagcgaggaactgccgcaggtggaaggcaacgatgcggcgaatacttcgcgggtcgccgaggcgcgtgcgcagatcatggccgaataccgccagtcgctggataccgcaccgaccaccgatgaggcccgcgaccaggcccaagccctggagatcgccgacaaggccttgcgcctgaaggcgttgcgcgcgcagcgcctggagctgtaccggcagcggcgtaacaacgagatcgacgacgagaccctgggcgatatcctgcgcgagctggaccagcaggaaagctggctgaccaatcgcttcgcccgctgggtgtga

SEQ ID NO: 318662 - DNA, 1209 bp, Pseudomonas aeruginosa
atgaataccgcactcgacaacctccaaccctaccccttcgagaagctccgcgccctgctcggcggcgcccggccgcccgcgacgctgaagccgatcgcactgtccatcggcgagcccaagcaccgctcgccgagcttcgtcgccgaaaccctggcggagaacctggaccaactcgcggtctacccgaccaccctcggcctgccagccctgcgcgaagccatcgcgcgctggtgcgagcggcgcttctcggtgccggccggctggctggatgcggcgcgccacgtactgccggtgaacggtacccgcgaggcgctgttcgccttcacccagaccgtggtccgccgcagcgagcccggcgaggcgcccggcctggtggtcagcccgaacccgttctaccagatctacgaaggcgcggcgctgctcgccggagccgtgccgcactacctgccctgccgcgaggaaaacggcttcaaccccgacttcgacgcggtcgacgaggcgacctggcagcgctgccagattctcttcctctgctcgccaggcaaccccaccggggccctggtaccgctggagaccctgaagaagctgatcgccctggccgaccgctacgacttcgtgatcgccgccgacgagtgctacagcgaactctacttcgacgaaaacgccccgccgcccggcctggtcaacgcttgcgccgagctgggccgcacggacttcagccgctgcgtggtgttccacagcctgtccaagcgctccaacctgcccggcctgcgctcgggcttcgtcgccggcgacgcggagatcctgaagaaattcctcctctaccgcacctaccacggctgcgccatgccggtgcagacccagttggcgagcatcgccgcctggaacgacgaggtccatgtgcgcgccaaccgcagcctctaccgcgagaaattcgacgccgtgctggcgatcctcgacggcgtgctcgacgtacagcgcccggacggcagtttctacctgtgggcacgtaccccggtggacgacaccgtattcacccgcgaactgttcgagcagcagcacgtgacggtggtgccgggttcctacctgtcgcgcgaggtggacggcgagaaccccggcgccaaccgcgtgcgcatggccctggtggcaccactggccgagtgcgtcgaagccgccgggcgcatccgcgactacctgcgggcgcgctga

SEQ ID NO: 318663 - DNA, 2703 bp, Pseudomonas aeruginosa
atgccgcaggtggatcccgaattgttcgatcgcgggcagttccaggcggaactggccttgaagtccagcccgatcgccgccttcaagaaggccatccggcaattccgcgaagtgctcgacaaccgcttcaacagcggccgcgacatccgccgcctgatcgaagatcgcgcctggtgcgtcgaccagatcctgcaacaggcctggcagcgcttcgactggggagacgacgccgacatcgccctggtcgccgtgggcggctacggccgcggcgaactccacccctactccgacgtcgacctgctgatcctcctcgacagcgaggaccaggagagcttccgcgagccgatcgaaggcttcctcaccctgctctgggacatcggcctggaagtcggccagagcgtgcgctcggtgcagcagtgcgcggaggaagcacgcgccgacctgacggtgatcaccaccctcatggaatgccgcaccatctgcggccctgacagcctgcgccagcgcatgctgcgggttaccggcagcgcgcacatgtggccgagcaaggagttcttcctggccaaacgccacgaacagcagcgccgccacgccaagtacaacgacaccgagtacaacctcgagcccaacgtcaagggctcccccggcggcctgcgcgacatccagaccatcctctggatggcccgccgccagttcggcagcctcaacctgcacgccctggtgcgcgaaggcttcctggtggaaagcgagtgcagcatgctggcttccagccaggagttcctctggcgggtccgctatgccctgcacatgctcgccgggcgcgccgaggatcgcctgctgttcgatcaccagcgcagcatcgcccgtctgttcggctacgaagacaacgacgtcaagctggcggtcgaacgcttcatgcagaagtactaccgggtggtgatggcgatctccgagctgaacgacctgatcatccagcacttcgaggaagtcatcctgccctgcgagcagccggtgcagatccaaccgctgaacagtcgcttccagttgcgcgacggctacatcgaggtgacgcacccgaacgtcttcaagcgcaccccgttcgccctcctggaaatcttcgtgctgatggcccagcacccggaaatcaagggcgtgcgcgccgacaccattcgcctgctgcgcgacagccgacacctgatcgacgacgagttccgccacgacatccgcaacaccagcctgttcatcgagctgttcaagagcagccagggtatccaccgcaacctgcggcggatgaaccgctacggcatcctcggccgctacctgccggagttcggccatatcatcgggcagatgcagcacgacctgttccatatctatacggtggacgcccacaccctcaacctgatcaagcacctgcgcaagctgaatcggccggagatggccgagaaatatccgctggcgagcaagatcatcgatcgtctgcccaagccggaactgatctacatcgccggtctctaccatgacatcgccaagggccgtggcggcgaccactcggaactcggcgcggtggacgccgaggccttctgccagagccaccagttgccgctctgggacacccaactggtgtcctggctggtgcagaaccacctggtgatgtcgaccaccgcgcaacgcaaggacctctccgacccgcaggtgatcttcgatttcgcccaactggtcggcgaccagacccacctcgactacctgtacgtgctcaccgtggccgacatcaacgccaccaacccgacgctctggaactcctggcgcgccagcctgctccggcagctctacaccgagaccaagcgcgccctgcgccgcggcctggagaacccggtggaccgcgaggagcagatccgccagacgcagaccgcggccctcgaccaactggtacgcaacggcatcgaccaggacgatgccgagcagttatggagccagctcggcgacgactacttcctgcgccacaccgccggcgacgtggcctggcacaccgaggcgatcctccagcacccggacgacggcacgccgctggtgctgatcaaggaaaccacccagcgcgagttcgagagcggttcgcagatcttcatctacgccgccgaccagcacgatttcttcgcggtcaccgtggccgccatggaccagctcaacctgagcatccaggacgcgcggatcatcacctccaccagccagttcaccctcgatacctatatcgtgctcgacgccgacggcgactccatcggcaacaacccggagcgcatcgccgagatccgcgaggggcttatcgacgcattgaagaaccccgacaactacccgaccatcatccagcgccgggtgccgcgccagctcaagcacttcgccttcgccccgcaggtgaccatctccaccgacgcgctgcgccaggtctcggtgctcgaagtcatcgcccccgaccgccccggcctgctggcgcggatcggcggcatcttcctggatttcgacctgtcggtgcagaacgccaagatcgccaccctcggcgagcgcgtggaggacgtcttctacatcaccgatgcgcgcaaccagccactcgccgaccccgacctgtgcaaacgcctgcaggccgccctggtcgagcagctgtcacaagacaacggacgggacaccctgcctacccggataaacttctga

SEQ ID NO: 318664 - DNA, 786 bp, Pseudomonas aeruginosa
atgaccgtcaccatcaagacgcccgacgatatcgagaagatgcgcatcgccggccgcctggccgccgaagtgctggaaatgatcggcgaacacatcaagcccggcgtgaccaccgaggagctggatcgcatctgccacgactatatcgtcaacgagcagaaggcgattcccgccccgctgaactacaagggctttcccaagtcgatctgcacctcgatcaaccatgtggtctgccatggcatccccaacgagaagccgctgaaggaaggcgacatcctcaacgtcgacatcaccgtcatcaaggacggctaccacggcgacaccagcaagatgttcctggtcggcaagaccccggaatgggccgaccgcctctgccagatcacccaggaatgcatgtacaagggcatttccgtggtgcgtccgggcgcgcacctgggcgatatcggcgaaatcatccagaagcacgcggaaaagaacggcttctcggtggtccgcgaatactgcggccatggcatcggcaaggtgttccacgaggagccgcaggtcctccactacggtcgtgcgggtaccggcatcgagctgaaggaaggcatgatcttcaccatcgagccgatgatcaaccagggccgcccggagacccgcctgctcggcgacggctggaccgcgatcaccaaggaccgcaagctgtccgcgcaatgggagcacaccgtgctggtcaccgccgatggctacgagatcctcaccctgcgcaacgacgaaaccttcccgcgcacctcggcagcctga

SEQ ID NO: 318665 - DNA, 741 bp, Pseudomonas aeruginosa
atgtcccaagtcaacatgcgcgatatgctgaaggccggtgtgcacttcggccaccagacccgttactggaacccgaaaatgggcaagttcattttcggcgcgcgcaacaagatccatatcatcaacctcgaaaagaccctgccgatgttcaacgaggccctgaccttcgttgagcgcctggccgctggcaagaacaagatcctgttcgtcggcaccaagcgttccgccggcaagatcgttcgcgaggaagccgctcgttgcggcatgccgtacgtcgaccatcgctggctgggcggcatgctcaccaactacaagaccatccgtcagtcgatcaagcgcctgcgcgacctggaaacccagtcccaggacggcaccttcgacaagctgaccaagaaagaagccctgatgcgcagccgtgacctcgagaagctcgagcgcagcctgggcggcatcaaggacatgggcggcctgccggacgctctgttcgtgatcgacgtcgaccacgagcgcatcgccatcaccgaagccaacaagctgggcatcccggtcatcggcgttgtcgataccaacagcagcccggaaggcgtcgactatgtaattcccggtaacgatgatgccatccgcgccgtgcaactctacctgaactcgatggccgaagcggtaatccgcggcaagcagggcgctgccaccagcgccgacgagttcgtcgaggaagcgccggccgaatccgccgaaggctga

SEQ ID NO: 318666 - DNA, 870 bp, Pseudomonas aeruginosa
atggcagaaattactgcagccatggttaaagaactgcgcgagcgtaccggcttgggcatgatggagtgcaagaaggcgctgaccgccgctggcggcgacatcgagaaggccatcgacgacatgcgcgctgccggtgcgatcaaggctgccaagaaggccggcaacattgccgccgaaggctcgatcgccgtcaagatcgctgccgacaacaaggccgccgtgatcatcgaagtcaactcccagaccgacttcctggccctccaggacgacttcaagggcttcgtcgccgagagcctggaaaaggccttcaacgagaagctgaccgacgccgctccgctggtcgaagcacgtgaggaagctcgtctggccctggtcgccaagaccggcgagaacgtcaacatccgccgcctgacccgcgtcgagggcgacgtggtcggcgcctacctgcacggccaccgcatcggtgtcgtggtcaacctgaaaggcggcaacccggaactggccaaggacatcgccatgcatgtcgccgccagcaacccgcagttcctgagcgcttcggaagtttccgaagaagcgatcgcgaaagagaaggaaatcttcctggcgctgaacgccgacaagatcgccggcaagccggagaacatcgtcgagaacatggtcaagggccgcatcagcaagttcctcgccgaagcgagcctggtcgagcagcctttcgtgaagaacccggaagtgaaggtcggcgacctggccaagcaggccggcgccgaaatcgtttccttcgttcgttacgaagtgggtgaaggcatcgagaaggccgaagtggacttcgctgccgaagttgccgctcaagtagccgccaccaagcagtaa

SEQ ID NO: 318667 - DNA, 738 bp, Pseudomonas aeruginosa
atggctcagcaactgagcgctcgtcaacctcgctataaacgcattcttctaaagttgagcggcgaagccctgatgggctcggaggagttcggcatcgatcccaaggtgctggaccgcatggcgctggaaatcggccagttggtcgggatcggcgtgcaggtcggcctggtcatcggcggcggcaacctgttccgcggcgcggccctgtccgcggccggcatggaccgggtgaccggcgaccacatggggatgctggccaccgtgatgaacggcctggcgatgcgcgatgcgctggagcgctcgaacatccccgcgctggtgatgtcggcgatctccatggtcggtgtgaccgaccactacgaccgccgcaaggccatgcgccacctcggcggtggcgaggtggtgatcttctccgccggtaccggcaacccgttcttcaccaccgactcggcggcttgcctgcgcgccatcgagatcgacgccgacgtggtccttaaggctaccaaggtcgatggcgtgtacactgccgacccgttcaaggacccgaatgccgagaagttcgagcgcctgacctatgatgaagtgctcgaccgcaagctcggcgtgatggacctgaccgccatctgcctgtgccgtgaccagaacatgccgctgcgggtgttcaacatgaacaagccgggcgcattgctgaatattgttgttggtggtgccgaaggcaccctgatcgaggagggttga

SEQ ID NO: 318668 - DNA, 558 bp, Pseudomonas aeruginosa
atgatcaacgagatcaagaaggaagcgcaggagcgcatgggcaagaccctggaagcgctgggccatgccttcgcgaagattcgtaccggtcgcgcgcatccgagcatcctggatagcgtgatggtttcctattacggggccgatacgccgctgcgccaggtcgccaacgtcaccgtggaagactcccgtaccctggccctggccgtgttcgacaagagcatgatccaggcggtcgagaaggccatcatgacctccgacctggggctcaacccggccaccgccggcaccaccatccgcgtaccgatgccggccctgaccgaggagacccgcaagggctacaccaagcaggcgcgtgccgaggccgagcaggcgcgggtttccgtgcgcaacatccgtcgcgatgcgctggcccagttgaaggacctgcagaaggaaaaggaaatcagcgaggacgaagagcgccgcgccggcgacgacgtgcagaagctgaccgacaagttcatcggtgagatcgagaaggcactggaagccaaagaagcggacctcatggctgtctga

SEQ ID NO: 318669 - DNA, 756 bp, Pseudomonas aeruginosa
atggaaaagacccggaaggatgtgtgcgtgccacgccacgtggccattatcatggacggtaacaatcgctgggcgaagaagcgtcttctgcccggcgtcgccggccacaaggccggtgtcgatgccgtcagggcggtgatcgaggtctgcgccgaggcaggggtcgaggtcctcaccctgttcgcgttctccagcgagaactggcagcgtccggcggacgaagtcagcgcgctgatggagctgtttctcgtggccctgcgccgcgaggtgcgcaagctcgacgagaacggcatccgcctgcgcatcatcggcgatcgcacgcgtttccatccggagttgcaggcggccatgcgcgaagcggaagccgccactgccggcaatacccgtttcctcctccaggtcgccgccaactacggcggccagtgggacatcgtccaggccgcacagcgcctggcgcgcgaggtccagggcgggcacctggcggcggacgatatctccgccgagctgctccagggctgcctggtgaccggcgaccagccgctgcccgacctgtgcatccgcaccggcggcgagcatcgcatcagcaatttccttctctggcagctggcctacgccgagctgtatttctccgacctgttctggcccgacttcaagcacgcggcgatgcgggctgccctggcggatttctccaagcgccagcgccgcttcggcaagaccagcgagcaagtcgaggccgaggcccgtccgtcatgctga

SEQ ID NO: 318670 - DNA, 816 bp, Pseudomonas aeruginosa
atgctgaaacaacggatcatcacggcgctggtgcttttgcccatcgcgctgggtggttttttccttctcgaaggggcgttcttcgccctgttcatcggcgcggtggtgagcctgggggcctgggaatgggcgcgcctggccggctatgaacaacagttcggccgcgttgcctacgcggcgacggtcgccgtgctgatggtcgctctctaccatctgccgcagcttgccggagccgtgctgctgctggcgctggtctggtggacgctggccaccgtgctggtgctcacctacccggaaagcgtcggctactggggcggccgctggcgccgcctgggcatgggcctgctgatcctgttgccggcctggcaggggctggtcctgctcaagcagtggccgctggccaatggcctgatcatcgccgtgatggtgctggtctggggcgcggatatcggcgcctacttctccggcaaggccttcggcaagcgcaagctggcgccgcgggtcagccccggcaagagctgggaaggcgtttacggcggcctggcggccagcctggcgatcaccctggcggtcggcctctaccgcggctggtccctcggcgcgctgctcctggccctgctcggtgcggcgctggtggtgttcgtctcgatcgtcggcgacctcaccgaaagcatgttcaagcgccagtccggaatcaaggacagcagcaacctgctgcccggccacggtggcgtgctggatcgcatcgacagcctgacggcagccatcccggtgttcgcggccctgctctgggccgccggctggggtgcgccatga

SEQ ID NO: 318671 - DNA, 1191 bp, Pseudomonas aeruginosa
atgagtcgaccgcagcggatcagcgtgctcggcgcgaccggctcgatcggcctgagcaccctggacgtcgtccagcgtcatcccgatcgttacgaagccttcgccctgactggcttcagccgcctggccgaactcgaggcgctgtgcctcaggcaccgccccgtctatgcggtggtgccggagcaggccgcggcgattgccttgcagggctcgctcgccgcggcgggtatccgcacccgggtgctgttcggcgagcaggcgttgtgcgaagtggccagcgcgcccgaagtggacatggtaatggcggccatcgtcggcgccgccgggctgccgtcgaccctggcggccgtcgaggccggcaagcgcgtactgctggccaacaaggaggcgctggtgatgtccggcgcgctgttcatgcaggcggtcaagcgcagcggcgcggtgctcctgccgatcgacagcgagcacaacgcgatcttccagtcgctgccgcgcaattatgccgatggcctggagcgggtcggcgtgcgccggatcctcttgaccgcctccggcggcccgttccgcgagacgccgctggagcaactcgcttcggtgacgccggagcaggcttgtgcgcacccgaactggtcgatggggcgtaagatttccgtcgactccgccagcatgatgaacaaggggctcgaactgatcgaggcgtgctggctgttcgacgcccagccgagccaggtcgaggtggtgatccacccgcagagcgtgatccactcgatggtggactacgtcgacggttcggtgatcgcccagctcggcaatccggacatgcgcacgccgatttcctatgccatggcctggccggagcgaatcgattccggcgtttcgccgctggatatgttcgccgtcggtcgcctggatttccagcgccccgacgagcagcgcttcccctgcctgcgcctggcgagccaggccgcggaaaccggcggcagcgccccggccatgctgaatgccgcgaacgaggtggccgtggccgcatttctcgagcggcacatccgcttcagcgacatcgcggttatcatcgaggacgtgctgaaccgcgaggcggtgaccgcagtcgaatcgctcgatcaggtcctggctgccgatcgccgcgcgcgttcggtcgccgggcaatggttgacccggcacgccggctag

SEQ ID NO: 318672 - DNA, 1353 bp, Pseudomonas aeruginosa
atgagtgcgctttacatgatcgtcggcaccctggtagccctgggtgtgctggtgacgttccacgaattcggccacttctgggtcgcgcgacgctgcggggtgaaggtcctgcgcttctccgtcggcttcggcacgccgctggtgcgctggcacgaccggcacggcaccgagttcgtggtggcggccattccgctgggcggctacgtcaagatgctcgacgagcgcgaggcggaagtaccggcccatctgctcgaacagtccttcaatcgcaagacggtccgtcagcggatcgccatcgtcgcggctggtcccatcgccaatttcctactggcgattctgttcttctgggtcatcgccctgctcggtagccagcaggtacgcccggtcatcggttccgtggcgccggagagcctggccgcccaggccggcctggaggccgggcaggagctgctggcggtggatggcgagcccgtcaccggctggaacggggtcaacctgcagctggttcgccgtctcggcgagagcggtacgctggaagtgcgggtgcaggaaaaaggctcgaatgtcgattccacccaccaggtgcgtctggatggctggctgaagggcgaggacaatcccgatcccatcgcctcgctgggcatccggccctggcggccggccttgccgccggtgctggccgaactcgaccccaaggggccggcgcaggccgccggactgaagctcggcgaccgcttgcagagcatcgatggcatcgccgtcgacgactggcagcaggtggtggacagcgtccgtgcccgtcccgggcagcgcgtccagctcaaggtgctgcgcgacggcgaagtgctggatgttgccctggagctggcggtgcgcggcgagggcaaggcccggagcggctacatgggggcgggggtcgccggtaccgaatggccggcggaaatgctccgcgaagtgagctacggaccgctggaggcggtgggtcaggcgctttcccgaacctggaccatgagcctgctaacgctcgactccataaagaaaatgttgctcggcgagctctcggtaaaaaacttgagcgggccgataaccattgctaaagtggcgggcgcttcagcccagtctggcgtgggggattttctcaatttcctggcctatctgagcattagcttgggggttctcaacctgttgccgatccctgtcctcgatggcgggcatctgctgttctatctggttgagtgggtgcgcgggcgcccattatccgaacgggtacaggcttgggggatgcagatcggcatcagtctggtcgttggcgtgatgttgctcgctctggtcaacgatctgagtcgtctgtag

SEQ ID NO: 318673 - DNA, 2394 bp, Pseudomonas aeruginosa
atgaaacgctttctgctacccgcgctgctgtcagcgctgatgatcgccgaggttcacgccgagtccttcactgtttccgatatccgggtcaatggcctgcagcgcgtgtccgccggtagcgtgttcgccgccctgccgctgaacgtcggcgagaccatcgacgaccaggccctggtccaggccacccgctccctgttcaagaccggcttcttccaggacatccagctcggccgtgatggcaacgtgctggtagtcactgtagtcgagcgcccgtcgatctccagcatcgagatcgagggcaacaaggcgatctccaaggaagacctgctcaagggcctgaaacagtccggcctggccgagggcgagatcttccagcgcgccaccctcgaaggcgtgcgcaacgagctgcaacgccagtacgtggcccagggccgctactcggccgagatcaacgcggaagtgatcccgcagccgcgcaaccgcgtcgcgctgaagatcaacatcaacgaaggcacggtcgccgcgatttcccacatcaacgtggtgggcaacaccgtcttctccgaagaagacctgaccgacctgttcgaactgaagaccaccaactggctgtcgttcttcaagaacgacgacaagtacgcccgcgaaaagctctccggcgacctcgagcgcctgcgctcctattacctggaccgcggctacatcaacatggatatcgcctccacccaggtatccatcaccccggacaagaagcacgtctacatcaccgtcaacatcaacgagggtgagaagtacaccatccgcgacgtgaagctgaccggcgacctgaaggtgccggaagaggaagtgaagcgcctgctgctggtacagaagggccaggtgttctcgcgcaaggtgatgaccaccacctccgacctgatcacccgtcgcctgggcaacgagggctacaccttcgccaacgtcaacggcgtgccggaagcccatgacgacgacaagaccgtctcggtgaccttcgtcgtcgacccgggcaagcgcgcctacgtcaaccgcatcaacttccgcggcaacaccaagaccgaagacgaagtgctgcgccgcgaaatgcgccagatggaaggcggttgggcctccacctacctgatcgaccagtccaaggcccgtctggagcgcctcggctacttcaaggaagtcaacgtcgagaccccggcggttcccggcaccgacgaccaggtcgacgtcaactacagcgtcgaagagcaaccgtccggctcgatcaccgccagcgtcggcttcgcccagagcgccggcctgatcctcggcggctcgatcagccagaacaacttcctgggtaccggcaacaaggtcagcatcggcctgacccgcagcgaataccaaacccgctacaacttcggcttcgtcgacccctactggaccgtcgacggcgtcagcctcggctacaatgccttctaccggaagaccgactacgacgaactcgacgtcgacgtcgccagctactcggtgaacagcctgggcgccggcatgagcatcggctacccgatcagcgagacctcgcgcctgacctatggcctgagcgtgcagcgcgaccagatcgacaccggccgctacaccgtggacgagatctacgacttcctcgacaaggaaggcgacaacttcaccaacttcaaggcttccatcggctggtccgaatcgaccctgaacaagggcgtactggccacccgtggtcactcgcagagcctgaccctggaaaccaccctgccgggcagcgacctgtcgttctacaagatcgactaccgtggccaggtcttcgccccgctgaccgacaactacaccatgcgcttccacaccgagctgggctatggcgacggctacggatccaccgagcgcctgccgttctacgagaactactacgccggcggcttcaactcggtgcggggcttcaaggacagcacgctgggcccgcgcagtacgccctctgtggctcgtaatccagacggtacgcctatgaagaaccaagggcctgacagcaagggtcgttacaccgacccggaccaggatcccgaagccttcggtggtaacatcctgatcaccggcggcgccgagctgctgttcccgctgccgttcgtcaaggaccagcgccagttgcgtaccgtgctgttctgggacgtgggtagcaccttcgataccgactgcccgaccaagaccaccaccaactgcgacggcatcaagaccgacaacctcgccagttccgtgggcgtcggcctgacctggatcaccgcgctgggcccgctgagcttcagcctggcgacgccgatcaagaagccggacaacgcggaaacccaggtcttccagttctccctgggccagaccttctga

SEQ ID NO: 318674 - DNA, 507 bp, Pseudomonas aeruginosa
gtgcgtaagttcacccagttcgtcctgatcaccgcagccatcatggcggctccttcggcgttcgctgaaatgaagatcgcggtgctcaactaccagatggcgctgctcgagtccgatgccgccaagcaatacgccgtggatgccgagaagaagttcggcccccagctgaacaagctgaagaacctcgagcgcgacgccaaggcgctgcaggacaagctggtttccaacggcagcaagatgtcccagggcgaccgcgagaaggccgagctggacttcaagcagaaggcccgtgacttccagttccagtccaaggaattgaacgagtcgaaggccgccgccgaccgcgacatgctgaagaaactcaagccgaagctggaccaggccgtcgaggagactatcaagaaaggtggttacgacatggtcatcgaacgtggcgccgtggtcgacgtcaagccgcaatacgacatcacccgccaggtgatcgagcggatgaaccagctgcgttga

SEQ ID NO: 318675 - DNA, 1062 bp, Pseudomonas aeruginosa
atgatgagtaccttgtcctacaccctgggccagctggccgcgcatgtcggcgcggaagtccgtggcgacgcggacctgccgatccagggcctggcgaccttgcaggaggccggaccggctcagctgagcttcctggccaacccgcagtatcgcaagtacctgcccgaaagccgtgccggcgccgtcctgctgacggctgccgacgccgacgggttcgccggtaccgcgctggtggtggccaacccctacctggcctatgccagcctgtcgcacctgttcgatcgcaaaccgaaggcggccgccggtatccatcctaccgccatcgtcgcggcggacgccgaggtcgatccgagcgccagcgtcggcgcctatgcggtgatcgagagtggcgcccgcatcggcgctggcgtcagcatcggcgcgcactgcgtgatcggagcccgtagcgtgatcggcgaaggcggctggctggcgccgcgggtcacgctctaccacgacgtcaccatcggcgcgcgggtgagtatccagtcgggcgcggtgatcggcggcgaaggtttcggtttcgccaacgagaagggcgtctggcagaagatcgcccagatcggcggggtgaccatcggtgacgacgtcgagatcggcgcgaacaccaccatcgaccgtggagcactgtccgatacgctgatcggcaacggtgtgaagctggacaaccagatcatgatcgcgcacaacgtgcagatcggcgatcataccgccatggccgcttgcgtcggcatttccggcagcgccaagatcggcaggcattgcatgctcgccggcggcgttggcctggtcggccatatcgagatctgcgacaacgttttcgtgaccggcatgaccatggtgacccgctcgatcaccgagccgggatcgtattcctccggtaccgccatgcaaccggcggccgaatggaaaaaaagcgccgcgcgcattcgtcaactggacgacatggcgcgtcgacttcagcagctggaaaaacgcctggctgccgtgacctcaagcggtgacgcttcatctgatgcgtaa

SEQ ID NO: 318676 - DNA, 441 bp, Pseudomonas aeruginosa
atgatggacatcaacgagattcgcgaatacctgcctcatcgctatcctttcctgctggtggatcgggtggtagagctggacatcgagggcaagcgcattcgcgcctacaagaatgtcagtatcaatgagccgttcttcaacggacatttccccgagcacccgatcatgccgggcgtgctgatcatcgaggcgatggcccaggcggccggtatcctcggtttcaagatgctcgacgtgaagcccgccgacggcaccctttactacttcgtcggttcggacaagctgcgcttccgccagccggtcctgccgggcgaccaactgcaactgcacgccaagttcatcagcgtgaagcgcagcatctggaaattcgactgccacgctaccgtcgacgacaagccggtatgctcggctgaaatcatctgtgcggaacgcaaactatga

SEQ ID NO: 318677 - DNA, 777 bp, Pseudomonas aeruginosa
atgagtttgatcgatcctcgcgccatcatcgatccgagcgccaggctggcggctgacgtccaggtgggcccgtggtccatcgtcggggcggaagtggagatcggtgaagggacggtgatcggtccgcacgtggtgctcaagggccccacgaagatcggcaagcacaaccgcatctaccagttttccagcgtcggcgaggatactcccgacctgaaatacaagggcgagccgacgcgcctggtgatcggtgaccacaacgtgatccgcgaaggcgtgaccatccatcgcggaaccgtccaggatcgcgcggaaaccaccattggcgaccacaacctgatcatggcctatgcgcacatcggccatgacagcgtgatcggcaaccattgcatcctggtgaacaacacggcgctggccgggcatgtccacgtggacgactgggcgatcctgtccggctacaccctggtgcaccagtactgccggatcggcgcgcacagcttttccggcatgggcagcgccatcggcaaggacgtcccggcctacgtgacggtcttcggcaacccggccgaagcccgcagcatgaacttcgaaggcatgcgtcggcgcggcttcagcagcgaggccatccatgccctgcggcgtgcctacaaggtggtctatcgccagggacataccgtcgaggaagccctggccgagctggccgaaagcgctgcccagttccccgaggtcgcggtgttccgtgattccatccagagcgcaacccgcggcatcacccgctga

SEQ ID NO: 318678 - DNA, 1137 bp, Pseudomonas aeruginosa
atggctgacggattacgcgtagccctggtcgccggcgaggcctccggcgacatcctcggggccggactgatgcaggcgctgcgggcgcggcacccggatatcgagttcatcggcgtcggtgggccgcgcatggaggccgaagggctgtccagctatttccccatggagcgcctgtcggtaatgggcctggtcgaagtgctgggcaggctgccggagttgttgcgacggcgcaagcgcctgatccgcacgctcatcgaggcccggccggatgtgatgatcggcatcgacgctcccgacttcaccctcggcgtcgaacacaagctgcgccaggctggcctgcgcaccgtgcattacgtcagcccttcggtatgggcctggcggcagaagcgggtgctgaagattcgcgaagcctgcgacctgatgctggcattgttccccttcgaagcacgtttctacgaagagcatggggtgcctgtgcgtttcgtcggccaccccctggccaacaccattcccctggaggcggatcgcgctgcggcccgcgcgcggctcggattgccggcggacggacaggtgctggcgctgatgcctggcagtcgcggcggcgaggtcggcaagctcggcgccttgttcctcgacaccgcccagcgcctgctcgtcgaacggccgggcctgcgtttcgtgctgccctgcgccagcgctgcacggcgcgaacagatcgagcagatgctccagggccgcgagcctctgccgctgacgctgctcgacggcgcttcccatgaagcgcttgccgcctgcgatgcggtgctgatcgcctccggtaccgcgaccctcgaggcgctgctctacaagcggcccatggtggtggcttatcgggtcgccgggctgacgtaccggattctcaagcgcctggtgaaaagcccgtacatctccctgccgaacctgttggccggacgcctgttggtgccggaactgatccaggacgccgccaccccgcaagcgctagccgcaaccctctcgccgctgctggacgacggctcgcagcaggtggaattcttcgatgccatccatcgggccttgcgccaggatgcctcggcacaggcggcggaagccgtcctgcaactggtggagcgccgctga

SEQ ID NO: 318679 - DNA, 606 bp, Pseudomonas aeruginosa
atgcaactgggtctggatttcaatctggtggaggatctggtcgcgggcgtcgacgaggtcggtcgcggtccgttgtgcggcccggtggtcaccgccgcggtgattctcgacccgagccgcccgatcctcggcctgaacgactcgaagaagctcagcgaagcccgccgcgaggcgctgttcgaagagatccgcgagaaggccctggcctggtgcatcgcccgcgccgaggtcgaggagatcgaccggctgaacattctgcatgccaccatgctcgccatgcagcgcgcggtcgaaggcctcagcgtgactccgcggctggccctgatcgacggcaatcgttgtccgaaactggcggtgccctgcgcgccggtggtcaagggcgacagccaggtgccggcgatcgctgcggcatcgatcctggccaaggtcagtcgcgaccgggaaatggtcgagctggaccgggtctatccgggctatggcatggccgggcacaagggatatccgaccgcggtccatctcgaggcgctttcccgcctcggcccgacgccgatccatcgacgctcgtttgcgccggttcgcgaattgctggacgtctctgttcaataa

SEQ ID NO: 318680 - DNA, 1416 bp, Pseudomonas aeruginosa
atgcaagaattcgccactcaggtcgtcgacctgctcaacggccttatctggggcaagatcctcatctggctgctggtcggttgcggcctgtacttcaccgtgcgcctggggctgatccagttccgccacttcggtcataccttcagcgtgctcaagggcagccgccagtcggacgactcgggaatctcctcgttccaggcgctctgcacctctctggcggcgcgggtcggtaccggcaacgtcgccggcgtggcggtagcgatcacgctcggcggtcccggcgcagtgttctggatgtgggcgatcgccctggtggggatggcgaccggcttcgtcgaggcgaccctggcccagttgttcaagattcgcgacgacaagggccagttccgtggcggcccggcctactacatggagaagggcctgggcgcgcgctggatgggcatcctgttctcgatcttcctgatcatcgccttcggtttcgtcttcaactcggtgcaggccaataccatcaccggtgccatgcagggcgccttcggcgtgccgacctggatcagcggcatcgccgtggtgatcctcaccgcgttgatcatcttcggcggcctgcgttccatcgcgcgcttctccgaactggcggtacccttcatggcggtggcctacctgctgctggcggtgggcatcatcctgttcaacctcagcgaactgccgggcgtcctggcgatggtggtgaagagtgccttcggctggcacgaggccgccgccggcggcatcggcgcggcgatcctcaacggcttcaagcgcggcctgttctccaacgaagcaggcatgggctcggcgcccaacgccgccgcctcggccacgccctatccgccgcacccggcgtcccagggctacgtgcagatggccggcgtgttcatcgataccctgctgatctgtaccgcttccgccgccatcatcctgctggccggaccgcaggaaggcgagggcatcatgctggtgcagaatgccctgaccagccaggtcggcgattggggccgctatttcctggcggtgatcatcctgttcttcgccttcacctcgatcgtcgccaactacttctatgccgagaactgcctggtattcctcgagcacaaccacctggcgggcctgttgatcttccgcctgatcgtgctggcgatggtgatgttcggcgcgctggcttcgctgccgttcgtctggaaccttgccgacgtgtcgatgggcctgatggcgatcaccaacctgatcgccatcctgctgctgtccaacctcgcgatcaagctggccaaggactacaacgcccagcgcaaggccggcaagctgccgaccttcgacgccagccagttcccggaagtccagcagaagctcgagccgggcatctgggacgaccgccgcgcctga

SEQ ID NO: 318681 - DNA, 3522 bp, Pseudomonas aeruginosa
atgaccgtatccttcgttcacctgcgtctgcataccgaattctccctggtcgacggcctggtccgggtcaagcccctggccaaggcagtggcagggctgggcatgccggcggtggcggtcaccgaccagagcaacatgtgctcgctggtgaagttctacaagaccgccatgggcgccggcatcaagccgatctgcggggccgacatctggctcgccagccgcgaggaagatggcccgctcagtcgcctgagcctgctggcgatgaacgcgaagggctatcgcaacctcaccgagctgatttcccgcggttggagcgaaggccagcgcaacggcgagatcatcatcgaacgcgactgggtcaaggaggcggcggaaggcctgatcgcgctgtccgcggccaaggagggcgagatcggccacgctctgctcgacggcgaggaagccaaggccgaggcgctgttgcgcgagtggatggaggtgttccccgagcgcttctacgtcgaagtgcaacgtaccagccgggtcaacgacgaggagcacctccacgcggcggtggctttggcgtcacgctgcaacgcgccgctggtggcgaccaacgacgtgcgcttcatcaagcaggaagacttcgaggcccacgagacccgcgtctgcatcggcgaggggcggaccctcgacgatccgcggcggccgcgtacctattcggaccagcaatacctgaagtcgccggcggaaatggccgagctgttcagcgacctgccggaagcgttggaaaacaccgtcgagatcgccaagcgctgcaacatcgaggtgcagctgggcaagtacttcctgccggacttccccacgcccaatggcatgggcatcgacgactacctgcggcacgcctccttcgaaggtctcgaggagcgcctggaggtgctgttgccgaaggacaccccggactacgaggccaagcgccaggtctatgtcgatcgcctgaacttcgaactcgatatcatcatccagatgggtttccccggttacttcctcatcgtgatggacttcatcaagtgggcgaagaacaacggcgtaccggtaggccccgggcggggctcgggcgccggctcgctggtggcctacgtgctgaagatcaccgacctcgatccgctggcctatgacctgctgttcgaacgtttcctcaacccggaacggatctccatgcccgacttcgacgtcgacttctgcatggagggccgcgaccgggtgatcgactacgtggccgacgcctacgggcgcaacgcggtgagccagatcatcaccttcggcaccatggcggcgaaggcggtggtacgcgacgtggcgcgggtccagggcaagtcctacggtctcgccgaccggctgtcgaagatgatcccgttcgaagtcggcatgaccctggataaggcctacgagcaggaagaaatgctccgcgacttcctcaagagcgacgaggaagccgccgagatctgggagatggccctcaagctggaaggcatcacccgcggtaccggcaagcacgccggtggcgtggtgatcgcgccgaccaagctgaccgacttctcgccgatcgcctgcgacgaggaaggcggcggcctggtgacccagttcgacaaggacgacgtggaggcggccggcctggtgaagttcgacttcctcggcctgcggaccctgaccatcatcaagtgggcgatggagatcatcaaccgcgagcaggccaagaagggcctggagccggtgaacatcgacttcatcccgctggacgacaagccgacctattcgctgctgcagaaggccgagaccactgcggtgttccagctcgaatcgcgcggcatgaaggagctgatcaagaagctcaagccggactgcctggaagacctcatcgcactggtggcgctgttccgcccgggtcctctgcagtcgggcatggtggacgacttcatcaaccgcaagcacggtcgcgccgagctgtcctatccgcaccccgattaccagtacgccggcctggagccggtgctcaagcccacctacggcatcatcctgtaccaggaacaggtgatgcagatcgcccaggtcatggccggctataccctcggtggcgcggacatgctgcgccgggcgatgggcaagaagaagcccgaggaaatggccaagcagcgcggcggtttcatcgagggttgcaagaacaacggcatcgatgccgacctcgcgggcaacatcttcgacctggtggaaaaattcgccggctacggcttcaacaagtcgcactcggcagcctacggcctggtctcctaccagaccgcctggctgaagacccacttcccggcgccgttcatggccgcggtactcaccgcggatatgcagaacaccgacaaggtggtgacgctgatcgaagaatgccggcacatgaagctgcgcatcgtggcgccggacgtgaacaactccgagttccgcttcaccgtcgacgacgatggccggatcgtctatggcctgggcgcgatcaagggcgtcggcgaggggccggtggaggcgatcaccgagtgccgcgccgaaggcgggccgttcaacaccctgttcgacttctgcgaccgcgtcgacctgaaacgcatcaacaagcgcaccctggaagcgctgatccgcgccggtgcgctggatcgcctggggccgcactaccacgacgagctaaaggcctaccaggctaccgtcgacctcaaccgcgccgtgctgctggcggcgatggaggaagcgatccaggccgccgagcagaccgcgcgcagccacgacagcgggcacatggacctgttcggcggagtcttcgccgagccggaggcggatgtctacgccaaccaccgcaaggtcaaggagctgaccctcaaggaacgcctgaagggcgagaaggacaccctcggcctgtacctgaccggccatccgatcgacgagtacgaaggcgaggtgcggcgcttcgcccgccagcgcatcgtcgagctgaagccggcgcgcgatacccagacggtggccgggctgatcgtcaacctgcgggtgatgaagaacaagaagggcgacaagatgggcttcgtcaccctcgacgaccgctccggacggatcgaggcctcgctgttctccgaagccttcgccgcggcccagtcgctgctgcagaccgacgcgctggtggtggtcgagggcgaggtcagccaggacgacttctccggcggactgcgcctgcgcgccaagcgcgtgatgagcctggaggaggcgcgtaccggcctggcggagagcctgcggatgaagctgcacgccgacctgttgaagggcgatcgcctgcgctggctgggcgagctgttcaaccgccatcgcggttcctgcccgatcaccctggactacaccagcgccgacgccaaggccctgctgcagttcggcgagagctggcgggtggatccggcggacgatctgatccaggcattgcgtgaccagttcgggcgcgacaacgtcttcctcaattatcgttaa

SEQ ID NO: 318682 - DNA, 951 bp, Pseudomonas aeruginosa
atgaacccgaactttcttgatttcgaacagccgatcgccgacctgcaagccaagatcgaagagctgcgcctggtgggcaacgacaatgcgctgaacatcagcgacgaaatctcgcgtctgcaggacaagagcaaggcgctcaccgaaaacatcttcggcaatctgtccagttggcagatcgcccagctcgcgcgccatcccaagcgtccctataccctcgactacatcggctacctgttcagcgatttcgaggaactgcacggcgaccggcatttcgccgacgacccggcgatcgtcggtggcgttgcccgcctcgacggttccccggtgatggtcatcggccaccagaaaggccgcgaagtccgtgagaaggtccggcgcaacttcggcatgccgcgtccggaaggctatcgcaaggcctgccgcctgatggaaatggccgaacgcttcaagatgccgatcctcaccttcatcgacacgcccggcgcctacccgggcatcgatgccgaggaacgcggccagagcgaggcgatcgcctggaacctgcgggtgatggcgcgactgaagacgccgatcatcgccaccgtgatcggcgagggcggttccggcggcgcgctggccatcggtgtctgcgaccagttgaacatgctgcaatactccacctattcggtgatctcgccggaaggctgcgcctccatcctctggaagaccgccgagaaggcgccggaagccgccgaggccatgggcatcaccgccgagcgcctgaaaggcctgggcatcgtcgacaaggtcatcgacgaaccgctgggcggcgcccatcgcgatccggcgagcatggccgaatcgatccgtggcgaactgctggcgcaactgaagatgctccagggcctggaaatgggtgagttgctggagcgtcgttacgaccgcctgatgagctacggcgcgccgtaa

SEQ ID NO: 318683 - DNA, 1329 bp, Pseudomonas aeruginosa
atgccggcggtgccgctcgaatcccgtctgttacaggccctggcgccctggcgcgaagcggggggctggtgcgtggcgttttccggcgggctggattccacggtgttgctgcatctgctcgcccaactggcccggagcgaagccttgccggcgctgtcggcgctgcatgtccaccatggcttgcaggctgcggcggacggttggccggcgcactgccaggtggtctgccggtcgctgggtatcccgctgcgggtcgagcgggtgcaggtcgccgttggcggcagcatcgagcaggcggcgcgcgacgcccgctatcgcgcattccaggcgaacctgggcgagggacaggtgctgctcaccgcgcagcacctcgacgaccaggccgagaccctgctgttccgcctgttgcgtggagcgggcctgcgcggcctggcggcgatgccggcgagccggccgctgggcggcggccgcctgtgccgacccttgctcggggtttcccgcgccgaactggaagcctatgcgcagacgcaccggctggactgggtggaggatccttccaaccaggatccgcgcttctcgcgcaactacctgcgccgggagatcatgccgcgtctcgcctcccactggccgcaggccgtcgccggcatggcgcgctgcgcggcgcatctgcgcgaggccgaagacctgctggctgaactggccgccatcgacctccgggcctgccgccaaccctcggaactggattggccggactggctggatctgccccggatcgccctggagcctctgcgccgcctcagcgctgcgcgccagcgcaacctgctgcgggcctggctgggacagctgacgcggttgccggacagcgaccactgggccggctgggagtcgttgcgcgatgccggcgacgatgccgacccgatctggcgcctggagagcggcgagctgcgtcgcggcgcggggcggatctggtggttgccggcggactggcgggcggcggcgggaccgttcgtctgggagcgtcccgctcatccattgcttcttcccggcaatggtcggctggcgttgctcggcgaggttccggcgggaccgttgcgcgtcgactaccggcggggtggggaggtgctggccctggccgggcgcggtcgccgcgacctcaagcgattgctcaacgaagcgggcgtaccgagcttcctacgcggtcgtttgccgctgctcttccgagccgacgaactgctcgcggtggccaacattcctggcctggacagtccccgcgaggggggctggcgactgtcctggagcccgccgacgaacgacccgggtttgagctag

SEQ ID NO: 318684 - DNA, 1629 bp, Pseudomonas aeruginosa
atgacgcgctacatcttcgtcacgggtggtgttgtttcttcattggggaaaggcatcgcttcggcttctctggctgcgatcttggaagcgcgtggcctgaagatcacgatgctcaagctggacccttacatcaacgtggacccgggcaccatgagcccgttccagcacggtgaggtcttcgtgacccaggacggcgccgagaccgacctggacctgggccattacgagcgcttcgttcgtaccaccatgacccagaacaacaacttcaccaccggccgcgtctacatggacgtgttgcgcaaggaacgccgcggcgactacctgggcgccaccgtgcaggtgatcccgcacatcaccgacgagatcaagcggcgcatcatcaagggcgccggcgatgccgacgtcgccctggtggagatcggtggcaccgtcggcgacatcgagtcgcagccgttcctcgaggcgatccgccaactgcgcgtcgagatcggcgccaagcgcgcgatgctgatgcacctgacccttgtcccgtacatcgccaccgccggcgagaccaagaccaagccgacccagcactcggtcaaggagctgcgctccatcggcctgcaaccggacgtgctggtctgccgttccgaccacccgatcgacgtctcctcgcggcgcaagatcgcgctcttcaccaacgtcgaggagcgcgcggtgatcgccctggaagacgtcgacaccatctaccgcatcccgtcggtgctgcatgcccagggcctggacgacatcgtcgtcgagcgcttcggcctggagtgcgggcaggccgacctgtccgaatgggaccgggtggtcgatgccaagctcaaccccgagcgtgaagtcaccatcgccatggtcggcaagtacatggaactgctggacgcgtacaagtcgctgatcgaggcgatgacccacgccggcatccagagccgcaccaaggtcaacctgcgctacatcgactccgaagacatcgagcagcagggcaccagcctgctggaaggcgtcgacgccatcctggtcccgggcggcttcggcctgcgcggcgtggaaggcaagatcagcaccgtgcagtacgcccgcgagaataagatcccctacctgggcatctgcctgggcatgcaggtcgcggtcatcgaatacgcccgcaacgtgctcggctggagcgacgccaactccaccgagttcgacaagtccagcggccatccggtggtcggcctgatcaccgaatggcaggacgcgaccggcgccaccgagatccgcaccgaagcttccgacctgggcggcaccatgcgcctgggcgcccaggagtgccagctgcagaccggcaccctggtgcacgactgctatgccaaggacgtgatcgtcgagcgccatcgccatcgctacgaagtgaacaacaacctgctgccgcaactggagcaggccggcctgaagatttccggccgctccggcgacggcgccctggtggaagtggtcgaggccccggagcatccgtggttcgtcgcctgccagttccacccggagttcacctccacaccgcgtgatggccacccgctgttcagcggtttcgtcaacgccgcgctgaaatattccgggaaggcctga

SEQ ID NO: 318685 - DNA, 846 bp, Pseudomonas aeruginosa
atggcacagaagatcgttcgcgtcggcgatatccagatcggcaacgacctgccgttcgtgctgttcggcggcatgaacgtgctggagtcgcgcgacctggccatgcaggtctgcgaagaatacgtacgggttaccgagaaactcggtatcccctatgtgttcaaggccagcttcgacaaggccaaccgttcctcgatccactcgttccgtggtccgggcctggaagagggaatgaagatcttcgaagagatcaagaagaccttcaaggtaccggtcatcaccgatgtccacgagccgttccaggcccagccggtggccgaggtctgcgacatcatccagctgccggccttcctctcgcgacagaccgacctggtggtggcgatggccaggaccaacgcggtgatcaatatcaagaaggcccagttcctcgcgccccaggagatgaagcacatcctgaccaagtgcgaggaagccggtaacgaccgcctgatcctctgcgagcgcggctcctccttcggttacaacaacctggtggtcgacatgctcggcttcggcatcatgaagcagttcgagtacccggtattcttcgacgtcacccacgccctgcagatgcctggcggtcgcgcggactccgccggcggccggcgcgcccaggtcaccgacctggccaaggccgggctcagccagaagctcgccgggctgttcctcgaggcccatccggaccccgagcacgccaagtgcgacggtccgtgcgcgctgcgcctgaacaaactcgaagccttcctgtcccagctcaagcaactggacgagctgatcaagagctttcctgcaatcgagactgcctag

SEQ ID NO: 318686 - DNA, 1290 bp, Pseudomonas aeruginosa
atggcaaagatcgtcgacatcaagggccgtgaggtcctggactcccgcggcaaccctaccgttgaagcggacgtgatcctggacaacggcatcgtcggcagcgcctgcgcgccttccggtgcttccaccggttcccgcgaggccctcgagctgcgcgatggcgacaagagccgttacctgggcaagggcgtgctgaaagccgtggccaacatcaacggcccgatccgcgacctgctgctgggcaaggacgcggccgaccagaaagccctcgaccacgcgatgatcgagctggacggcaccgagaacaaggccaagctgggcgccaacgcgatcctcgcggtgtccctggctgccgccaaggccgccgcacaggccaagggcgtaccgctgtacgcgcacatcgccgacctcaacggcactcccggccagtactccatgccggtgccgatgatgaacatcatcaacggcggcgagcatgcggacaacaacgtcgatatccaggaattcatggtccagccggtcggcgcgaagaacttcgccgaggcgctgcgcatgggcgccgagatcttccatcacctcaaggccgtgctgaaggcccgtggcctgaacaccgccgtcggtgacgaaggcggcttcgcgccgaacctgtcgtccaacgaagacgccctggccgccatcgccgaggccgtcgagaaggccggctacaagctgggcgacgacgtgaccctggccctggactgcgcctccagcgagttcttcaaggacggcaagtacgacctggaaggcgaaggcaaggtattcgacgccgccggtttcgccgactacctggccggcctgacccagcgctacccgatcatctccatcgaggacggcatggacgagtccgactgggccggctggaaaggcctgaccgacaagatcggcgccaaggtccaactggtcggcgacgacctgttcgtgaccaacaccaagatcctcaaggaaggcatcgagaagggcatcggcaattcgatcctgatcaagttcaaccagatcggttcgctcaccgagaccctggaggccatccagatggccaaggccgccggctataccgcggtgatctcgcaccgctccggcgaaaccgaggactcgaccatcgccgacctggccgtgggtaccgccgccggtcagatcaagaccggttcgctgtgccgctccgaccgcgtgtccaagtacaaccagttgctgcgcatcgaagagcaactgggcgccaaggcgccgtaccgtggtcgcgcggaattccgcggctga

SEQ ID NO: 318687 - DNA, 285 bp, Pseudomonas aeruginosa
ttgaggttacgtagcccttactggctgttcgtggtgctgatcctggcgctggcgggcctgcaatatcgcctgtgggtcggcgatggcagcctggcgcaggtgcgcgacctgcagaagcagatcgccgaccagcatggcgagaacgagcgcctgctggagcgcaaccggattctcgaagccgaagtcgccgagctgaagaaaggcaccgagaccgtcgaggagcgtgcgcggcacgagctcggcatggtcaaggacggcgaaaccctctaccatctcgccaagtga

SEQ ID NO: 318688 - DNA, 705 bp, Pseudomonas aeruginosa
atgacgacttccgaccttcccgccttctggacggtgatccccgccgccggcgtgggttcgcgcatgcgcgccgaccgcccgaagcaatatctcgatcttgccggtcgcaccgtgatcgagcgcaccctcgattgtttcctcgaacacccgatgctcaggggcctggtggtctgcctggccgaggacgatccctactggcccgggctggactgcgccgccagccggcatgtgcagcgcgccgccgggggcgtcgagcgcgccggctcggtgttgaacggcttgctgcgcctgctggagttgggggcacaggccgacgactgggtgctggtgcatgacgccgcgcggccgaacctgacccgcggcgacctcgaccgcctgctcgaagaactcgccgaagatccggtcggcgggctgctggcggtgccggcgagggacactctcaagcgctccgaccgcgacggccgggtcagcgaaaccatcgaccgctcggtggtctggctggcctatacgccgcagatgttccgcctcggcgccctgcaccgggcgctggccgatgcgttggtggccggcgtggcgatcaccgacgaggcttcggcgatggagtgggccggctatgcgccgaagctggtggaagggcgcgccgacaacctgaagatcaccaccccggaagacctgctgcgcctgcagcgcagttttccgcactga

SEQ ID NO: 318689 - DNA, 249 bp, Pseudomonas aeruginosa
atgagccagaccgacaaaccgaccctgtcgcttgacctgcgcggcgaacattgcccgtacaacgccatcgccaccctggaaaccctggcgaccatgcagccgggcgaacgcctggaagtggtcaccgactgctcgcaatcggtccacgggattcccgaagatacccagcgccagggctacaaatgcctggcggtggagcagcatggcgcgctgttccgcttcctcatagaggtgccgctggaaagctga

SEQ ID NO: 318690 - DNA, 1227 bp, Pseudomonas aeruginosa
atgtctgccttcaatgcgtttcgccaacgctacctggtgaggttctggtcgccgctgccggcgctggtcgccctcggcgtcgcctccgcctactacttcgcgctcaccggcaccttctgggcggtgaccggcgaattcacccgctggggcggccacgtgctgtcctggttcggctaccagccacaggactggagctacttcaggctgatcggccttcaaggcacgccgctggaccggatcgacggagtgatgatcatcggcatgttcctcggcgccctgtgctgcgccctctgggccggcaacgtcagcctgcgctggccgaccagcaaacgtcgcctgctgcagggtctggtcggcggtatcgtcgccggcttcggcgcgcgcctggcgatgggctgcaacctggcggcgttcttcaccggtatcccgatgttttccctgcacgcctgggccttcatgttcgccaccgtcggcggcgcctggatcggcgtgaagatcagcctgctgccgttcctgcgcacaccgctgaaagtcggcgccacggccagcgccctgcccagcgccgaaagcctggcccgacgcgcacgcctgcaggcccgcctgggcctggcggtgctggcgctcgccgcgctgttcgccgcctggcgcttcgaggtatcgctggtgctgggcatggcctgcctgttcggcctgctgttcggcggcctgatcgagcgcgcgcagatctgcttcaccagcgccgcacgggacctctggaccaccggccggacccgcgccgccttcggcatcctgctcggcatggcggccgcctgcatcggtaccttcgccgcgatccgcctgggcgtcgcgccgaagatcttctggatgggcccgaatgcgatcatcggcggcattctcttcggcatcggcatcgtcctcgccggcggttgcgagaccggctggatgtaccgctcgatggagggccaggtgcacttctgggtggtcggcatcggcaacgtcatcggcggaaccctggtggcgatcttttgggaccagttgggcacccgcctcgccctgccctatcccaagctcaacctgctggaaagcttcgggcccggcaacggcctgctattgaccttcgccggcctggccctgtgcctgctgctggtgcaactgaacgcctcccgattcacccgaccgcggaaaccgaaccatgagccagaccgacaaaccgaccctgtcgcttga

SEQ ID NO: 318691 - DNA, 909 bp, Pseudomonas aeruginosa
atgaatcgctgggaaggactcgacgaattcgtcgctgtcgccgaaaccgggcagttcaccgcggcagccgaacgcatgggcgtttcctcgtcgcacatcagccgccaggtcgcccgcctggaggagcgcctgcagacccgcctgctctaccgcagcacccggcgagtgtcgctgagcgaagccggacagaccttcctgcaacattgccagcgcctgcaggacgcccgcgacgaagccctgcgcgcggtcagcgacctctccgcggagcccaagggcctgctgcgcatgacctgcgcggtagcctacggcgaacgtttcatcgtgccgctggtgaatgccttcatggccgactatccgcaactgcgggtcgacatcgagctgtccaaccgccagttggacctgctccacgagggcttcgacctggccatccgcctcggccgcctgagcgattcgcgattggtcgccacacggttggcgccacgcgtcatgtacctctgcgccaccccggaatacctgcgccgccacggcactccgcagtcgccggcggaactcggccagttcaactgcctgatcggcagcagcgacctgtggagcttcctcgaggacggccgggaaacccagcaccgggtccagggcaactggcgctgcaacagcggccaggcggtgctcgacgccgccctgcgcggcttcggcctgtgccagctgcccgactactatgtgatcgagtatctgcgcagcggccgcctggtctccctgctggaaggccaccagccgccgaataccgcggtatgggcgctgtacccgcagcagcggcacctgtcgccgaaagtcaggcaactggtggactatctcaaggaaggcctggcgcaatcccatccgggactcgccggggagaaaaacctgcgctga

SEQ ID NO: 318692 - DNA, 1113 bp, Pseudomonas aeruginosa
atgatcaagtcccgtgccgccgtcgccttcgcccccaacaagccgttggaaatcgtcgaggtggatgtggcgccgccgcagaagggcgaggtactggtgcgcatcgtcgccaccggcgtctgccataccgacgcgtacaccctgtccggccaggattccgagggggtgttcccgtgcatcctgggccacgaaggtggcggcatcgtcgaagcggtgggcgagggcgtgacctccctgcaggtgggcgaccatgtcatcccgctctacaccgccgagtgcggcaagtgcaaattctgcctgtccggcaagaccaacctctgccaggccgtgcgcgccacccagggcaagggcctgatgcccgacggcaccagccgtttctcctacaagggcgagccggtcttccactacatgggctgctcgaccttctccgaatacaccgtgctgccggaaatctccctggcgaagattcccaaggatgccccgctggagaaggtctgcctgcttggctgcggcgtcaccaccgggatcggcgccgtgctgaataccgccaaggtggaagagggcgctaccgttgccatcttcggcctgggcggcatcggcctggcagcgatcatcggggcgaagatggccaaggccgcgcgcatcatcgcggtcgacatcaacccgggcaagttcgatatcgccagggaactgggcgccaccgacttcatcaatccgaaggactacgacaagccgatccaggacgtcatcgtcgaactgaccgatggcggcgtcgactactccttcgagtgcgtcggcaacgtgcagttgatgcgcgccgcgctggaatgctgccacaagggctggggcgagtcggtgatcatcggtgtcgccggtgccggccaggaaatcagcacccggccgttccaactggtcaccggccgcgtctggcgcggttcggcgttcggcggggtgcgcgggcgcagcgagctgccgagctatgtcgagaaggcgcagaagggcgagatcccgctggataccttcatcacccacaccatggggctggaggacatcaacgaggccttcgagctgatgcacgaaggcaagagcatccgcaccgtcattcattactga

SEQ ID NO: 318693 - DNA, 852 bp, Pseudomonas aeruginosa
gtgaaggattccctcgaactgatcggcagccagaagaccttcggcggctggcaccagcgttaccgtcatttttcccggaccctgaactgcgagatggtcttcgccatctacctgccgccccaggccgagccggaggcggcgctgccggccctgtactggctgtccgggctgacctgtaccgacgagaacttcatgcagaaggccggcgcccagcgggtcgccgccgaactgggattggtactggtggcgccggataccagcccgcgcggcagcggtgtccccggcgatcccgacggcgcctgggacttcggcctgggcgcaggcttctacctgaacgccacgcaggagccctgggccgcgcactaccgcatgcacgactacgtggtgcacgagttgccggcgctgatcgaggcgcatttcccggtgtcccggcggcgcggcatcagcgggcactcgatgggtgggcatggcgcgctggtttgcgcgctgcgcaacccggggcgctacctgtcgctgtcggccttcgcgccgatctgccatccgagcgattgtccctggggccagaaggcgttctcccgctacctgggcgaggacccggcggcctggcgcgagtgggatgcctgtgcgttgctcgagggtgcgtccgaacgcttgccgatcctggtcgaccagggcgagcgcgacgacttcctcgccgtccagctcaagccggaagcgctacgcaatgcggcggacaaggccggccacccgctggagctgcgtctgcaaccaggttacgaccacagctactacttcatcgccagtttcatcgaggatcacctgcgccatcatgccggggttctcaacggttga

SEQ ID NO: 318694 - DNA, 474 bp, Pseudomonas aeruginosa
atgcgaattggccatggctacgacgtgcatcgcttcggcgagggcgacttcatcaccctcggcggcgtgcgcattccccataaacatgggctggtcgcccactccgacggcgacgtgctgctgcacgccttgtccgatgcgctgctcggcgcggcggcgctgggcgacatcggcaagcacttcccggacaccgacccgcggttcaagggcgccgacagtcgcgcgctgctgcgacacgtggtcgccatcgtcgccgagaagggctggaaggtcggcaacgtcgacgccaccatcgtcgcccaggcgccgaagatggcgccgcacatcgagaccatgcgcgggttgatcgccgaggacctcggcgtcgcggtcgaccaggtcaacgtcaaggccaccactaccgagcggctaggtttcaccggacgcgaagagggcattgctgtacatgcggtcgctttgctgatggcccgatga

SEQ ID NO: 318695 - DNA, 1068 bp, Pseudomonas aeruginosa
atgagcgttctcggcgaactcgacctgctcgggccgcgcgcccatggggcagcctgcggcgaggcggtgctcaaggccgtggccgaggacttccaggtcgacgaggtgctggacattcccctcagcggtgaaggcgagcacctctggttgtgggtggaaaagcgcggattgaacaccgaggaggcggcccgtcgcctcggccgcgccgccggtgtgcagcagaagaacgtcagctgcgccgggttgaaggaccgccaggccctgacccggcaatggttcagcctgcacctgccgggcaaggccgatcccgacctgggtgcagccgagggcgcggacttgcggattcttcgctgcacccgtcattcgcgcaagttgcagcgaggcgcgcatgccgccaacggcttcaccctgcgtctgaccgggctgcgggcggagtgtgcccttctcgacgcgcgcttggaacgtatcgccgcggacggcgtgcccaattatttcggcctgcaacgcttcggccacggcggcggcaacctggtcgacgcgcgcagttgcgcggaacaggacctgctgccggcgaaccgcaacctgcgttcgcgcttcctttccgccgggcgcagctacctgttcaatcgcctgctcgccgagcgggtcgcggagggtagctggaaccgggcagcggtcggtgacctgctggccttcaccgacagccgcagctttttcctcgctggcgaggaagaatgccgcgatgcccgtctggccgccctcgacctgcaccccaccggaccgctctggggcgagggcgatccgccgagcggcgccggcgtcctcgaacgcgagctggccctggccgggagcgagccggcgctctgccgctggctggcgaaggcgggcatggcgcacgaacggcgcatcctgcggctccccatccaggggctggcgtggcattatcccgaacctgatgttctgcaactggaattcgtcctgccggccggttgtttcgccaccgtagtggtgcgtgaaatcctcgacctggtaccgacagggcagacggaaaacccatgcgcatactga

SEQ ID NO: 318696 - DNA, 750 bp, Pseudomonas aeruginosa
atgcgcatactgattgccaacgacgacggggtgaccgcacccggtatcgccgcgctttacgacgcgctggcggatcatgccgattgcgtagtgatcgcccccgaccaggacaagagcggcgccagcagttccctgacgctggaccgcccgctgcacccgcagcgcctggacaacggattcatcagcctcaacggcacgccgaccgactgcgtgcacctgggcctgaacggcttgctggaggaattgccggacatggtggtctcgggtatcaacctgggcgccaacctcggcgatgacgtcctctattccggtaccgtggcggcggccatcgaagggcgcttcctgaaggggccggccttcgccttctcgctggtctcgcggttgacggacaacctgcccaccgccatgcacttcgcccgcctgctggtctccgcccacgagcgcctggccgtgccgccgcgtaccgtgctcaacgtcaatatcccgaacctgccgctggatcgcgtacgtggtatccaactgacccgcctcgggcaccgcgcccgtgccgccgcaccggtgaaggtggtcaatccgcgcggcaaggaaggctactggatcgccgcggccggcgatgccgaggatggcgggccggggacggatttccacgcggtcatgcaaggctacgtgtcgatcaccccgttgcagctggaccgcaccttccacgaagccttcggcggcctcgacgagtggctgggaggactgacgtga

SEQ ID NO: 318697 - DNA, 669 bp, Pseudomonas aeruginosa
atgtccgaagacctgcatcgccggggtatcggcatgacctcccagcgtacccgagagcgcctgatccagcgcctgtacgaagaaggcctttccaacgcccacgtgctcgaggtgatccgccgcacgccgcgtcatctgttcgtcgacgaggcgctctcgcatcgcgcctacgaagacaccgccctgccgatcggccacaaccagaccatttcccagccgttcatggtggcgcggatgaccgagttgctgctggcggccggcccgctggacaaggtcatggagatcggcaccgggtccggctaccagaccgcggtgctggcgcaactggtcgagcgggtcttctccgtcgagcggatccaggcgttgcaggacaaggccaaggagcgtcttgcggagctaaacctgcgtaatgttgtctttcgttggggcgatggctgggagggttggtcggcgttggctccctacaatggaatcatcgtcaccgcggcggccacggaagtcccgcagtcgttgctggaccagttggcgcctggggggcgcctggtgatcccggtcggtggcggcgaggtccagcaactgatgctgatcgtccgcaccgaggacgggttcagccgccaggtactcgactcggtacgtttcgtcccgctgctcaacggcccgatcgcctga

SEQ ID NO: 318698 - DNA, 894 bp, Pseudomonas aeruginosa
atggataagggggaaggattgaggctagcagcgaccctgcggcaatggactcggctctacggtggctgccacctgctgctcggggccgtcgtctgttcccttctcgccgcctgttcgtcgtcgcctcccggcggggtcaaggtcgtcgatcgcaacggttccgcgcctgccgctgcgcggcgtacgccggtcaccagcgggcagtacatcgtgcgccgcggcgacaccctgtattccattgccttccgcttcggctgggactggaaagccctggccgcgcgcaatggcatcgcgccgccctataccatccaggtcggtcaagctatccaatttggtgggcgggcatcgacgcaaccgtccgtcgcgaaaaacacgccggtcgtcgctgcgcccgtggcgaccaagcctaccccggttccacccgcagttagtacgtcggtacctgccaagcccgcaccggctccggcctcgaccacaaccccacccagcagcggcgcgactcccgtcgtcgcggggcctgcggtgggggggtgggcatggcctgcgagcggtactctgatcggccgttttgcctcaaacggaagtttgaataaagggattgatatagccggtcaattgggccagcctgtcctggctgcgtctggtgggaccgttgtatacgccggtagtggtttgcggggctacggcgagttggtcatcatcaaacacaacgagacctacgtgagtgcctacggtcacaaccgcaggctgctggtgcgggaagggcaacaggtcaaggtagggcaatcgattgccgagatgggctccacaggaaccgatcgggtgaagctgcacttcgagattcgccgccagggtaagcctgtcgatccactgcaatatttgccacgtcgctga

SEQ ID NO: 318699 - DNA, 1005 bp, Pseudomonas aeruginosa
atggcactcaaaaaagaagggccggagtttgaccacgatgatgaagtgctcctcctggagcccggcatcatgctggacgagtcgtctgccgacgagcagccttctccccgggcaactccaaaagccaccacttccttctcttccaaacaacacaagcacatcgactacacgcgcgcgttggacgcaacgcagctgtatctcaacgaaatcggtttctcgcccctgttgacgcccgaagaggaagtccacttcgctcgtctggcgcagaagggcgatcccgctggtcggaagcggatgatcgagagcaacctgcggttggtggtgaagatcgcccggcgctatgtcaatcgcggactgtccctgctcgacctgatcgaggaaggcaacctaggcctgatccgcgccgtggagaagttcgatccggagcgcggattccggttctcgacctacgccacctggtggatccgccagaccatcgaacgggccatcatgaaccagacccggaccattcgcttgccgatccatgtggtcaaggagctcaacgtctacctgcgtgcggcgcgggaactgacccacaagctcgaccacgaaccttcccccgaagaaatcgccaacctgctggagaagccggtcgccgaggtcaagcgcatgctcggcctgaacgaacgggtgacttcggtagacgtctctcttggtccggactcggacaagaccctgctggatacgctcaccgacgatcgccccaccgatccgtgcgagctgctgcaggatgacgatctcagcgaaagcatcgaccagtggctgacggaactcaccgacaagcagcgtgaggtggtgattcgccgcttcggcttgcgcggtcacgaaagcagcacgctggaagaggtcggccaggaaatcggcctgacccgcgagcgggttcgtcagatccaggtcgaggcgctgaagcgcctgcgggagatcctggagaagaatggcctgtcgagtgacgcgctgttccagtga

SEQ ID NO: 318700 - DNA, 324 bp, Pseudomonas aeruginosa
atgaccttcgtcgtcaccgacaactgcatcaagtgcaaatacaccgactgcgtggaagtctgcccggtagactgcttctacgaaggacccaacttcctggtcatccatccggacgagtgcatcgactgcgccctgtgcgagcccgaatgtccggcccaggcgattttctccgaagacgaagtgccggagaacatgcaggaattcatcgagctgaacagcgagctggcggaagtctggccgaatatcaccgagaagaaggatgccctgcccgacgccgaggaatgggacggcgtcgccggcaagctccagcatctggagcgctga

SEQ ID NO: 318701 - DNA, 2568 bp, Pseudomonas aeruginosa
atgaccgacctctcccagcacacgccgatgatgcagcagtacttcaaactgaagcatcagcaccccgaccaattgatgttctatcgcatgggcgacttctacgagctgttctacgaggacgcgaagaaggccgccaagctgctcgacatcaccctgaccgcgcgcggccagtccggcggcaaggcgatcccgatggcaggcattcccttccattcggcggagggctacctggccaagctggtcaagctcggcgagtcggtggcgatctgcgagcagatcggcgacccggccaccagcaaggggccggtggagcgccaggtggtgcggatcatcacccccggcacggtgagcgacgaggcgctgctcgacgaacgccgcgacaacctgctggcggcgatcctcggcgacgagcgcctgttcggcctcgccgtgctggacatcaccagcggccgcttcagcgtccaggagataaaaggctgggaaaccctgctggccgaactggagcgcctcaacccggccgagctgctgattcccgacgactggccacagggcctgccggcggagaagcgccgcggcgtacgtcgccgcgcgccgtgggacttcgatcgcgactcggcgcacaagagcctctgccagcaattcggcacccaggacctgaaaggcttcggctgccagaacctgaccctggccatcggcgccgccggctgcctgctcgcctacgccaaggaaacccagcgtaccgccctgccgcacctgcgcagcctgcgccacgaccgcctcgatgacacggtgatcctcgacggcgccagccgccgcaatctggagctggatatcaacctcagcggtggccgcgagaacaccctgcaatcggtggtcgaccgctgccagaccgccatggccagccgcctgatgagccgctggctgaaccgtccgctgcgtgaccgcgcggtgctggaagcccgccaggagtccatcgcctgcctgctggaacgctaccgcttcgagaacctgcaaccgcagctcaaggaaatcggcgacctcgaacgcatcctcgcccgcatcggcctgcgcaacgcccgccctcgcgacctggcgcgcctgcgcgacgcgctggcggcgctgccggacctgcagaacgccatgaccgaactggaagcgccgcacctgcaggcgctggccaccaccatcggcacctatcccgaactcgccgaactgctggccaaggcgatcatcgacaacccgccagcggtgatccgcgacggtggcgtgatcaagaccggctatgacgccgagctggacgagctgcaggcgctgagcgaaaacgccgggcaattcctgatggacctggaagcgcgcgagaaggcccgcaccggcctgcccaacctgaaggtcggctacaaccgcatccatggctacttcatcgagctgccacgggtgcaggccgaacaggcgccggccgactacatccgccggcagaccctgaaaggcgccgagcgcttcatcacgccggaactgaaggccttcgaggacaaggcgctgtcggcccagagccgcgccctggcccgcgagaaggcgctctacgaagagctgctggaacgcctgatcggccacctcgctccgctccaggacagcgcctcggcgctggcggaactggacgtgctggcgaatctcgccgaacgcgcgctgaacctcgacctgaatcgcccacggttcgtcgaacacacctgcctgcacatcgagcagggccgccatccggtggtcgagcaggtgctggagacaccgttcgtggccaacgacctggcgctggatgccgacacccggatgctggtgatcaccggtccgaacatgggcggtaaatccacctacatgcggcaaaccgcgctgatcgtgctgcttgcgcacatcggcagcttcgttccggctgcacgctgcgagctgtccctggtggaccgcatcttcacccgcatcggctcgtccgacgaccttgccggcggccgctcgaccttcatggtggagatgagcgaaaccgccaacatcctgcacaacgccaccgacaagagcctggtgctgatggatgaggtcggccgcggcaccagcaccttcgacggcctgtcgctggcctgggcagcggccgaggacctggcccggactcgcgccttcaccctgttcgccacccactacttcgagctgaccgtactgccggaaagccagcccgcggtagccaacgtgcacctgaacgcgaccgagcacaatgaacgcatcgtgttcctgcaccatgtactgccgggaccggcgagccagagctacggcctcgcggtggcccagttggccggcgtgccggccccggtaatccagcgcgcccgcgaacacctcaagcgcctggaaaccaccagcctgccgcacgagatgccgagccagcagagcggcaagcccgcctcgccgatgcagagcgacctgttcgccagcctgccgcacccggtgatcgatgaattgtcgaggatcaatcccgacgatatcagcccgcggcaagctctcgatctgttatatgcatggaagatgcgggtctga

SEQ ID NO: 318702 - DNA, 1008 bp, Pseudomonas aeruginosa
atgaacatcgcgccactcaaggtctctctgctctccctcgccctgctcctctcccccgttgccagcctccccgcccatgcggcctgcaccgccaacctggccctgcaacccgccagcagcctgcccgcgctcggcgggcgcctggtctaccacagctatatggagtacggggacggctcctcgaacctctacctgcacgatttcaagagcaagagcacccgccagctcaaccagcccggctggaacatcgaggacccgatgaatgcgcatttctccccggacggccgctacctgaccttcatgggccgccagaatggcgcctggcacgtgttcgcctgggccatcggcggtacccaggcgccgagcaacctgaccgcggccatcggcggtcgcaacgaggatccgaagttctccttcgacggccgccaggtcgtgctcaagcacgagggcgacatccgcctcgccaccctggtcttcaatggcgatggcagcgtcggcgtgagcgcctggaaagccgtgaccggcgacggctggagcaccgaggagtcgatgccgttcctcacaccctcaggcaagtacgtggtctacgcgacaggagccggcgacagcctgcgggtggtgcgcaggaacctggagaacggccaggtcagcgccctcgccaccccggccgcggggggccgcgactattacccggtggtacgcgactacaccgcctacttcctctcgcgtacccagccggccggcaacgaccagttggccatggtcgtacccaacagcccgcccggcaccccggcgatcctgccgctcaaccactgccagggcgacaattccgatgccgcgccggtgaacgaggactacctgatcttctccagcacttcgttcgacccgacctacagcctgctcctcggcgacatcgccgcggcgcgggtctggcgtctcgacccggcgcagatcaacctgcccgacggtcggcagaagctcggcgccagctataccgcggcacgctga

SEQ ID NO: 318703 - DNA, 507 bp, Pseudomonas aeruginosa
atgaccctgatggagtccgacctgaccgcactggccgcccgcctcggcgaaagccttcgttacctgggcgagcaggtcagcacggcggaatcctgcaccggtggcggcatcgccgaggcgatcacccgcatcccggggagttcgggctggttcgaggctggctacgtgacctactcgaaccgccagaagaccctccagctggaggtgcccgagtcgctgttcccggcagtcggcgcggtcagccgggaagtggtcgaggccatggtgcgcggcgcccagcggcacagcggggcgcgtttcgcggtggcggtgagcggtgtcgccgggcccgacggcggctcgccggaaaagccggtaggcacggtctggctggcctgggccgacggcgagcggctggtcagtgagcgctgccagttcaacggcgaccgcgacgccgtgcgccggcagacggtggcgaccgcgctgaccggcctgctgcgcatgagcaacggcgagaacccgggctag

SEQ ID NO: 318704 - DNA, 1041 bp, Pseudomonas aeruginosa
atggacgagaacaagaagcgcgccctggccgcggccctgggacagatcgaacgccaattcggcaaaggcgcggtcatgcgcatgggcgaccatgagcgccaggcgatcccggccatctccaccggctccctgggtctggacatcgccctcggcatcggcggcctgcccaagggccggatcgtcgagatctacggtccggaatcctcgggcaagaccaccctgaccctctcggtgatcgccgaggcccagaaacagggcgccacctgtgccttcgtcgacgctgagcacgcgctcgatcccgactatgccggcaagctgggcgtcaacgtcgacgacctgctggtctcccagccggacaccggcgagcaggccctggaaatcaccgacatgctggtgcgctccaacgcggtcgacgtgatcatcgtcgactccgtggccgcgctggtacccaaggccgagatcgaaggcgagatgggcgacgcccacgtcggcctgcaggcacgcctgatgtcccaggcgctgcgcaagatcaccggcaatatcaagaacgccaactgcctggtcatcttcatcaaccagatccgcatgaagatcggcgtcatgttcggcaacccggaaaccaccaccggcggtaacgcactgaagttctacgcctcggtccgcctggacatccgtcgtaccggcgcggtgaaggaaggcgacgaggtggtgggtagcgaaacccgcgtcaaggtggtgaagaacaaggtttccccgccgttccgccaggccgagttccagatcctctacggcaagggcatctaccgtaccggcgagatcatcgacctgggcgtgcaattgggcctggtcgagaagtccggcgcctggtacagctaccagggcagcaagatcggccagggcaaggcgaacgccgccaagtacctggaagacaatccggaaatcggttcggtactggagaagaccattcgcgaccagttgctggccaagagcggcccggtgaaggccgacgccgaagaagtggctgacgccgaagccgattga

SEQ ID NO: 318705 - DNA, 462 bp, Pseudomonas aeruginosa
atggcgatcgtgctcgatacgcccgtcgccgtgcggcgggcggccatggatctgctggcgcgccgtgagcacgggcgcgccgagctttcccgcaagttgcgccagcgtggcgcgtctgccgagttgatcgatcctgccctcgaccgcctggccgaggaaggtctgctcgacgaatcccgctatctcgaaagcttcatcgccagtcgcgcccgtagcggccatgggccgttgcgcatccgtgaggaactggcgcaacgcggtctgccgcgcgccgatatcgaaagggcgctgggtgcctgcgaggtcgactggagtgcgcaattgcgtgaggtctggcgccgcaagttcgcccgcctgccgcaggacgccagggaaaaggcccagcagggccgcttcctggcgtaccggggttactccatggagtcgatcagccgcctgttgaacggccgcagcgacgattga

SEQ ID NO: 318706 - DNA, 1071 bp, Pseudomonas aeruginosa
atgccctacgaagccgatgactatctttcccggcacttccagaccagcggcaccgacctggcgcggaaggtcgacgaactggcggcccttgcggctcccggcgacagccccaatctcgcgctctaccgcgagatgctcttcaccgtgacgcgcatggcccaggccgaccgcaaccgctgggacgccaagatcatgctgcagaccctgcgcgagatggagcatgccttcagcgtcctcgagcagttcaagcggcgacgcaaggtcaccgtgttcggctcggcgcgcacgccagtcgaacatccggtctatgccctggcgcgcaagctgggcgaggaactggcccgctacgacctgatggtgatcaccggcgccggcggcggcatcatggccgccgcccacgaaggcgccgggctggagaacagcctgggcttcaacatcaccctgcccttcgagcagcacgccaaccatacggtggacggcagcggcaacctgctgtcgttccactttttcttcctgcgcaagctgttcttcgtcaaggaagccgacgccctggtgctctgccccggcggcttcggcaccctagacgaggcactggaagtgctgaccctggtacagaccggcaagagtccgctggtgccgatcgtgctgctcgaccagccgggcggccgctactgggaacacgccctggagttcatgcaggaacagttgctggagaatcactatatcttgccggccgacatgcgcctgatgcgcctggtgcattcggccgaagacgcggtgaaggaaatcgcccagttctaccgcaatttccactccagccgctggctgaaaggcactttcgtgattcgcctgaaccacgccctgaacgaagccgcgctggcgcacctgcacgaacacttcgccagcctctgcctgagcggcggcttccagcagcaggcctacagcgagcaggaacaggacgaaccggagttccgcaacctgacccgcctcgccttcgtgttcaacgggcgcgaccaggggcggctgcgggaattgctggactacatcaacctgccggaaaactgggactga

SEQ ID NO: 318707 - DNA, 1404 bp, Pseudomonas aeruginosa
atggcatcactgacgtttctaggcgccgcccaggaggtcactggctcctgttatctgctggaaaccctcgatggcgtgaaggtcctgctcgaatgcggcatgcgccaggggcgccgcgaagccgacaacggcaaccgcgcgcccttccccttcgatcccgcgagcatcgacgcggtggtcatctcccacgcccacctggaccacagcggcctgctgccgcgcctggcggccgagggcttcaagggcccgatcttcgccaccgaggccacctgcgaactgctggaactcatgctgctggactccgcgcacatccaggaaaaggatgccgagtgggagaaccgctggcgcaaccggatcggcaagccgagcatcaagccgctgtatacccaggccgacaccgaacgcgcgctcaagctgcgccggccgatcagcctcggcagcaccgtggcggtcgctcgtggcgtgcgggtgacctttcacaacgccgggcacatcctcggctcgtcgatcgtcgaagtgcaattccacgaccaggtgcaaccgcgccgcctggtgttttccggcgacctcggcaacacctgctcgccgttgatgcgagcgccctcgccgctgagccgggccgacgtggtgatgctcgaatccacctacggcgatcgcgatcaccgcgacagcaacgacaccctggaggaactggcggcgattctcgaccaggcgcatcgcgacggcggcaacgtgctgatcccgtcgttcgccgtcggtcgcacccaggacctgctctactacctcggccgcttctaccaggagggccgcctgccgcaacaggcggtattcctcgacagcccgatggccgcccgtgccaatggcatctacctgcgccacagcaacgagttcgacgaccgcgaccgcgagtacattcgcggcaccggcaccacccgcctggaggaatggctgccggtgctgcgcgtcacccgcagcgccgacgagtcgatggcgatcaaccggatcaagagcggcgcggtcatcatcgccggcagcggcatgtgcaccggcggccgtatcgtccatcacttcaagcacaacctctggcgcccggaatgccatgtggtattccccggcttccaggcgcgcggcaccctgggccgcaacatcgtcgacggcgccagcgcggttcgcgtgttccaccagcgcatcgcggtcaaggcgcagatccataccctcggcggcttctccgcccacgccgggcaatcgcagctgctcgactgggtcggtcacttcgcccaccgtccagcgctatacctgatacatggcgagcgggaaaagatggaagcgctgcagggcgcgatccgcgagcgtctcgactgggatgccgagataccggagcccggcgaacgcatcgagatctga

SEQ ID NO: 318708 - DNA, 2406 bp, Pseudomonas aeruginosa
atgagtcagattctgcccagtcaggacgagttgcttgcccatgcggcggccgagccggcgtttgccgcgtggctgcaaggccatggtccgctccagcatagcgcagagacccgcgccgccgtgttccgcaccgctcatcaattggtccaagccgggctgcaaccggacctggccagcgtctaccagctgttccgcgccctcgaccggctgaccgccagcgccctgcgcatcgtcgtgcacatgacctacgcccggcgcatccgcctggacggccagccgttgcaggccgaggatttcaagacacagcccgagggccacaccggcggagccctgaacatggtcccggcctacgccggctatctggcactcaacgtcctgaccggcaagactcgcgcctggctgatgggccagggccattgcgtggccgccatcgacgcgctgaacgtcctcaccggcaacctgcacccggagcaggagcgcgcctatgccgacggcgaggaggggctgaaccgcttgctgcaggacttctacggctacgcccaggcccccaacggcgcaccggcggcgccactgggcagccacgtgaatccgcataccgccggcggtatcgccgagggtggctacctcggcttcgccgaattgcagtacgcgcacatgccgttgcccggcgagaccctggtggcgttcctctccgatggcgccgccgaggaacagcgcggcagcgactggattccgcgctggtggcgagccgaggattgcggggcggcgctgccggtgatgatcgccaatggccggcgcatcgagcagcgcaccgaactgggcacccatgagggcctggagggcttcaagctgcatctgcgccgatgcggcttcgatccgatcagcttcgatgggcgcgacccggccgccttcgtctgtacgctctgggagatggagcagcgcctggagcggcgcgtgcaggagaagaacagcggcatcctccgctacccgctgccgattccctacggcatcgccgagacggtcaagggcttcggcttctatggcgccggcagtaacgccgcgcacaacctgccgctgccgggcaatccgcataacgacgaacaggcccggcaactgttcaaccagcatgcaaacgaactctgggtcgagcctgaggctctcgaattggcccgccggctgttcgccgagcagcgcggcgagcgccccctcgaacgggacaacccgctggccctgcgccatcccatcgaaccgatcatcccgccgctgcgctatcgcgacgacccctgctcgccgatggccgcgctggaccgtttctataccgagctggtggaggccaaccccgacctgcgcgcccgtgtcggcaatcccgacgaattggccagcaaccgcctcggcggcgtgctcaaggcgctcaagcatcgggtcagcgagccggagagcgaactggaatcggtgagcggtcgggtcatcaccgcgctcaacgaggaggcggtggtgtccgcctgcctggccaaccagggcggactcaacctggttgccagctacgaggcgttctgcgtgaagatgctcggcgcggtgcgccagaccctgatcttcgcccgccagcagaaggaagtcgggcgtccggccggctggctgggctggccgctggtcgctacttcgcatacctgggagaacggcaagaaccagcagtcgcaccaggacaccaccttctgcgaggccctgcttggcgagatgagcgacatggtccgggtgctcttcccggccgatcacaacagcgccctggcgctgctaccgacgatctaccgcagccgggggcaactggcctgcctggtgatccccaagcgcgaccggccgatggtgttcgacgccgtccaggccgagcgcctggcccgcgacggcgcgatcctggtcgaggagcgctgcggctccgatccgctgctgctgatcgccaacggcagctaccagctcgaacagatgcgccgcgccgcgcagcgcctggccgaggccgggcaggcctaccggctggtctacctgcaggagccgggacgcttccgcgcgccgcgcgatcgctgggaggtcgaggcggtggccgacgaggcgctggtggaacgactgttcccggatagccatgagcgccgcgtgctactcacccatatgcgcgcggaagtggcgcgcggtcatctttggccgatcctgccggatgcccggcgcacctcggtactcggctatcgcaaccgcggcggcaccctcgacgaggcgggcatgcagttcgccaaccgcgcctgctggggcaacgtgctggcggcttgcgcccgcttgatggaggtcccgcgcaccgcgctgctgaccccggaggaagcggcggcggtggccggcaagggcgatccggcgttgttgcgctga

SEQ ID NO: 318709 - DNA, 222 bp, Pseudomonas aeruginosa
atgctggacaagcagcatctgctgaagatcgccaggacgccgatgccgttcggcaagtaccagggacggatgctggtcgacctgccggaggagtacctgctgtggttctacaagaaaggcttcccgcctggtgaactcgggcggctgatgcagttgaccctggaactgaagatcgacgggctggacgggctgctcaagccgcttcgtccccccgctccgtag

SEQ ID NO: 318710 - DNA, 411 bp, Pseudomonas aeruginosa
atgtcgcgcttcatggcccttgccctttgtttcgtcctgcccaccgccgcccatgccgcctcgctcaaggatttcgaactgagcaagatgctggagaaagtggccaaggaaagcagcgtaggcactccccgcgccatcaacgaagacatcctcgaccagggctacaccgtcgaaggcaaccagttgatcaatcacctcagcgtacgcgccagccacgccgagcgcatgcgctccaacccggacagcgtgcgcagccagctcggcgatagcgtgtgcagcaacaccggctatcgccagttgctcgcccgcggcgcgatcctcacctacagcttcaccgagtacaagaccaaccagccggtcgccaccgaacgcttcgatgccggcagctgccgcatccagggcaagaagtaa

SEQ ID NO: 318711 - DNA, 1062 bp, Pseudomonas aeruginosa
atgaaaaagctgttgctcgtcgcaaccctcatggcaggagccgcccaggccaccgccgccgagaagctgtatctgttcaactggaacgactacatcgccgaggacacgctgaaacgcttcgagcagcaatgtggctgcgagctggtgcaggagttctattccggcaccgaggaaatgatggccaagctggccgccggggccagcggctacgacgtgatcatcccgacccagaacgcggtcgaggcgctgatccgcaagggcgacctgctggagctggacaagagtcgcctggcgaacctgagcaacgaggccgcgggctacctcgacaaggatttcgacaagggcaaccgctattccctgccctacgccttcaccaccaccctggtcggctacaacaagaccgagctggacaagctgggcatcgaccccgccgactggtcggtgatcttcgacccggcggtcctggagaagatcaagggcagggtcacggtgatggacgacccgcaggaactgttcggcgccgccctgaagtacctcggtcactccgccaacgacaccgacccgcagcactggaaggaagcccaggcgctgatcctcgcggccaagccgtactgggccgcgttcaactcgtcgagctatatcaaggagctgaccctgggcaacatctgggtcgcccatggctactccagcgacatgtaccaggccagggccgacgcggaggctgccggccgcgccttcaaggtcgacttcgccctgccccgccaaggtgcggtgctggccatcgacaacatggtgatccacaagggctcgaagaaccctgacctggcctaccgcttcatcgacttcatgctcgacggtcggaacgcttccgagctgaccaaccagatcggtaccggcacgcccaacgccgccgccctgcccttcatcaagccggaaatcaagacgctcgccgccctgttcccggacgccaccacccaggccaggctggagccgctgaaggacctgaactcgcgccagcgacgcgccctgaacaagctctggacagagatcaagctgcgctga

SEQ ID NO: 318712 - DNA, 771 bp, Pseudomonas aeruginosa
atgcgtaggccctacctgctctggagcgccaccgcgctggtgtacctgttcctctacgtaccgctggtgatcgtggtgctgtactccttcaacgactcgcggctgaacgccgagtgggtgggcttcaccctggactggtaccgcaagctgttcggcaaccgcgacatgctccaggccgccgccaactcgctggtcatcgcgctggtttcggccagcgtggcgaccctgctcggcaccctcgccggggtcgccctgcatcgcttcaagctgcgcgtgctgcccctgctagtgctgaccccgatcgccattccggaactcctgatgggggtctcgctggtgatcttcttcatcggcctgaacatgagcctgggcatgctctcggtgaccctcgcgcacatcaccttctcggtcggcttcgtcgccctggtggtgcaggcgcgcatgtcgggcatggacgaaagcctcaccgaggcggcccgcgacctcggtgccacgccctggcagagcttccgcctggtgaccctgccgctgatcatgccgggcatcgtcgccggcgcgctgatggccttcaccctgtccatcgacgacttcgtgatcaccttcttcaccgccggcggcggcttcgccaccctgccgacgcagatctacaccatgatcaagatcgccgtgacgcccgaagtgaacgccgtctccaccctgctgatgctgctcaccctggtgctgatcgtgatcgcctcgaaactctcccccagcgccatcaagggccattga

SEQ ID NO: 318713 - DNA, 894 bp, Pseudomonas aeruginosa
atgagaaagaacctcggcaagtggctgctggtctggccgccgcaagcgtatctgctgttcttcttcctggttccggcgctgatcatgctgttcgcctcgttccgctttcccggcgactacggcggcctggcgccctggatgtacagcgaggacgggcagaccgtctacgacctcagcgtggagaactacacccggctcaccgagagctgggtgtacctgcaactgttcgtcaaatccttcggctacgccctggtcaccaccctggcctgcctgctgctcgcctacccggtggcgaccaccctcgcccgggccccggcgaagtggcgcaacctgctgatcctgctggtgatcctgccgttctggagcaacctgctggtacgcgtctacgcctggatgatcatcctctcgccgtccggtgccctgacccgcgggatcaacgccgcgctggacctgttcggcgcgcagccgatcagcctgatgttcaccccgttcgcggtgatcctgtgcatggtctacgtgcacctgccgttcatgatcctgccgctctacgccaacctggagaaacacgactcggccctgctggacgccgcccaggacctcggcgccggtcgttggcaacgcttctggcgggtgaccttcccgctctcgctgccgggcgtggccgccggcgcggcactggtattcatcccggtgctgggaatgttcgccatccccgacctggtcggcggtaccgacggcatcatgatcggcaacctgatcaagagccagttcctcgactcccgcgactggccgttcggcagcgcgctgtcgatcgccctgaccggctgcatcctgctgctggtcgccctcggcatgggcgccgcgcgcgcccgcaagggaggcgcccatgcgtag

SEQ ID NO: 318714 - DNA, 1080 bp, Pseudomonas aeruginosa
ttgctcgagatccgcaacgtgacccgccgcttcggcgacttcaccgccgtcgacaatgtcagcctgacgatcaacaccggcgaattcttcaccctcctcggcccttccgggtgcggcaagaccaccctcctgcgcatgctcgccggcttcgaccagccggacagcggcgagatccgcctcaacggccaggacctcgccggcgtcgagccggagaagcgcccggtgcatacggtgttccagagctacgcgctgttcccgcacatgagcgtagcgcagaacatcgccttcccgctgaagatggccggagtggcgaagagcgagatcgacgcccgcgtcgaacaggccctgaaggacgtacgcctggcggacaagggcgggcgcatgccgacacagctttccggcggccagcgccagcgcgtggcgatcgcccgcgcgctggtcaaccggccgcgcctgctgctgctcgacgaaccgctgtcggcgctggacgccaagctgcgcgaagaaatgcagatcgaactgatcaacctgcagaaggacgtcggcatcaccttcgtctatgtcacccacgatcagggcgaagccctggcgctgtcgcaccgcatcgcagtgatgaaccagggccgggtggagcaactggacgccccggaaaccatctacagcttcccgcgcagtcgtttcgtcgccgacttcatcggccagtgcaacctgctcgacgccacggtcgaggcggtcgacggcgaacgcgtgcgcatcgacctccggggcctgggcgaggtccaggcgctgaaatccttcgacgcccagcccggcgaggcctgcgtgctgaccctgcggccggagaagatccgcctggcgcagagcgtcaccgccgacagcgacgaggtgcacttccgcggtcgcgtcgccgaactgctctacctgggcgacgtgaccctgtacatcgtcgagctggagaacggcgagcgcctggaaaccctgctgcccaacgccacgcccggccgagccaagttcttcgaggtgggcgacgcggtggaagccgcctggcgcttcgatgccggccatctggtcagggcctga

SEQ ID NO: 318715 - DNA, 717 bp, Pseudomonas aeruginosa
atgagccatgccgtttcccgcttgcgccaggagcgcctggcgcgcagcctgaaacccttcgtcgcgcgcggttcgcgcatgccgcgctgcgaaggctgtcggctgctgccgagctattgcatgtgcgcctggcggccgcgggtcgaggcgcgcgccggcatgtgcctggtcatgcacgacatcgaggcgctgaaaccgaccaacaccggctggctgatcgccgataccgtggccgacaccttcgccttcggctggtcgcgcaccgaggtcgacccgcgcttgctggagttgctggccgacccgcagtggcagccatacctggtgttccccggcgaatatgtggcggcggagcgggtggtgaacgaggtcgccccgctggtggaaggcaagcgaccgctgttcatcctgctcgacgcgacctggaccgaggcgcgcaagatgttccgcaagagtccctacctggagccgttcccggtgctcagcctgctgcccgagcagctctcgcgctatcgcctgcgtcgctcgacccgtggcgagcacctgtgcaccgccgaagtggcggcgctgtgcctggagctggctggcgacgaggccgcgggcgaggcgctcggcgcctacctggaggtgttcagcgagcgctacctgggcgccaagcggcacattccgctggacgaggccagcccggcgcaccgtgccctggcgccgttccgtggctga

SEQ ID NO: 318716 - DNA, 894 bp, Pseudomonas aeruginosa
atgcgaagccaagccctgcgtgccgatgtcctgatgctgatcaccgccatgatctggggggtgtcgttcgtcgcccagcgcctggggatggacgccatcggcccgttcctctataccggcctgcgcttcgtcctcggtgccctggtgctggtgccactgctgatgctgcgctcgcgacgcgacggcgcgcaacccttcaatcgcggacagttgctcgccggtgtgatcctcggcgtcgccctgaccaccgggatcaacctgcagcaggtcggcctgctgttcaccagcgtgaccaactccggcttcatcaccgggctctacgtgatcgtcgtgccgttgctcggcctgctgttcggccagcgcaccggcgcgggcacctggctgggggcgtcgctggcggtgctcggcatggccctgctgagcatcggcccgggcttccaggtcgcctccggcgactggctgcaactggccggcgcggtggtctggggcgcgcacgtcctgctggtaggcctgttcgccagccgctacgacccgatccgcctggccttcctgcagttcgccacctgcgcggcggtcagcctgctgctggcactggtcttcgaggaaatccactgggacgccatcgtccaggccggtcccgccctgctatacggcggcctgctcggcgtcggcaccggcttcaccctgcaggtggtggcgcagaagcacgccatcgcttcccatgcggcgatcatcctgtccctggaagcggtgttcgccgccatcgccggcgccctgttcctcgccgagaccctgcacctgcgcggctatttcggttgcgcgctgatgctggcgggcatgctggtggcgcagttgtggccgcgcaagctcgccgccgaagcgcgcccggcctga

SEQ ID NO: 318717 - DNA, 654 bp, Pseudomonas aeruginosa
atggcttcttacgagatcctgatcgccgacgatcaccccctgtttcgcagcgctttgcaccaggccctcaccctcgggctgggccccgacgtgcgcctggtggaagccgccagcatcgccgaactggaagcgcggctgaacgagaaggccgattgggatctggtcctgctggacctcaacatgccgggggcctatggcttctccggcctggtgctgttgcgcgggcaatacccgcaggtgccggtggtgatgatctcggcacaggaggaggccgcggtggtgcagcgctcccgcgagttcggcgccagcggcttcatacccaagtccagtccgctggaaaccctgcagcaggcggtgcgcgcggtgctcgacggggacacctggtggccgccgcaggatgccgccgccgaagccctcagcgaggaggccaaggccgccagcgccgggctcgccagcctcaccccgcaacagttcagggtactcaccatggtctgcgaagggttgctgaacaagcagatcgcctacgacctgaacgtttccgaggcgacggtgaaggcccacgtcacggcgatcttccgcaagctcaacgtgcgcacccggacccaggccgcgctgctgctgcaacaaatggagacggttcccgcttctcattga

SEQ ID NO: 318718 - DNA, 372 bp, Pseudomonas aeruginosa
gtgtcgccttcccccttcaaaggccagaccggcctcaagcgtatcctcaacgccaccggctattccctcgcaggtttcctcgccgccttccgcggtgaagccgccttccgccaactggtgctgctcaacgtggtgctgatcccggtggccttcctcctcgacgtcagtcgcggcgaacgcgcgctgatgatcgcggtgtgcctgctggcgctgatcgtcgagctgctcaactcggcgatcgaggccaccgtcgaccgcgtctcgctggaacgccaccctctgtcgaagaatgccaaggacatgggcagcgccgcgcagttcgtggccctcaccgtgatcaccgtgacctgggcgaccatcctgctgggctga

SEQ ID NO: 318719 - DNA, 1611 bp, Pseudomonas aeruginosa
atgaatctgtcgctactcagtcgctatgcgtttttcgcctgtatcgccctgttcaccttggtcagcctgccgttcctcggcagcaccgaatggctctggccgttcaccctcctgggcgtggccctgagcctgctcggcctgttcgacctgatccagacgccccacgcggtgcgccgcaactatccgatcctgggcaacatccgctatctggtggaaggcatccgcccggagatccgccagtacctgctggaagccgacggcgacgccctgcccttctcccgcgcccagcgctcgctggtctactcgcgggcgaagaacgaaagctcggagaagcccttcggcaccctgatcgacgtgtacaccgccggctacgaattcatcagccactcgatgcgtccggcgccgctcagcgatccctgcgagttccgcgtcgacatcggcgggccacaatgcagcaagccgtactccgcttcgctgttcaacgtctcggcgatgagtttcggcgccctcagcgccaacgccattcgctcgctgaaccgtggcgcgcagatgggcaacttctaccacgacaccggcgagggcagcatcagtccctatcaccgcgagaacggcggcgacctggtctgggaactgggcagcggctacttcgggtgccgcacccgcgatggcaagttcgaccctgagcgcttcgccgcccaggccctcgacccgcaggtgaagatgatcgagatcaagctcagccagggcgccaagccgggacacggcggtatcctgcccaagcacaaggtcacccccgagatcgccgccacccgtggcgtgccgatgggtgaggattgcgtttcgccgtcgcgccacagcgccttctccacgccgatcgagctgatgcagttcatcgcccagctgcgcgaactgtccggcggcaagccggtcggcttcaagttctgcctgggccatccatgggagttcatgggcatcgccaaggccatgctggagaccggcatcctccccgacttcatcgtcgtcgacggcaaggaaggcggcaccggcgcggcgccgctggagttcaccgaccatatcggcgtgccgctgcgcgaaggcctgctgttcgtccacaacaccctggtcggcctcaacctgcgcgacaagatcaaggtcggcgccagcggcaagatcgtcagcgccttcgatatcgccagcgtcctggccaccggcgcggattgggccaactcggcgcgcggcttcatgttcgccatcggctgcatccagtcgcagagctgccataccaacaagtgcccgaccggcgtcgccacccaggacccgctgcgccagcgcgcgctggtggtgccggacaaggccgagcgggtgcgcaacttccatcgcaacaccctcaagggcctggccgagatgctcgccgcggcgggcctggaacatccctcgcagctcgaagccaagcacctggtgcgacgcatcaccgacaccgagatccgcctgttctcgcagctgcactacttcctcaagccgggcgaactgctttccggcaagatcgagggcgagttctacgagcgcatgtggaacatggcgcgggccgacagcttcgacgcggcggcctga

SEQ ID NO: 318720 - DNA, 264 bp, Pseudomonas aeruginosa
atgaaacccggcatccatcccgaataccgtcccgtcctgttccatgacacctcggccgacgtgtacttcctgatcggctccaccgcggagaccgacaagacccatacccataccgacggcaagacctatccctacgtgacgctggacgtttccagcgcctcgcacccggtctacaccggcgaacagcgcaagaccaagagcgaaggccgcgtggccgggttcaacaagcgtttcgccggcttcgtcggcggcaagggggcctga

SEQ ID NO: 318721 - DNA, 153 bp, Pseudomonas aeruginosa
atgaaagtcctcgcctcgctgaaacaggccaagctgcgccatcgcgattgccaggtggtgaagcgccgtggccggctctacgtgatctgcaagtcgaatccgcgcttcaagtgcgtgcagggccggccgaagccgaagatcaagcgccgctga

SEQ ID NO: 318722 - DNA, 786 bp, Pseudomonas aeruginosa
atgagtttcaccttgcaggacatcgcctggcaccgctccgtcgggcaactggtcgaggcgctggatgcgccggacttctggattcgcctggtacgcctgctcgaacagtacgttccgttcgacagctgggtggccctgctgttcagccagggccggccacaggtgttcgccgaatgcccgggcgccgacggcgggccggatccgctgttccaggactacctgcgaggcctctacctgctcgacccgttctacatcgccagccgcgagaacccgtgcagcggcctgttccgtctggccgacgtggcaccggaatgcttcgagcagaccgattactaccagcgttacttccgcctcaacgtggtggccgatgaaatccagatcaacgtccagctctccggcgaacgcaccctctgcctgtcgctcggctcgcggcgccgcttcacccccgagcaactcgccgtgctcggcctggtgcggccctgggtggccgggctgatgcgccagcgcctggccttcgaggacgaagtgttgaacagccccgcggcgccggagccgggctggcagggttcgctggagaaggtcgcggagcagatgggcacgccgctgacggcgcgcgaactggaggtcggcaggctgatgctcagcggctgctcgagcaaggagatcgcccgcaagctggcgatctcggcggaaaccgtgaaagtccaccgcaagcacatgtacggcaagctcggcatcaagtcgcagtccgagctgttcggcctgttcctccaggcccagggctga

SEQ ID NO: 318723 - DNA, 816 bp, Pseudomonas aeruginosa
atgaaagtcgaactcgtccagatcgccggtcgcgatggcgacaccgcgcacaacctggaacgcgccctggcggccatcgccgactgtgcggcggacaccgaactggtggtgttcccggaaacccacctgaccggcttccccagcgaagacaacatcgccgccctcgccgagccgctcgacggcccgacggtcagcgcggtgcagcgcgtcgcccgtgaacgtaacgtttcggtggcgatcggcatcgccgaggcggacgccggccgctattacaacaccaccctgctgatcgctcccgacggcatcgccctgaaataccgcaagacccacctgtgggcctccgaccgcggcatcttcacgcctggcgaccgctacgccaccgccctgtggaacggcatccgggtcggcctgctggtgtgcttcgacatcgagttcccggaaagcgcgcgggccctcggccaactgggtgcggaactgatcatcgtgaccaatggcaacatggacccctatggcccgacccatcgcaccgcgatcatggcacgggccatggaaaaccaggcctacgcggtgatggtcaaccgcgttgggcatggcgacggcgggctggtcttcgccggcggcagcgcggtggtcgatccctatggccagttgctctgcgaggccgggcgcgaagaatgccggcagatcgtcgaactggacctcggccggttgcaggatgcgcgtcgggattaccgttacctcgaagagcgtcgcctggtcctgcccggcgagcgccgcgagcacccggatggcctgcgcgaactgctgattccctga

SEQ ID NO: 318724 - DNA, 1323 bp, Pseudomonas aeruginosa
atggccagactcaagcgcaccctgtcgctgggttccgtggtgctgttcggcatcgcctacatgacccccatcatcgtcctcgggactttcggcatcctcgccgagaccacgcagggacacgtccccgccgcctacatcgccgcttccctggcgatgctcttcaccgccctcagctacgggcgcatggccgcggccttccccgtggccggctcggcctatacctacgtgcgcaaggccatcgattcccggctcggcttcatcgccggctgggcggtgctgctcgactacctgttcctgccgatggcgatctggctgatcggcgccgcctacctgcactcggcctttcccgcggtacccaacgcggtctgggtgctggcgttcatcggcgtgaccacgacgatcaacatcgtcggcctgcgcctggcgaagaacgtcaatggcctgctgatgctggtgcagttcctggtcctcggcgccttcgtcgcactctgcgtgcactacgtgctgggcgacccgggcaagccgttatggtcactgcaaccgttgctaggtggcgacctgcaggtgccgctggtgatgagcggtgcggcgatcgcctgctactcgttcctcggtttcgacgcggtcagtaccctgaccgaggaaacccgcgacccgcggcgcaacatcccgcgggcgatcctgctgatcaccctgctgggcgggttgatcttcatcgtcacctcgtacttcgtgcaactggcgcacccgtcgttcgccttcgacagcgcggactcggcggcctacgagatcgcccgcaacatcggtggcgacctgttcgtgaccttcttcctggtcggcctgatcgtcggccagttcacctccggtctctcggcccaggccagcgcctcgcgcctgctcttcgccatgggccgcgacggcgtccttccgcggccgttcttcggtcgtctcggcaagcgcttcgagacgccggtgaacagcatcgtcctgtgcggtgtggtggccttgctggcgctacagatggacgtgaccacctccacgtcgttcatcaacttcggcgccttcctcgccttcagcctggtcaacctgtcggtggtcttccactactaccttggcgccgagcgccgcggtccacgggaaaccctgttgttcctggtattccctggcatcggcctggtcgccgacctgtggttgatggccagcctcgaccatctggcgatcatcctcggcctctgctggctggcgctgggcgcggtgtacctggcggcgatcacccacggtttccgcgagccgccgccggagatgcgtttcgaggagggctga

SEQ ID NO: 318725 - DNA, 1074 bp, Pseudomonas aeruginosa
atgtccgatgcagcgttgttccttccccttcccgatgacgacaccctgtatgccgcgctgttggcgcgcgaccccgcctacgatggctttgccttcgtcggggtgaagagcaccggggtgttctgccgcctgacctgcccggcgcgcaagccgaagcgcgagaacaccctgttcttcgattcgatcaagggctgcgtcgaggccggcttccggccctgcctgcgttgccggccgctggaacggctcggcacgcaggggccgctggtcagcgacctgctccagcgcctcggtcggcaaccgcagcggcgctggttcgaagacgacctggcggcgctgggctatgacccgtccaccgtgcgccgtgccttcaagcgcgagttcggcgtgacctttctggaaatggctcgcctgcgccgtcttggccaggtcgccgagcggctgtcctcgggcgcgcgggtaatcgacgcgcaactggatgccagcttcgactccgacagcggcttccgtagcgccttcgcgcgcctgctgggcgagccgccgtcgcagttgcgcgggcgcgagctgctcaaggcggactggctgcagaccccgctcggcgccatgctcgcggtggccgatgcgcaggccctgcacctgctggagttcttcgaccgcccggcgttgagcggggagctgaaacgcctgcagaagaacagcggatcgagcatcggtttcggccgtttcgcctccatcgacaggatcgaggcggaactcgccgactacttcggcggtactccagtgcgcttccagacccccttggcgctgaacgcctcggccttcacccgcacggtctggcaggcgctgcgcgaggtaccgtgcggcagcacgcagagctacgccgggctggccaggtccatcggctcgccgtcgtcggtgcgcgccgtggcccgcgccaacggagccaaccagatcgccatcgtgattccctgccaccgcgtcatcggttcggacggttccctgaccggctatggcggtggcctgtggcgcaagcgctggttgctggagcacgagcggcgcatgggcgctgccggctag

SEQ ID NO: 318726 - DNA, 1410 bp, Pseudomonas aeruginosa
atgccgcgctcgccctctcccgaagacgccgacctgcacaagaaagcccgcagggccggtatcgcctccttcatcggcaccaccatcgagtggtacgacttctacatctacggcctggccgccgccctggtgttcggcaaggtattcttccccgccaacatggatccgggcctggccaccctgctgtccttcgtcaccctctggtcgggtttcatcgcccgcccgctgggcgggatcatcttcggccatctcggcgaccgcatcggccgcaagaccaccctggtgatcaccctgatcatgatgggcatcgccacgacctgcatcggcctgttgccggtctatacgcagatcggcatctgggcgccgatctccctggtggcgctgcgtatcgtccagggcatcgcggtcggcggcgagtggggcggcgcgatcctgatcgccagcgaaagcgcgcccaagggcaagggcatcctgtacgccgccttcgcccagcagggctcgcccaccggcaacctgctggcgaccctggcgttcttcgccctcagcgccctgcccgcctcggacttcattctctggggctggcgcgcgccgttcctgctctctgcggtgctggtcatcgtcggcatggtgatccgcctgaagctggaggagtcggaagacatgaagcgtgtgctggcgcagaagcgcacggtgaagctgccgctcgccgaggtgctgggcaagcactggaagatcgtcctgctcggcgccggcgtgctgccgatcatccacgtcacctacttcaagagcaccttcgccctctcctgggcgaccaagaccctcggctacagccagggcaccttcctcagcatcatcgtggtcgcgctggtggtgcagttcctcagccagccgctgggggcgctgctcacttcgcgcatcgacatgcgcaaggcggcatgcctgatggtgctgccggagttcatcctgatgccggcgatgttcttcgccgtggaaaccaaggtctactggatcgccgcggtcggcatgtgcctggccacggtgccgcacgcgatgttctacggcgcggtgggcggtatcctcgcccgagccttcccggcgcgggtgcgctacaccggcctgtcgctggcctaccagctctgctcgctgctggtcggcggcggtacgccggtactggcccagtggattctcaacagtaccggcagcatcgtcggcgtggccctggcctcagcctgctacgcgctggtctcgctggcctgtaccctggccctgttgcggatcaccggattccacgccagcgacctgtcgaccgccgagcgcgccgacgccgaggacttgcagcggcccgcagcggtcgagcgggaaccggtgttgcgcgcccccgcccggcttctgggcggcgatcccggctag

SEQ ID NO: 318727 - DNA, 888 bp, Pseudomonas aeruginosa
atggatctcagacagcttcgctacttcatcgcggtcgccgaggaactgcatttcggtcgcgccgcggctcgcctgttcatctcccagccggcgctgagcttcgacatcaagaagctggaggaacagctcggaacccaattgctgctgcgcaacaacaagtcggtgaagctcaccggcgccggccaggtcctgctggtggaagcgcgcaacctgctgctgcaggcagagaaggtgaaacgcctgacccagctatccgccgagggcgacgtcggccaactgcgcgtcggcttcgtcaactccatgctctaccgcggcctgcccagggccatgtcccgcttcgaacgggagcacccgaacatggaggtggtgctcggcgaaatgaacagcgcggagcaggcccaggcgttgcagcgcgggcagatcgacctgggcttcgtgcactggggcaggctgccggcggaaatcgtctccgaacccttgatcagcgacccgttcctctgctgcctgcccgccgggcaccgcctggctggccaggcgcgtctggacctcgccgaactgcgcgacgaagacttcatcctcttcccgcgccatgtctccccgcactaccacgacctgatcatcgcccgctgcgtggacgccggcttcagcccgcgcatccgccacgaggcgcgcctgtggcagaccgtcgccgccatggtcggtctcggcatgggcgtcgcgctgatcccgcagaccctctgcctggcctggcggaacgaggtgcgctacctggaaatcgagccggccggcgcgcgttcggagatccacgcgatccttccggccagcgaaccttcccgggcggcgcaggcgttcctggcgacgctgaagagcggcctggacgacgcctga

SEQ ID NO: 318728 - DNA, 1728 bp, Pseudomonas aeruginosa
atgaccgccatgcccgaagtacttcgcgaagatacgctgaacatccccgacagccgtgggctgaatctctacacctgcgatccggccctggagcggctgctggaggtatacctgccgccggcgttgctcgccgaatggcggccgctcctcgaacggctcggcgcccgtgccggcggcgagctggacgtgctggcgctggcggcggacaagaacccgccggtgctggcgccgcgcacccgccgcggcgaggatttgcagagcattcgcaagcatccggactacgtcgccctcgaacgggtggcctatgccgaacttggcctggcttccatgagccatcgcccggacggcccgccgccgctggtgaagtatgcgctcacccacctgttcgtacaggccgagttcggcctttgctgcccggtcagcatgaccgactcgctgacccgcaccctgcgcaggttcggcgcgccagaactggtcgagcgctacctgccgtccctcgcctcgcgggatttcgacgagctgttccagggcgccatgttcatgaccgagcaggccgccggctccgacgtggcgcggacccgtaccgtggcgcgggagcagggcggcgagtggaagctctacggcgacaagtggttctgctccaacccggacgccgacctggcgatggtcctggcccgccccgaaggcgcgccggaaggaatgaagggcgtgaccctgttcctgttgccgaaggtccgcgaggacggcacgcgcaacgcctatcgcatcgtccgcctgaaggacaagctgggcagccgctccatggccagcggcgaagtccgcctggaaggcgccagcgcctacctgatcggcgagatcggccgcggcttccagcagatggccgacatggtcaacatgtcgcgcctgtccaacggcgtgcgcgccgccgggctgatgcgccgggcgctgagcgaggcgctgttcgtcgcccgccatcggcgcgccttcggcaagcacctgatcgacatgccgctgatgcagaagcagttgctgaagatgatgctgcccaccgaacaggcgcgctcgatgttcatgcagatcgccacgctgctgccgcgcgccgatggcggcgaggtcgaggcgcagaaatgcgtgcggatcctcaccccgctgatcaagttccgcgcctgccgcgatgcgcgacgggtcaccggcgacgccatggaggtgcgcggcggggtcggctacatcgaggagtggagcgacccgcggctggtgcgtgacgcccacctggggtcgatctgggagggcaccagcaacatcgtggcgctggacgtcgcccgtgcggtgagccgcgaacaggcgctcgaacccttgcagcgccacctgcgccggctgctggatgacagcgacctgccaggggacgcccgcgacctcttcgacgaactgctggtgcgagtggtcgcgaccatggccgacgtcgccgagcgccgccaggatgaacaggtgcgccaggccggcagcgccctctaccacctatgcacggcgatcttcatggcctgggaagccagccgccaggcacccgaccagcgccgcctggccctggccttcctggtcgcccggcacaagctgctgccgcgcgacccgctgcacctggagggttggaccgaccaggccgaactgctggccagggtggtcggcgaggtgccgctgagccaggccgaagccatgcaattgctgccggcctga

SEQ ID NO: 318729 - DNA, 1188 bp, Pseudomonas aeruginosa
atgaccaatcagacgggcgccctgcgtggcctgaaaatcatcgatctcagccgggtcctcggcggaccctactgctcccaggcgctggccgaccacggcgccgaggtgatcaagctggaaccccttggcggcgacgagacccgtggctgggggccgcccttcgagggcgacacggcgtcctacttcaagggcgtgaaccgcaacaagaagggcatcgccgtcgacctggcgacggcggagggcatcgagctgctgctgcgcttgctggaggacgccgacgtactgctggagaacttcaagcccggcaccctggcgcgctgggggatcggctacgaggaggtgcttcgccagcgcttcccgcggctggtccactgcgcggtatcgggcttcggcgccgacggcccgctcggcggcctgcccggctacgacgcggcgatccaggcgatggccggactgatgagcgtgaacggcgaggccggcggcgaggcgttgcgcatcggcctgccgatcgtcgacatggtcaccgggctgaacgccatggccggcatcctcctcgccctccacgagcgccaggtcagcgggcgcgggcagtcggtggacatcgccctgtacgactgcggtatctccctgctgcacccgcacctgccgaactacttcgcttccggacgtacgccccggcgtagcggcaacgcccacccgaacatcgcgccctacgacagctaccgcaccggtaccgagccgatcttcctcgccgtcggcaacgaccgccagttcgcccgcctgtgcgagtacctgggagcggatgaactgccgggggacccgcgcttcgccgacaacggcaagcgctcggtcaaccgcgaggcgctgaagcgcgctctggaggactacctggcggcccacgacggccgtgagctggccgagcggctgatccgtctcggcgtgccctgcggagccatcgccacggtggagcgggtggtggaacacccgcacacccgccatcgcgggatggtcgtcgaactcgagggctatcgcggcatcgcctcgccggtgaagctttcgcgcaccccggccagctaccgcgccgcgccgccggtgctgggcggagacacccgggaagtcctggcggaactgggattgagcgccgaggcgatcgacgcgctggtccggcgcggcatcgtccgcgcctga

SEQ ID NO: 318730 - DNA, 798 bp, Pseudomonas aeruginosa
atggattcctcccctggggcggtgcgccccgaactcgtgctgctggagcggccggagcagggcgtggccctgttgcgactgaaccgcccggcagtgctcaacgccctgaacatgcgcctgcgcgaggctctggcggagcacgtacggcgcctcgacgagtgcgccgatacccgggtcatcgtcctcaccggaaatggcacggcgttcgccgccggcgccgatctcaacgaactggcggaggcgtccgtgctggagatccagcagcgcggggtggagcgccactggcaggccctcgccgcctgccgcaaaccgctgatcgccgccgtggagggccatgccctgggtggaggctgcgagttggcgatgcactgcgacctgatcgtcgccggtgcctcggcgcgcttcgcccagccggaagttcgtgtcggcgtgatgcccggcgccggcggcacccagcgcctggtgcgagcggtgggcaagttccaggcgctgcgcatgctgtttaccggttgcacggtacgggcgccggaggccctggccatagggttggtcagcgaggtggcggcggatggccaggcattggatcgcgccctcgaactggctcgccagatcgccggcctgccgccgctggcgctggcgcagatcaaggaagtggtcctggccggcgccgacctgccgctggaccaggccctggcgctggagcgcaaggccttccagttgctgttcgatagccacgaccagaaggagggcatgcgtgccttcctggaaaaacgcacagcggagtacctgggaaaatga

SEQ ID NO: 318731 - DNA, 1533 bp, Pseudomonas aeruginosa
atgagcgaaccaccgatcgttctcatcggtatcgtcggtaccggtgccatgggccagggcatcgcccagctcgctgcctgtgccgggctgtcggtgctgctctacgacagccgccagggtgcggcactgcaagcacgcgagcagatcgccacggtccttgcccggcaggtggagcggggccggctggaggcggaggctgtcgagcgcgcgatgggcaatctgcgggtggtcgaggacttgcgggtcctacgcggctgccagttggtgatcgaggcgatcgtcgagaacctggaggccaagcaggcgttgttccgccaattggaagaggtggtcggcgacgaagcgatcctcgccagcaatacctcctcgctgtcggttaccgcgatcgcctcggcctgtcgcgatcccggccgggtcgccggtctgcacttcttcaatccggtgccgctgatgcgtctggtggaggtgatcgagggtctcgccacccgcaccggcatcgccgagcgactgtgcgccctggtggcgaccttcggccaccagtcggtgcgtgccacggacagccccggcttcatcgtcaaccatgccggacgggccttcggcaccgaggcgctgcgtatcctcggcgagggcgtggcgccggtggcggcgatcgacgaagtcctgcgcgagggcgccggcttccgcatgggcccgttcgagctgttcgacctggtcgggttggacgtcagcctgccggtgatggagtcgatctaccggcagtactacgaggagccgcgttatcgtccgcatcccttgctgcgccagatgctcgccgccggccgcctggggcgcaagagcggccagggcttctaccgctacgacggcgctgggcaggtgcccgtcgccgccccggcggttgcgccaggcgcggcgttgccgccggtgtggctgggcgtcgacgacgaacatgaccgcgcgccattgctgacgttgctacaacgtctgggcgccgaggtggagagcggcgagcgtccttccggggcggcgttgtgcctgcttgcgccgctgggcgccgacgtcagcgccgcagcgcggcggttcgccgtcgatccgacgcgcagcctggccatcgacgtgctgtcggacctggagcgacaccgctgcctgatggcctgcccggcgacccgagcggagctgcagcaggcggctcgcaccctgttcgcacgggacggcgtgggcgtcacgctgattcgcgacagcgccgggttcatcgtccagcgcaccctcgcctcgatcgtcaatctcgcctgcgacatcgcccagcagggtatcgcttcggtggagcacatcgacctggcggtgcgcctcggtctcggctatccgctggggccgctggagtggggcgaccgactgggtgccgggcgcgtgctgcgcatcctcgaacgcctgcatgcgctcagcggcgacccgcgctatcgccccagtccctggctgcgccggcgcgcccaactgggcctttccctgcgccagccggacagcccgttggcctcctga

SEQ ID NO: 318732 - DNA, 1206 bp, Pseudomonas aeruginosa
atgctcgatgcctatatctacgccggcctgcgtacgcctttcggccggcatgccggtgcactctcgacggtgcgtccggacgacctggccggcctgctgctggcgcgcctcgcggaaacctccgggttcgccgtcgacgacctggaggatgtgatcctcggttgcaccaaccaggccggcgaagacagccgcaacctggcgcgcaacgcgctgctcgcagccggcctgccggcgcgactgcccgggcagacggtcaaccgcttgtgtgccagcggactgtcggcggtgatcgacgcggcgcgcgcgatcagttgcggtgagggccggctgtacctggccggcggcgccgaaagcatgtcccgggcgccgttcgtcatgggcaaggcggagagcgccttcagccgcacgctggaggtcttcgacagcaccatcggcgcgcgcttcgccaaccctaggctggtcgagcgctatggcaacgacagcatgccggagaccggcgacaacgtggcccgcgccttcggcatcgcccgcgaagacgccgaccgtttcgccgcttcttcccaggcgcgctaccaggctgcgctggaggagggctttttcctcggcgagatccttccggtggaggtgcgtgccggacgcaagggcgagacgcggctggtggagcgcgacgagcatccgcgaccgcaggccgacctggcggccctggcgcgcttgccggcgttgttcgccggtggggtagtgaccgccggtaatgcgtctgggatcaacgacggggcggcggtagtgctgctgggcgatcgcgcgatcggcgagcgcgagggcatccggccgttggcgcggatcctcgccagcgccagcgtcggcgtcgagccccggttgatgggcatcggcccgcagcaggcgatcctccgcgcgctgcaacgcgccggcatcgacctggacgaggtcggcctgatcgagatcaacgaagccttcgcgccgcaggtcctggcctgcctgaagttgctcggcctggactacgaggacccgcgggtcaatccccatggcggcgccattgccctcggccatccgctcggcgcctccggtgcgcgcctggtgctcaccgccgcccgcgggctgcaacgcatcgagcggcgctacgcggtggtcagcctgtgcgtcgggctcggccagggcgtggcgatggtgatcgagcgctgccgatga

SEQ ID NO: 318733 - DNA, 1251 bp, Pseudomonas aeruginosa
atgaacaacaacaagaaatgcgcgtttttcctgctgccgatccttgccggcgatagcgttcccgccttggccgagggcttcctcgaagactcgcgggccagcctggccttgcgcaacttctacatgaaccgcgacttccgcgatggcgcgggacgtgcgaaaagcgaggagtgggcccagggctttctcttcgactaccgctcgggctataccgagggcaccctcggcgtgggtctcgacctgctgggcaagctcggcgtccggctcgattccggcgcggggcgtagcggcaccggcctgcttccgcttcgcgacgatggcagcgcggcgggcgactacgcgcggctggacgcgaccgccaagctgcgcctgtcgcgcagcgaactgaaggtcggcggcctggtaccgaagctaccgaccatccagcccaactacgggcggctattcccccaggtgttccagggcgcgctgctgacttccggtgaactgagcggactgagcctgaacctgggacggctgaccgaggtcagccagcgcaacgaggcgggcaccagcgacctggcgctgttcaaccgcaaccggcgtttcgccggcgcggcgcaggcggaccgtttcgacctggccggcctggactaccgtatcgccccggactggaccggcagctaccactatggcgaactggagcaggtctacgcccagcatttcctcggtctcaaggggcgcatcggcatcgctgcggacagcctggagagcgacttgcgcctggcgctcagccgggataccggcggcgctcgcggcgggcgcatcgacaaccgttccttcagcgggtcgctcacctaccgcctgcgcaacggccaggccttcggcctgggctaccagcggatgagcggcgaccacggtttcccctacctggaggggaccgatccgtacctggtcaatttcggccagtacaacgacttcgccgaggctggcgagtcctcctggcaactgcgctacgactgcgacttcgcgccgctcggggtgcccggcctgagcctgatgacgcgctatttcagcggccacggcgcgaaaccgaagggcgccgacggcagtcgcgagtgggaacgcgacagcgacctgcgctacgtgttgcagggcggtgcgctgaagggactggggctggtctggcgcaacgctacctaccgttcggccttcagccgcgacatcgacgagaaccgcctgtacctgacctatgagctgccgctgttctga

SEQ ID NO: 318734 - DNA, 921 bp, Pseudomonas aeruginosa
atgctcgaacttcgccacctcaagaccctgcacgcgctgcgcgaagccgacagcctggtggaagccgccgagcgcctgcaccttacccagtcggcgctgtcgcaccagttcaaggaactggaagagcgcctgggcatgcagctgttcgtgcgcaagaccaagccggtacgcttcaccagcgccgggctgcgcctgctgcaactggccgactcgctgctgccccagctgcgcaccgccgagcgcgacctggcgcggctcgccggcggtaccgccggacgcctgcacatggccatcgaatgccacagttgcttccagtggctgatgccgaccatcgaccagttccgcgacgcctggccggaagtcgaactggacctggcctcgggcttctccttcgcgccgctgccggccctggcccgcggcgacctcgacctggtggtgaccgccgacccgatcgagttgcccggcatcacctacgtgccactgttcacctacgaagcgctgctggcggtggccaaccagcatgccctggctggtcgaccgtacgtcgtcccggaggacctggagcgggaaaccctgatcacctatccggtggaacgcgatcgtctcgacgtcttcacccgcttcctcgaccccgccgacgtggagccggcgcaggtgcgcatagccgagctgaccgtgatgatgatgcagctggtggcctccggtcgcggcgtctgctgcctgccgaactgggccctgcacgagtacagctcgcgcggctacgtgacggcccggcgcctcggtgaaaagggcctgtactgcacgctcttcgccgccatccgcacggacatgttcgatgcgccattcatgcgcgacttcctgctcaccgccaaggacacctccttcgccaccctcgaaggggtcagcgccgccaagggctga

SEQ ID NO: 318735 - DNA, 987 bp, Pseudomonas aeruginosa
atgcgtgctttcatcttcctggccgccttgttgtgcagcctctcctcctttgcggcgtcgcgttgcgacgcacgcgtacctaccgagacggtcgaactgggcgacgtgcgcctggcctaccagagcatcggccgcgacagcgatccggccctgctgctggtgatgggcctgggcgggcaactgatccactggccggacgaggtggtcagcgccctgtgcgagcaaggcttccgggtgatccgctacgacaaccgtgacgtcggcctgtcggcctggaacgtgccggtgcccagctcgcggctgacctacgaagtggtgcgttatcgcctcggcctgccggtcagcgcgccctataccctcaccgacatggccggcgatgccctgcatctgctcgacgcgctggatatcccccaggcccatgtgctcggcgccagcatgggcgggatgatcgcccagcacatcgccgacatggcgccgcagcgcctgctcagcctgaccctggtgatgaccagctccggcgccgaaggcctgccggcgcccagcgagtcgctgctgcgcctgctggcgcggcgcgaggcggccagccgcgagcaggcggtcgagcagcaggccgacctgctggcggcgctgggcagcccggaagtgcgcgacgatcgccagcaacttctgttgcaggccgcacgttcctacgaccgcgcgttcaacccggaaggcgtgcagcggcaattgctggcgatcctcgccgaacccagccgggtgccgctgctgaaccgtctgcaggtgccgaccctggtgatccatggcaccgccgatccgctgctaccggtgatgcacggcgtgcacgtggcggcgcatatccgtggctcggagctgaagctgatccccggtctcgcccatcgcttccaggaggccttcaaggagccgttgctggcggcggtggtgccttacctgaaggcccatcggcaggccagcgtcgtccagctctga

SEQ ID NO: 318736 - DNA, 330 bp, Pseudomonas aeruginosa
atgttcaaggcgctgatcggcgccgccgtggtcgtgctcctcgccgtcctgtcgaagacccgcaactactacatcgccggcctggtgccgctgtttcccaccttcgccctgattgcccactacatcgtcggcaagggccgttcgctggacgacctgaagaccaccatcgtcttcggcatgtggtcgatcatcccctacttcgtctatctcgccgcgctctacctgctggtcgagcgcttccgcctggagacctcgctggccctggcggcgctggcctggctggtggcggcaagcgtgctggtgggcctctgggtacgcctgcacgcctga

SEQ ID NO: 318737 - DNA, 1539 bp, Pseudomonas aeruginosa
atgagtcaagcgcacaccccctccgctccactcgccgaagtctacgatgtcgccgtggtcggcggtggcatcaacggtgtagggatcaccgccgacgcagccgggcgcggcctgtccgtgttcctttgcgaacagcacgacctggcccagcacacctcctcggccagcagcaagctgatccacggcggcctgcgctacctcgaacactacgaattccgcctggtccgcgaagccctggccgagcgcgaggtcctgctggccaaggcgccgcacatcgtcaagccgctgcgcttcgtcctgccgcaccgtccgcacctgcgcccggcctggatgatccgcgccggcctgttcctctacgatcacctcggcaagcgcgagaagctgcccgcctcgcgcggcctgcgcttcaccggcagcagcccgctgaaggccgagatccgccgtggcttcgagtactccgactgcgcggtggacgatgcgcgcctggtggtgctcaacgcgatctccgcccgcgagcacggcgcccacgtccatacccgcacccgctgcatcagcgcccgtcgcagcaagggactctggcacctgcacctggagcgcagcgacggcagcctgtattcgatccgcgcccgcgccctggtgaacgccgccggcccctgggtagcgcgcttcatccaggacgacctgaaacagaagtcgccctacggtatccgcctgatccagggcagccacatcatcgtgccgaagctgtacgaaggcgagcacgcctacatcctgcagaacgaagaccgccgcatcgtcttcgccatcccctatctggaccgtttcaccatgatcggcaccaccgatcgcgagtaccagggcgacccggccaaggtggcgatcagcgaagaggaaaccgcctacctgctgcaagtggtgaacgcccatttcaagcagcaactcgcggccgccgacatcctgcacagcttcgccggcgtgcgtccgctgtgcgacgacgagtccgacgagccttcggcgatcacccgcgactacaccctgtcgctctccgccggcaacggcgagccgccgctgctctcggtgttcggcggcaagctgaccacctaccgcaagctggccgaatcggcgctgacgcagctccagccgttcttcgctaatctcggcccggcctggaccgccaaggcaccgctgccgggcggcgagcagatgcagagcgtcgaggcgctcaccgagcaactggccaaccgctacgcctggctcgaccgcgaactggcgctgcgctgggcgcgcacctacggcacccgggtgtggcgcctgctggacggggtcaatggcgaagccgatctcggcgagcacctgggcggcggcctgtatgcccgcgaagtggactacctgtgcaagcacgagtgggcccaggacgccgaggacatcctctggcgccgcagcaagctcggcctgttcctctcgccgagccagcaggtgcgcctcggccagtacctgcagagcgagcatccgcatcgcccgcgggtgcatgcggcctga

SEQ ID NO: 318738 - DNA, 756 bp, Pseudomonas aeruginosa
atgaacctgcccccccgacagcaaagcatcatcgaggaggtccgcgagcgcggttacctgagcatcgaggagatggcgcagatgttcgcggtcaccccgcagaccatccgccgcgacatcaaccagctcgccgaacagggactgctgcgccgctaccacggcggtgcggcctacgattcgagcatcgagaacaccgcctacaccatgcgcgccgaccagatgcgcgacgagaagcagcgcatcgccgaagccgtggccagcctggtgccggacaacgcctcgctgttcatcaacatcggcaccaccaccgaggccatcgcccgcgccctgctcaaccaccgcaacctgaagatcatcaccaacaacctgcacgtggccgccaccctcagcgccaaggaagacttcgaagtgctggtcgccggcggcaccgtacgcagcgacggcggcatcgtcggccaggccgcggtggatttcatccagcagttccgcgtcgacttcgccctggtcggcatcagcggcatcgacgaggatggcagcctgctcgacttcgactaccaggaagtgcgcgtatcccaggcgatcatcgacaacgcgcggcaagtgttcctggccgccgactcgagcaagttcgggcgcaacgcggtggtccgcctgggaccgatctcgctggtcaaccgggtcatcagcgacagcccgccgcccgccgccatcgcccgcctgatggcacagcacaaggttcacctggacctggtctga

SEQ ID NO: 318739 - DNA, 1518 bp, Pseudomonas aeruginosa
atgaccgacaagcacaacaagaaatacgtcgtcgccctggaccagggcaccaccagctcccgcgccatcgtcttcgaccgcgatgccaacgtggtcagccaggcccagcgcgagttcgcccagttctatccgcaggccggctgggtcgagcacgacccgatggaaatctgggccacgcagagttcgaccctggtcgaggccctcgcccaggccagcatcgagcacgaccaggtggccgccatcggtatcaccaaccagcgcgagaccacggtggtctgggaccgtcacagcggtcggccgatccacaacgccatcgtctggcagtgccggcgcagcgcggcgatctgcgcgcagctcaagcgcgacgggctggaagactacatccgcgaaaccaccgggctggtcaccgacccgtacttctccgggaccaagctgaagtggatcctcgacaacgtcgaaggcgcccgcgaacgcgcgcgcaacggcgacctgttgttcggcaccatcgacacctggctgatctggaagctcaccgaaggcaaggtccacgtcaccgactacaccaatgcctcgcggaccatgctgttcaacatccacagcctcgactgggacgcacggatgctcgaggtgctcgacattccccgctcgatgctgcccgaggtgcgcaactcttcggaggtctacggcaacgcccggatcggcggggtcggcggcggcgagctgccgatcgccgggatcgccggcgaccagcaggccgccctgttcggccagatgtgcgtggaaccgggccaggcgaagaacacctacggcaccggctgcttcctgctgatgcacaccggcgacaaggcggtgaagtccacccatggcctgctcaccaccatcgcctgcggcccgcgcggcgaggtcggctacgccctggagggcgcggtgttcaacggcggctccacggtgcagtggttgcgcgacgaactgaaggtgatcaacgactccttcgattccgaatacttcgccaccaaggtcaaggacagcaacggcgtctacctggtaccggccttcaccggactcggcgcgccctattgggacccctatgcgcgcggcgcggtgttcggcctgacccgtggagtcaaggccgaccacctgatccgcgctaccctggaatccatcgcctaccagacccgcgacgtgctcgacgccatgcagcgcgatgccggcgaacgcctgcgcgccctgcgcgtcgacggcggggcggtggccaacaacttcctcatgcagttccaggccgacatcctcggcacccgcgtggaacgtccggtgatgcgcgagaccaccgccctcggcgccgcctacctggccggcctggcttgcggcttctggagcagcctcgacgagctgaagagcaaggcggtgatcgagcgggtgttcgagccggagtgcgacgagccccggcgcgaaaagctctatgccggctggaagaaagcggtggagcgcactcgcggctgggacgacggcgaactgtga

SEQ ID NO: 318740 - DNA, 840 bp, Pseudomonas aeruginosa
atgaccaccgccgccccgaccccgtccctgttcggccaatgcctggccgagttcctcggcaccgccctcctcatcttcttcggcaccggttgcgtcgcggccctgaaggtcgccggcgccagcttcggcctgtgggaaatcagcatcatctggggggtcggcgtgagcatggcgatctacctcagcgccggcgtctccggcgcccacctgaacccggcggtgagcatcgcgctgtggctgttcgccggcttcgaggggcgcaagctgccgttctacatcaccgcccaggtggccggtgcgttctgcgccgcagcgctggtgtacaccctctacagcagcctgttcatcgagttcgaacaggcgcagaacatcgtccgcggcagccaggacagcctggccctggcctcggtgttctccacctatccgcacccggcgctgtcggtcggccaggcgttcctcgtcgaagtggtgatcacggccatcctcatggcggtgatcatggcccttaccgacgacggcaacggcctgccgcgcggtccgttggcgccgctgctgatcggcctgctgatcgccgtgatcggtagcgccatgggcccgctgaccggtttcgcgatgaacccggcgcgcgacttcggccccaagctaatgacctacctggccggctgggggcccatcgccttcaccggcggccgcgagattccctatttcctggtgccgatcttcgccccgatcctcggtgcctgcctcggcgccggcggctatcgtgtactgatcgcgcgccatctgccgagcgccgcagcgcccgccgaagccgagccggagaaggttcgcgcttcctga

SEQ ID NO: 318741 - DNA, 471 bp, Pseudomonas aeruginosa
atgacccctgccatcgacctgctgaaaaaggcccgcgccgcgcacaaggtgctcagctacagccacgaccccaaggcaccttcctatggcctggaggccgcggaaaagctcggcctggacccgcagcgggtgttcaagacgctgctcgccgccacggagaagggcgagttgctggtggcggtggtgccggtgatcggcagtctcgacctgaaggccctggcccatgcggcgggggcgaagaaggccgacatggccgatccgcaggcggcgcagcgggccaccggctacctggtgggcgggatcagcccgctggggcagaagaagcgcctgcgtaccttcatcgatgaaagcgcgcggcagtacccgagcatccatgtcagcgcaggacggcgcgggctggaagtggagctggcggccgaggtgctggcccagttgacccagggttcgttcgccgccatcggccgcgaatga

SEQ ID NO: 318742 - DNA, 1485 bp, Pseudomonas aeruginosa
atgtcccactatctcctcgccatcgaccagggcaccaccagctcccgcgccatcgtgttcagtgcccagggcttgccggtggcgagctgccagcaggaattcaagcagtacttcccgaaggacggctgggtggagcacgacggcgaggaaatctggctgaccaccctccaggtctgtcgcgacgcgctcgcccgcaagggcttgcgcgcggccgacatcgccgccatcggcatcaccaaccagcgcgagaccacgctggtctgggacgccgccagcggcgacctgatccacccggccatcgtctggcaggatcgtcgtaccgccgactactgtgccgaactcaaggccgccggccacgaggcgaacgtcagcgcgcgtaccgggctgctgatcgatccgtatttctccgccaccaagctgcgctggatcctcgacaacgtgcccggcgcccgccagcgcgccgaacgcggcgagctgcgcttcggcaccgtcgactgcttcctgctctggcgcctgaccggcggccgctcccatcgcaccgacgcgaccaacgcttcgcgtaccctgctgttcaacatccacagccaggactgggacgaggaattgctggcgctgttcgagatcccgcgcagcctgctgccggaggtactcgactgcgcggcggagttcggcgtcagcgagccgtcgctgcttggcgcggcgatcccggtgctgggcatggccggcgaccagcaggccgcgctgatcggccaggcctgcttccagccgggcatggtgaagagcacctacggcaccggctgcttcatgatccagaacaccggcgagcagccggtgacctcgaagaaccgcctgctcaccacggtcggctaccgtctggacggcaaggtcagctacgcggtggagggcagcatcttcgtcgccggcgccgcggtgcaatggctgcgcgacggcatcaagctgatcgaccacgcccacgagagcgaagccctggcgatccaggccggcgactccaacggcgtctacctggtgccggcctttaccggcctcggcgcgccctactgggacccgaaggcgcgcggcgcgatcttcggcctgacccgtgacaccggaatcaaggagatcgtcaccgccggtctgcaatcggtctgctaccagacccgcgacctgctcgaagcgatgcgccaggacggcacgccgcccagcgcgctgcgggtggacggcgggatggtggtgaacaactgggtgatgcaattcctcaccgacatccttggtgtcaccgtggagcgcccggaagtcaccgagaccaccgccctcggcgtggcctacatggccgggctgaaggccggcttctatcgcgacctggacgacatcgccagccactggcacctgcagcgccgcttcgccgcgcacatggccgaggagcgccgcggcgaactctacgccggctggcagaacgcggtgcgacgggtgcgcagcgaggcctga

SEQ ID NO: 318743 - DNA, 786 bp, Pseudomonas aeruginosa
atgcagctcgagttccaccaggtcgacgcgttttcttcccgcccgttcagtggcaatcccgccgtggtctatcgcctcgacgcctggctggcggacgagctgatgcagatgatcgcgaccgagcacaacctctccgagaccgccttcgtcgttcgcgaaggagaggcctggcggatccgctggttcaccccgagcgtcgaggtggcgctctgcggccacgccacactggctgcggcccacgtactgttcgaggtctacgacgagccgggcgagcgcctggaattcatctcgcgctccggtgcgctgcgggtcaaccgcgaggacgagcggctggtcctggatttccccgcgcagtatccgagcgaggtcggtagcaccgtcgagctggagcaggccctgggcctgccgccggtggacgtgctgggctccaccgacaagctgctggtgctgctcgagtccgaagaggcggtgcgcgcctgtcgccccgacttcgcggccctggcgcggctgccctggcgtggagtgatcgtcaccgcgcggggcctgcagaaggatttcgtctcgcgcttcttcgccccggcgatgggcgtcgacgaagacccggtcaccggctccgcgcattgcagcctgattccctactgggcccagcgcttgaacaaactgtcgctgaccgcccagcagtgctcggcgcgcggcggcgagctgtggtgccggttggagggcgagcgggtgagtatcgccgggcatgcggtgctggtggcgagcggaaggattcgattgggctga

SEQ ID NO: 318744 - DNA, 315 bp, Pseudomonas aeruginosa
atggctaagccgaatgatacgtccaaccccgaggtaacagaatcgtccccccgcttcgtcccgctgctacccacctcccaggccgacatgtgtccgcgtagcgccaccctgtacgtggacacccatgcactccccacgcacttgttcgacaacgcgaaagtgcgcttgaggtcggcaatcaacatcctggccatgacccgtttgctcgatgagaaagaagagcccggcggcaccctggcctacatcaacggtgcgttgctgtcgctgctcagcgatgccttgtccgaaatcgaggcgggccacccgagcctgtag

SEQ ID NO: 318745 - DNA, 423 bp, Pseudomonas aeruginosa
atgttccccatccttcgcccgctgctccataccgctgccctggcctgcgccctcccggcgctcgccgcggacccgcaaccggccagcggcggctgggcgcaacccgacccggcgccgatcggctatgcggtgctgaacgtttcccgcgagcgggtcgagtccggcactgcctgcgatatcggcctgtacgtccacgacgaactggtcggcaacctgcaaccgggcgccagcctggccctgaacctgcaacccggcgcggtggacgtgcgtcttgcgccgaacggtcctggcgacgcctgccggaacggcatgaccatcctcgccggacagaccctgaccctgcgcgccggagagatccgcaacctacgcattaccctcggtgcgggcgggctctatctggcaccggtggcggatgggtactga

SEQ ID NO: 318746 - DNA, 531 bp, Pseudomonas aeruginosa
atgtccatccgccgctattccccgtcacagatcgccctgcactggctcagcgccgtcgcggtcctgctgatcatcgccctgccctacggcgccgacttcttcgccggcctgctcggcggcaagggcaacgtcttcaccctgcacaagtcgctgggcgtggcggtactcctgctgaccctgacacgcctggcgctgcgccgcgtccagggtgtcccggataccctggaggggaacccggactggcagcgcgcggccgccaaggccgggcatttcctgctgtacgcggtgctgatcgtcatgccgctctccggcatgctcgccggcaagcgtccgctggacctgttctggctggtgcagatcggcccgttcgacctgccggaagccttcaaggcgttcgccggcggcacccacgtcaccgtccagtacctgcttttcgcgctgatcctcggccacgccgccgcggccatctggcaccaccgcgtgcagaaggacgacgtactgcgcgccatgctgccgcaacgcggcgcctga

SEQ ID NO: 318747 - DNA, 198 bp, Pseudomonas aeruginosa
atgcaagtcttcaaggttcagggcatgacctgcggccactgcgtacgggcgatcacccatgcggtgcaggcgaaggattcggcggcggacgtccaggtggatcttggcgccggcgaagtccgggtcgccagccggctcgacagcacccaggtactcgaggcgatccgcgaggagggctacggcgccgagctggcctga

SEQ ID NO: 318748 - DNA, 639 bp, Pseudomonas aeruginosa
atgcgacgcacaaaggaagattctgaaaaaacccgtacggccatcctcctggccgccgaggaactgttcctggaaaagggcgtgtcccataccagcctggaacagatcgccagggccgccggggtgacccgtggcgccgtctactggcacttccagaacaaggcccacctgttcaacgagatgctcaaccaggtacgcctgccgccggagcaactcaccgagcgcctgtccggctgcgatggcagcgacccgctgcgctcgctctacgacctctgcctggaggccgtgcaatcgttgctgacgcaggagaagaagcgccgcatcctgaccatcctgatgcaacgttgcgaattcaccgaggaactgcgcgaggcgcaggaacgcaacaacgccttcgtgcagatgttcatcgaactctgcgagcagttgttcgcccgcgacgaatgccgtgtgcggctgcatccgggcatgaccccgaggatcgcctcgcgcgccttgcacgcgctgatcctgggcctgttcaacgactggttgcgcgacccgcgcctgttcgacccggatacggacgcggaacacctgctggagccgatgttccgtggcctggtgcgcgactggggtcaggccagctcggcgccgtag

SEQ ID NO: 318749 - DNA, 1179 bp, Pseudomonas aeruginosa
atgaacctgcgcatcctgctgatactgggagccctgagcgccttcgggccactggccatcgatttctacctgccgagcttcccgaccctggccaaggccttcgccaccgacgtcgagcacgtccagctgagcctggccgcctacttcgccggcctgtccatcggccagttgctctacggcccggtggccgaccgctatggccggcgcctgccgctgctggtgggggtgagtatcttcaccctggcctcggccgcctgcgccctggcgccgagcctggagtggctgatcgccgcgcgcttcgtccaggccctcggcggctgcgccgggatggtcatctcgcgggcagtggtgcgtgacctgtgcgatccgatcggcgccgccaaggcgttttcccagttgatgctggtgatgggcctggcgccgatcctcgcccccgtggccggcggcctgctgctggactggcagggctggcaatcgatcttcgtctgcctgaccctgttcgccgccctggccggcctcggcgtggcgttgtggctgccggaaaccatcccggccgacggcgagcgaccgccgctgtccggcgcgctggggcagtaccggcggctgttcgccgaccgcctgtttctcgcctatggcctttccggcggggtggcgatggccgggatgttcgcctacatcgccggttcgccctacgtgttcatccagctctacgggattcccgccgagcactatggctggctgttcggcagcaatgccgcgggcttcatcgtcatggcacaggtcaacgcgcggctgctgcgctatcgcgggccggcgttctggctgcggcggatcatctggggctacctggcgtgcggcctggccctgctgggcatcgcctcgctgcaaccggccacgctgtggccgctgctggttccgctgttcggatgcgtggccagcctcggctgcatcattcccaacgcttccgcctgcgccatggccggacagggacagcacgccggcagcgcctcggcgctgatgggcagcctgcagttcagcgtggcggcgggcgcttcggcgctggtcggcgtgctccacgacggcacggcgatccccatgactctggtgatcgccgtctgcggcgcggtcgcgaccctgctcgcctggcagaccgggcgcctggagcgccaggccgcctga

SEQ ID NO: 318750 - DNA, 177 bp, Pseudomonas aeruginosa
atgaacatcctcgtccgcccgtcgcaaaccccgaaaggccaatgctggcaagtctgcctcgaccagcaggccgtcaacttccgtagcgaaagcgaggcccggcgtttcgtcgaccgcctcgaggcgcgcctgcgcgcgccccatgtgctgcccgaactgaaacagcgaacggcctga

SEQ ID NO: 318751 - DNA, 924 bp, Pseudomonas aeruginosa
atggactatattgcggagccggctaccgacatgtcgcacacctccgactggcccctgccggccgacagcctgcgcttgccgatcccggcggcgctgctggagaaactggcggtccacccgctcagccgcgacctctaccccacctccctgggccactaccggcgcgcccgcgaccaccgcatgagccgcgagcgccatgacgagcacctgctgatctattgcagcgaaggccagggcctgttgcgcgtgcgcgagggcgaggcctggcgcgaataccgggtcggcagcggcgacctgctctggctgccgccgggcatggcccacgactacgccgccgacgaccgccaaccctggaccatcttttggacccacctgcgcggcgacagcgccacctggctgcaacacagcgccggctaccgcgacaccccgctgcgccattggggcctgcaacacgccctgctcggcggcttcgagcaactgctggaggtgcgccacagcggctaccgcttccagcacttcctgctcgccgccagccgcctgcgcagcctgctctgccagctaccgctgctgcgcccgctgcgcgagggcagcctggacctcgacgggctgcacgcctacatgcgcgaacacctgcatgcgcgcctcgaactggaacgcctggcggccttctgcaacctgtcgaagttccatttcgtcagtcgctacaaggcgatcaccggccgtacgcctatccagcacttcctgcacctgaagatcgagtacgcctgccagttgctggacagcagcgaccagagcgtggctcgggtcggccaggcggtcggctacgacgacagctactacttctcgcgcctgttcagcaaggtcatgggtttgtcgccgagcgcctaccggcagcgggtaaggcagggcgagggaggagcctga

SEQ ID NO: 318752 - DNA, 1494 bp, Pseudomonas aeruginosa
atgtcagtcccagtccgccacctcatcgcgggagccttcgtcgaaggtctcggcgcccagcgcatcccggtcagcaatcccctcgacaacagcaccctggcggagatcgcctgcgccagcgcggagcaggtcgagcaggcggtggccagtgcccgcgaaaccttcgccagctggaaggaaaccccggtttccgagcgcgcgcgggtgatgctgcgttaccaggcgttgctcaaggaacaccacgacgaactggcgaagatcgtctccagcgagctgggcaagactttcgaggacgccaagggcgacgtctggcgcggtatcgaggtggtcgagcacgcctgcaacgtgccctcgctgctgatgggcgagacggtggagaacgtcgcccgcaacatcgacacctacagcatcacccagccgctgggcgtgtgcgttggcatcaccccgttcaacttcccggcgatgatcccgctgtggatgttcccgctggccatctcctgcggcaacgccttcatcctcaagccttccgagcaggtgccgctgaccagcgtgcggctcgccgagctgttcctcgaggccggtgcgccgaagggcgtgctgcaggtggtgcatggcggcaaggaacaggtcgaccagttgctcaagcacccgcaggtgaaggcggtgtccttcgtcggctcggtcgccgtcggccagtacgtctaccacaccggcaccgcgcacaataagcgcgtgcagagcttcgccggggcgaagaaccacatggtgatcatgcccgacgcggacaaggcacaggtcatcagcaacctggtcggtgcctcggtgggcgcggccgggcagcgctgcatggcgatctcggtggcggtgctggtgggggccgcccgcgagtggattccggaaatccgcgacgcgctggccaaggtccgccccggcccatgggacgacagcggcgccagctacggcccggtgatcaacccgcaggccaaggcgcgcatcgagcgcctgatcggccagggcgtggaggagggcgcgcaactgctgctggatggccgcggctacaaggtcgagggatacccggacggcaactgggtcggcccgacgctgttcgccagggtgcgcccggacatggcgatctaccgcgaagaggtgttcggcccggtgctctgcctggccgaggtcgacagcctggagcaggcgatccgcctgatcaacgaaagcccctacggcaacggcacctcgatcttcaccagctccggcgccgcggcgcggaccttccagcaccacatcgaggtcggccaggtgggcatcaacatcccgatcccggtaccgctgccgttcttctccttcaccggttggaagggctcgttctacggcgacctgcacgcctacggcaagcagggcgtgcgcttctacaccgagaccaagaccgtgaccgcgcgctggttcgacagcgatagcgtggccgggaccaacttctcgatccagatgcgctga

SEQ ID NO: 318753 - DNA, 897 bp, Pseudomonas aeruginosa
atgaccgacatcgcattcctcggcctgggcaacatgggtgggccgatggccgccaacctgctcaaggccggccaccgggtgaatgtcttcgacttgcagcccaaggccgtgctgagcctggtcgagcagggcgcgcagggcgccgatagcgccttgcagtgctgcgaaggcgccgaagtggtgatcagcatgctgccggccgggcagcacgtggaaagcctgtatctcggcgacgacggcctgctcgcgcgggtcgccggcaagcccctgctgatcgactgctcgaccatcgccccggagaccgcgcgcaaggtcgccgaggccgccgcggcgaagggcctgaccctgctcgacgcgccggtttccggcggcgtcggcggcgcccgcgccggaaccctgagcttcatcgtcggcggccccgccgaaggcttcgcgcgggcccggccgatcctcgagaacatgggccggaacatcttccacgccggcgatcacggcgccggccaggtggcgaagatctgcaacaacatgctcctcggcatcctcatggccggcaccgccgaggccctggcgctgggggtgaagaacggcctcgacccggcggtgctgtccgaggtgatgaagcagagttccggtggcaactgggcgctgaacctctacaacccctggcccggggtgatgccgcaggcgccggcgagcaacggctatgccggcggtttccaggtgcgcctgatgaacaaggacctcggcctggcgctggccaacgcccaggcggtgcaggcctcgacgccgctcggcgcgctggcgcgcaacctgttcagcctgcacgcccaggccgatgccgagcacgaagggctggacttctccagcatccagaagctctaccgcggcaaggactga

SEQ ID NO: 318754 - DNA, 1887 bp, Pseudomonas aeruginosa
atgacgtacctgcagcagcacgcccgctcgatcgccgagccggccgcgttctgggccgaacaggcccgttccctggcctggtaccaggcgcccgcgaacatcctcgaaagcctgcccgacggcacccatcgctggttcgccgatggccgtctgaacagcgcctacctggccctcgaccggcagatcgaggaggggcgcggcgaacagaccgcgctgatctacgactcgccggtgaccggcacccaggaccgctacagctacctgcggctgcgcgacgaagtggcgcgcctggccggcgccctgcgggccctcggggtcggcaagggcgaccgggtgatcatctacatgccgatggtgccgcaggcggccatggcgatgctcgcctgcgcgcgtctgggcgcggtgcattcggtggtgttcggtggcttcgctccctacgagctggccctgcgcatcgacgacgccacgccgaagctggtgctcaccgcttcctgcgggctggagttcgatcgggtgatcgaatacaagccgctggtggacaaggccctcgaactggcgatccaccagcctgcccacgtcatggtctggcaacgcccgcaggcgcccgcgcgcctgcacccgggccgcgacctggactggcaggactgcctcgccgccgccgagccggccgatccgctgccggtggccagcggcgatccgctgtacatcatgtacacctcgggcaccaccggtaagcccaagggtatcgtccgcgacaacggtggccacgcggtcgcggtacgctacgcggtccgcactatctacggcatgcaggccggcgacgtctggtgggggatctccgatgtcggctgggtggtcggccactcgctgatcgtctacggcccgctgatgtgcggctgtaccacggtgttctacgaaggcaagccggtgcgcacgccggatgccggcgcctactggcgggtgatcgaagagcacagggtgaacagcctgttctgcgcgccgacggcgatccgcgcgatccgcaaggaagacccgcatggcgaacgggtgaagcgctacgacctgggttcgctgcgccacctgttcctggccggcgagaagctcgacagcagcacccagcactggctggaggagcacaccgggcggccggtccacgaccattggtggcagaccgagaccggctggccggtgaccgcgccctgcatcgggatcgccggccacgacctgcgggccggctcgaccaaccgcgcggtgcccggctaccacgtgcaggtgctggacgacgaaggccggccgctgggagcgaaccgccagggcgcgatcgtcatcgccctgccgttgccgccgggctgcgcgcagaccctctggggcgaccacccgcgctacctgcaggcctacctgggcaactatcccggctactaccacaccggcgacggcggttatctcgacgaggacggcttcgtctacatcatggggcgcaccgacgacgtgataaacgtttccgggcatcgcctctccaccggcgagatggaggaacgcgtggcgcagcaccaggcggttgtcgagtgcgcggtgatcggcgtgcgggacgaactcaagggccacgtgccgctgggactggtggtgctcaaggacgatgccgggatcgccgccgagcaactgcagcgcgagctggtggcgctggtccgcgaacagatcggcgcgctggcctgcttccagcgggtggtggtggtcaagcggctgccgaagacccgctccgggaagattctccgcgcggtgctgcgcaagatcgccgatggcgaggactacgcggcgccatcgaccatcgacgacccgacgatccttggcgagatcgaggctgcgctgagggtgcgcaaggcgggatag

SEQ ID NO: 318755 - DNA, 1014 bp, Pseudomonas aeruginosa
atgaaagctgtcggttactaccaatccctgcccatcgaccatcccgacgccctgctcaacctcgaactgcccgagcccacgccgggcccgcgcgacctgctggtggaggtccgcgccatctcggtcaacccggtggataccaaggtccgccagcgcgcccagccggaagccggccaggccaaggtgctgggctgggacgcggcgggcgtggtgcgcgcggtcggcagcgaggtcagcctgttccgtcctggcgatcgggtctggtacgccggggacatcacccgccccggtagcaacagcgagctgcatcgggtcgacgagcgcattgccgggcacctgccgaaaagcctcgacttcgcccaggccgcggccctgccgctgaccaccatcactgcctgggaactgctcttcgagcgcttgcagatcgccgaaggcaaggccgaccagggccagagcctgctggtggtcggtgccgccggcggggtcggttcgatcctggtccaactggcccggcaactgaccggcctgaacgtgatcggcaccgcttcgcgcgcagagacccaggcctgggtccgcgacctcggcgcgcaccatgtgatcgaccacggcaagccgctggccgaagagctgaagcggatcggtgtcgccgaggtcagccacgtcgccagcctgacccacaccgaccagcacctcgaacagatcgtcgccgcgctgcgcccgcaaggccgcctggcgctgatcgacgacccggcgtcgctggacatcggcaagctgaagcagaagagcctgtcgctgcactgggagttcatgtacacccgctcgatgttccagaccgacgacatgatcgagcagcaccggctgctggagcgggtcgccgggctaatcgacgaaggcgtgttgaagaccaccgtcggcgagcatttcggccgcatcgacgcggccaacctgcgccgcgcccacgcgctgctggagagcggccgggccaagggcaagatcgttctcgaagggttctga

SEQ ID NO: 318756 - DNA, 294 bp, Pseudomonas aeruginosa
atgagcacacccctcaccctgatcgccaccatcgccgccgcccccggccacgccgaggccctggagcgcgaattgcgcgccctggtcgccccgtcgcgcgccgaggctggttgcctgcagtacgacctgcatcaggaccgccacgactcccacctgttctacatgatcgagcagtggcgcgacgacgccgccctggagcggcaccagaacaccgaacacttcctgcgcttcagccgcggcaacgaagccctgctgcagaacgtgaagatcgaccaactctatcgcctcgcctga

SEQ ID NO: 318757 - DNA, 921 bp, Pseudomonas aeruginosa
atgctgcgttacgacgacctccaggtgttcgtccacaccagcgacagcggctcgttgtccgccgccgcgcgccagttggagatttccccggcggtggccagcgcggcgctgaagcgcctggaaagcgagctggaggtacgcctgttcgcccgctccacccgcagcctgcgcctgactcccgagggcgacgcgttcctcctgcatgcccgcgcctcgttgcgcagcctggaggaggggcgccggttgctgcagggcggcaaggaccagatcgccggggtactgcagctttccgcgccctccgacttcggccgcaacctgctgctgccctggctcgacgagttccaggcgcgctatccgcaactgagcctgcgcctgctgctcggcgaccgggtgaccgatctctaccggcaaccggtggacgtggcgatccgctacggcgcaccggccgattccagcctggtcgccctgccgctggcgccggccaaccggcgagtgctctgcgccgcgccgggctacctggcggagcgcggcgagccgcgccagccggacgacctgcgcgagcacaattgcctgctctaccaactcggcggccgggtacacgaccgctgggcgttccagcggggccgccgcagcctgaccctgacggtcgccggcgaccgggtctgcgacgacgccgacgtggtgcggcgctgggccctggccggcaaggggctggtctacaagtcctggctggacgtggccgaggacgtgcgagtcgggcgcctgcgcctgctgctgccggagtggcagggcgaggcgacgccgatgaatctgttgtgtacccaccgcgcccagttgacccgcccggtgaccctcttgcgcgcgttcgtgcgcgagcgttgcgacgcattgctggcggaggctccatggacgaggaactga

SEQ ID NO: 318758 - DNA, 309 bp, Pseudomonas aeruginosa
atggacgaggaactgaaccgggcggcgagcctggccatcgagctggcggacgtggacagcgccgcgcggttgcacgaggggaaaccgcagaattcggaaaaatcctacgctaaggtttctgtgagcctgagaatatgctcttcaatgactcagcctggggcgcaagccgaaaccgccgaaaactctgcaagccaattaaatggacttgtcagggctagagtgagtagcgtccagaaaaataaggaaagtctctcaaaaaacaagccccgccggaacggggcttgttggtggctaattagccagccttga

SEQ ID NO: 318759 - DNA, 273 bp, Pseudomonas aeruginosa
atggatattaaaaataacctttccgattatactgaaagcgagttcctggagatcattgaagagttcttcaagaacaaatcaggactaaagggtagtgagctagagaagagaatggataaactggtcaagcacttcgaggaagttacttctcacccacgaaagagtggggtaattttccatccgaaacctggctttgaaacgcccgaaggcatagtgaaagaagtcaaagagtggcgtgccgccaacggcctccctggcttcaaggctggctaa

SEQ ID NO: 318760 - DNA, 2334 bp, Pseudomonas aeruginosa
atgagcgacgtttttgaccttggaagcatgaccacagtagcaaccgctgctggtcagtactctttctacacacctccgccacctacccctattccataccttacctatatcgcccgtcccggcatcaataaatttgatcttcctgaaggggcgaaaatcaaggatctgattaagcgctatcagtatattggttcgcaaatcccggcagcaatcatgattcgtggtgtgcaggaagagatcaaaaaatccacgaacactgccttggccaatgtgggggcgattgtcgatggcgaactggcgtatcttgctagccagaaaaaggaaaaattaaatcctgccgaggcgacacccttgcagatggcctctgctgaaaaggccgcggcggtggaactgcttgcgtccaaacagaaggaactggctgacgcacgaaccattgcaaatgcattctttggctatgaccctctcacggtcaattatgttaatgtaatgaatgaaatctacggccgccgcgaagataaagatttcagtttcgacaactggtcgaagtcttattcagccgcacaaaagatccgcttgatcgaagcggaaatcagcgtcctcaatagccgctcctccgccctggatggcaaggtcgccgaactgacccggcttcagcggctggaggacgcacagcgcgccgcagaggccgcccggcagacggaagcggagcgcttagcgcaagagcaacgtcaagctgaagcccgacggcaggccgaagaggctcgtcgccaggccgaggctcagcgacaagccgaactgcaacgcttggccgaagcagaggccaagcgagtcgcagaggcggagaaaaagcgtcaagacgaaatcaatgcgcggcttcaggccattgtcgtatcggaaagtgaggccaagcgcatcgaggaaatctacaagcgtctggaagaacaggacaaaatcagcaaccccaccgtcactacccctcccgcagtcgatgccggctctcgggtcgatgacgcactcgcccataccggaacccgtgtgacctctggaggagaaactggagcaacgggtggctccggtcgggatgttgatacgggtactggacaaggaggcatcacggcgcgcccggtcgatgtcggcagtgtttcaatccctgaccggcgtgacccgaaaattcccgaccagccaaggagggatcttggctcgttggttcctacttttcccgacttcccgacgttccctagctttccgggcgtcggtgtaccagcagcggctaaacctctgattccagcaggtggcggtgctgcgagcgtttccaggactctcaaaaccgcagtggatttgctttcggtggcccgcaagacccctggtgcaatgttgggtcaggtagccgctgtcgtcgccactatggcggtcagttccttctggccgaaactgaacaatggtgaacggcaggcctcctttgccattccggttgcggaactgtctccgccactggcggttgactggcaagccattgccgccgccaaaggaacggtggacctgccttaccggctgaaaaccctcaatgtcgatgggtcgattcaaatcatcgccgtaccgaccgagccgggtagtgcggcggtccccgtcagggcgctgactctggactccgcctcggggacctacaaatacacgactaccggccctggcggcggcaccatcctagtcaccccggatactccacctggccagatcgatccgtcgtcttcgacacccgcagtgccccgtggcccgctgatcatgcccggcacactgctgattccgaaggaaccgcagatcgagtcctatccagaactcgaccaacgggagttcaacgacggcatctacgtctacccggaagacagcggtattccgccactctatattgtttatcgagatccgcgagatgagccgggcgttgctaccggtaatggccagccggtcactgggaactggctggccggcgcctcgcaaggtgacggagtgccgattccgagccaaatcgccgatcagttacgcggtaaggaattcaagagttggcgagactttcgggagcagttttggatggccgttagcaaagacccatcagctctcgaaaacctctcccccagtaataggtactttgtcagtcagggccttgctccttatgctgtgccagaggagcatctgggtagcaaagaaaagtttgagattcaccatgtagtccctctggaaagcggcggcgctctttacaatatagacaatcttgttatcgtcactccgaaacgccacagcgaaattcataaagagctgaaacttaaacgtaaggagaaataa

SEQ ID NO: 318761 - DNA, 780 bp, Pseudomonas aeruginosa
atgcgcctggtcgacacccacaaccacctcgacttcccggacttcgacgccgaccgcgccgcgctgctgcaacgcagccgcgcgctgggggtcgagcgccaggtggtgctcggcgtctaccgcgagaactggcaacgggtctgggacctggcgcaggccgaggatggcctgtacgcggcgctcggcctgcaccccgtctacctggcgcggcaccgcccgcagcacctggacgacctgcgccagtggctgcaacgcctgcgcggcgagacgaagctctgcgcggtcggcgagatcggcctggactactacctggaacacctcgaccgcgacgcccagcaggcgctgttcgaggcccaactgcggctggccgcggaattccgcctgccggcgctgatccacgtgcgccgcgcccacgcggcgaccatcgccaccctcaagcgcatccgcctggagcgccgtggcatcatccatgccttcgccggcagccgcgaggaagcccgcgagtacctcaagctcggcttccgcctcggcctcggcggcgcgccgacctggccgcaggccaaccgcctgcgcaaggtggcggcggagctgccggccgaggccatcgtgctggaaaccgatgcgccggacatggcgccatcgatgcatcccggccagcgcaacagtccggagcacctgccggacatctgccgcgccctcgccgagctgcgcggggtcgacgccgaggaactggcggcgagcagcagccgcaacgccgccgagctgttcggctgggactga

SEQ ID NO: 318762 - DNA, 990 bp, Pseudomonas aeruginosa
ttgaaactcagtgatatcgcccgcctggccggggtctcggtgaccaccgccagctacgtcatcaatggcaaggccgcccagcggcgcatcagcgccgccaccgtcgagcgcgtgcttgccgtggtcgaggaacacggctaccagccggaccagcaggccgccggcctgcgccgcgggcagacccgcaccctcggcttcatcctcccggacctggaaaaccccagctacgcccgcctcgccaagcaactcgaacaaggcgcccgggcgcgcggctaccagttgctgatcgcctgctccgacgacgagccggagaccgagcgccaggtggtcaacctgttccgcgcgcgccgctgcgacgcgctgatcgtcgccagttgcctgccggccggggatgatacccatgcccggctggtcgccgaaggcctgccggtggtggccatcgaccgccagctcgacccgcagcgcttcgcctcggtgatcagcgacgaccaggacgccgcgcgccgcctcaccgaaaccctgttgcaaccggcgccgcgccatatcgccctgctcggcgcgcgggcggacctgatcatcagccacgaccgcgccgccggcttccgccaggcgctgaaggacttccgcggcgaggtcatcgtcgagcatgccgaggtgttcagccgcgagtgcggacgccgcctgatggagcaattgctcgagcgcctgggctacctgcccgacgccctggtgaccactgcctatgtactcctcgaaggcgtcttcgatgtgttccaggcgcgcgccgacggttggcccgaaggcttgcgggtggcgaccttcggcgacacccagttgctcgacttcgtgccgctgaaggtcaactcgatctaccagcagcacgcgctgatcgccgccaacgccctcgaactggcgctccgcgcggtcgaggagaacgactaccggccgggcctgcacgccgtcccccggcaactcaagctgcgcgactga

SEQ ID NO: 318763 - DNA, 2871 bp, Pseudomonas aeruginosa
atgctcgaactcgatacccggcagatccgcatgggccagcgcgccgcggacaaggccgaagccctgcgcctgctcggcgcggcgctggtcgccgacggcctggccgcgcccggctatgccgagggcctgaaggcgcgcgaggcacaaggctccacctacctcggccagggcatcgccataccccatgggaccccggatacccgcgagctggtcttcagcaccggtgtgcgcctgctgcaattccccgagggagtggactggggcgatggcgagcaggtctacctggccatcggcatcgcggcgaagtccgacgaacacctgcagctcctgcaattgctcacccgcgccctcggcgaggccgacctgggaccggcgctgagcgcggccgccagcgccgaggaagtcctcggcctgttgcagggcgcgccgcaggaactggcgctggacgcacaactggtcggcctcggccagaacgccgaggacctcgacgaactggcctggctcggcgcgcgcctgttgaagaaggccggctgcgtggagaacggcttcgccgccgtgctccagcagaccgaaccgttgccgctgggcgacgggctgtgctggttgcacagcgaacaattggtgaagcgccccgggctggccttcgtcactccggcgcaaccgttgcagcaccaggggcaactggtcaccgggctgttctgcctggccagcctgggcgaagcgcaccaggcgctgctcgaacgcctgtgcgacctgttgctggaagggcgtggcgccgagctggtgcgcgccaccagcagccgcagcgtactcgcggcgctcggtggcgagctgccgccggactggcccagcgcgcgagcggtcctggccaacccgcatggcctgcatgcccgcccggcgcaggcgctggcgcagctggccaagggtttcgccggcgagatccgggtacgcctggccgacagcgaggcggcccccgtctcggcgaagagcctgagcaagctgctcgccctcggcgcgcgacgcggccagacgctggagttcagcgccgagccggcgatcgccgaggacgcgctgccagccttgctggccgcggtgcgcgaggggctcggcgaggaggtcgaagcgctggcggaggaggccttgcccgatgccgtcggcgaggcggaagaggatgcccggccggcgccgctgcgcgccggcgagcgcctgcaggcaatcgccgcgtcgccgggcatcgccagtggtccggcgcatgtccaggtggcgcagcgcttcgagttccagccgcgcggcgagtcgccggcccatgaacgcgagcgcctgctgcgggccaagcgggcggtggacgaggagatcgtcggcctggtcgaacgcagcacggtgaaggcgatccgcgagattttcgtcacccaccgggagatgctcgacgatccggaactggccgagcaggtgcaactgcgcctgaatcgcggcgaaagcgccgaagcggcctggagtcgggtggtggaagacagcgcggcgcaacaggaggcgctgcacgacgcgctgctcgccgagcgcgccgccgacctccgcgacctcggccggcgggtgctggccaggctctgcggggtggaggcgccgcgcgagccggagcagccgtacatcctggtgatggacgaggtcggcccctccgatgtcgcccgcctcgacgcccagcgggtcgccggcatcctcacggcgcgcggcggcgccacttcgcacagcgcgatcatcgcccgcgccctcggcattccggcattggtcggcgccggcgcggcggtgctcggcctggagcctggcacggcactgctgctggatggcgagcacggctggctgcaggtggcgccgagcaccgaacagttgcagcaggccgccgccgagcgcgacgcccgccagcagcgccaggcccgcgccgacgcgcagcggctggagcctgcgcggacccgcgatggccacgcggtggaagtctgcgccaaccttggcgacaccgccggcgccgcgcgcgcggtggagctgggcgccgagggcgttggcctgctgcgcaccgagttcgtcttcatgaacaacgcccgcgcgccggacctggcgacccaggaagcggaataccgtcgggtgctcgacgccctcgacggacgtccgctggtggcgcggaccctggatgtcggcggggacaagccgctgccgtactggccgattccccacgaagagaatccctatctgggcctgcgcggtatccgcttgaccctgcagcgaccgcagatactcgagacccagttgcgcgcgctgttccgcgccgccggggagcggccgctgcgggtgatgttcccgatggtcggcagcctcgacgaatggcgccaggcgcgtgacctggcgctgcgcctgcgcgaggaaatcccgctggccgacctgcaactggggatcatggtcgaggtgccctcggcggcgttgctcgcgccggtgctggcccgcgaggtggacttcttcagcgtcggcaccaacgacctgacccagtacaccctggctatcgatcgcggccacccgagtctttcggcccaggccgacggcctgcatccggcggtgctgcaactgatcgacatgaccgtccgcgccgcccatgccgagggcaagtgggtcggcgtctgcggcgaactggcggccgacccgctggcgttgccgctgctggtcggcctgggagtggacgagctgagcgtctcggcgcgcagcatcgccctggtcaaggccggcgtgcgcgaactgcagctggtcgctgcgcgcggcctggcccgcaaagccctgggcctggcgagcgccgccgaggtccgggccctggtggaagcggaggtgcagtaa

SEQ ID NO: 318764 - DNA, 945 bp, Pseudomonas aeruginosa
atggcgcggatcctgacgattaccctgaacccggcgctggacctcaccgtgcgcctgcgccagctggaactgggggcggttaaccgcagcgaggcggtgctgacccaggccgccggcaagggtctgaacgtcgcccaggtgcttgccgacctcggccatcggttgacggtcagcggcttcctcggcgaagacaaccagccgccgttcaccgccatgttccagcgtcgtggcttcgccgatgcgttcgtccgggtgccgggcgaaacccgcagcaacatcaagctggccgagcgcggcgggcgcgtcagcgacctcaacgggccgggcccggaggccgacgagcgagcccaggcggcgttgctcgaacgcctcgaccggcttgccggggagcacgagctggcggtggtcgccggcagcctgccgcgcggggtcgagccggaatggctgggcgaactgctgcggcgcttgcggcgcctcggcctgaaggtcgccttcgacagcagtggcgcggccctgcgcgaaggtgtgaaggctgcgccgtggatgatcaagccgaacgtcgaggaactggccgatctctgctcggcgccgatggatgacctggtcgcacagcgccaggcggccgaacgtctgcgccatgacggggtaggccaggtggtgatttcccagggcgccgcgggggtcaactggttcgccgccgagggtgcctggcaggcgcggccgccggcggtggaagtggccagcacggtgggcgccggcgattccctgctggccggcatgctgcacgggctggccagcggctggccggccgagcgggtgctgcgtcaggccaccgccatcgccagcctggcggtaacccagttcgagttcggcatcggcgatccgcagcgcctggcgcggatcgaagcgggcgtcgtggtgcagccattggtcgaggaggcctga

SEQ ID NO: 318765 - DNA, 1758 bp, Pseudomonas aeruginosa
atgaaactagcgatcgtcaccgcctgccctggcggacaggtcaccagcgtgctcgccgcgcgcctgctgcggggcgccgccgagcgcctgggctgggaaacctgcgtcgaggcgaatgccgggtcgaggcccgagggcgaactgagcgccgaacagatcgccgaagccgactgggtcctgctggtcggcgtcgagccgctggcggcggcgcgtttcgtcggcaagccggtgtatcgcgcgcgtcccgccgaggcgctggccgatccgcgcgccttcctccagcgggccgccgccctggcgagcgtggaggtcgccggggacgaggccggcctggttgcgccggaggccggagcggcaccgcggatcgtcgcggtgaccgcctgtccgaccggcgtggcgcacaccttcatggccgccgaggcgttgcagctcgcggcggggcaactgggcttcgcgttgcaggtcgagacccagggctcggtcggcgcgcgcaacccgctcgacccggcggacatcgccgccgccgacgtggtcctgctggccgccgacatcgacgtggacacggcccgtttcgccggcaagaagatctaccgttgcggcaccggcgtggccctcaagcaggcccgcgcgacgctcgagcgggcgctggcggaagggcaggtcgagagcgcgggcgcagccagcgcggtggtcgccagggacgagaagcgcggggtgtacaagcacctgctgaccggggtgtcgttcatgttgccgatggtggtcgcgggcggcctgctgatcgccctgtcgctggccttcggcatcgatgcctacaagcagccgggcagcctggcggcggtgctgaggacggtcggcgacacggctttcgtcctgatggtgccgatgctcgccggctacatcgcctattccatcgccgaccgcccgggcctggcgccgggcatgctcggcggcctgctcgccgggaccctcggcgccgggttcatcggcgggatagtcgccggcttcatcgccggctatgcggcgcgggccatcagccacgggctgaggctgccggcgagcctggaagcgctgaagccgatcctggtcatcccgttgctggccagcctggtcaccggcctgctgatgctctacgtggtcggcaagccggtggccgggatgctcgcggcactgaccgggttcctcgacggcatgggtacctccaatgccatcctcctcggcctgctgctcggcgggatgatgtgcgtcgacctcggcggaccggtcaacaaggccgcctacgccttttccgtcggcctgctctcgtcgcacagctacgcgccgatggcagcggtgatggcggcgggcatggtgccgccgatcggcatgggcctggcgaccctgctggcgcggcgcaagttcgccgagagcgagcggcaggccggcaaggcagcctcggtgctggggctgtgcttcatctccgaaggcgccatcccgttcgccgccaaggacccgttgcgggtgatcccggcgagcatcgccggcggcgcgctgaccggcgccctgtcgatgtacttcggctgcaagttgcaggcgcctcacggcgggttgttcgtgatgctggtgcccaacgcgatcaaccacgccctggcgtacctgctggcgatcgtcgccggcagcctgcttaccgggctgctctacgccgtgctcaagcgcggcgccgagccgggactggcgttggggacctcgtcctcgcgggagccggcggctggcggatag

SEQ ID NO: 318766 - DNA, 1395 bp, Pseudomonas aeruginosa
atgaagatcagcgtattcggcagtggctatgtaggactggtgcaggccgccgtcctcgccgaagtgggccacgatgtactgtgcatggacatcgaccggaacaaggtcgaacgcctcgcgcagggcctcgccagcatctacgaacccgggctcgacgccttgctgcgcgaaggcctggacagcggccgcctgcgtttcagcagcgatgcgcgcctggccgtggaacacggccgggtgcagttcatcgcggtcggcaccccgcctggcgaggacggcgcggccgatctcggcgcggtcttcgcggtggccgatgccatcgccgagcatcgccgcaagcccgtcatcgtggtggagaaatcgaccgtcccggtaggcaccggcgaccgcctgcgcgcgcacatcgagcggcgcctggaagccgacggacgcgagctggaattcgagatcgtctccaacccggaattcctcaaggaaggctccgccgtcgccgactgccggcgcccggaccgcatcgtggtcggctgcgacaacgaagaggtgcgccaggtgatgcgcgaactctacgagccgttcaaccgcaaccacgaccgcatgctgttcatgggcctgcgcagcgccgaactgaccaagtacgcggcgaacggcatgctggcgaccaagatcagcttcatcaaccagatcgccgaactggccgaacacctcggtgccgacatcgaggcggtgcgccagggcatcggcgccgacccgcggatcggctaccacttcatctaccccggctgcggctacggcggctcctgcttccccaaggacatgcgcgcgctgatccacagcgccgagcaggcgcattgctccagcgacctgttgcaggcagtggaagcgatcaaccggcggcagaagcacaagctgttcgaacgcatccgggtgttctacgacggcgacctgcgcggcaagaccttcgccctctggggcctggccttcaagccgaacaccgacgacatgcgcgacgcgcccagccgcgaactgatggaagcgctctggcgccacggcgcgcaggtgcgcgcctacgatcccgaagccatgcaggaaacccagcggctctatggccacgacgaacgcctgagcctgatgggcacccccgaggcgaccctgggaggcgccgatgcgctggtcatctgcaccgagtggcagcaattcaaggcaccggatttcgagctgctcaaggagcgcctgaaggccccggtgatcttcgacgggcgcaacctctacgaccccgagcgcatggcccgccacggcttccactactacccgatgggacgcgggcagtcctgctcgttgccgatcaacgaggccagcctcgcacaggaagatggcatgcgcctgttgcgccaggcctga

SEQ ID NO: 318767 - DNA, 414 bp, Pseudomonas aeruginosa
atgaacgcgctacgcggctggctggcggcgctgggcagcatgctgctggccagcgccgcccagctcggcatgcgctggggcatgagccgcctgccgctaccggaagcctgggccgggcaaacgccggagcgcgccgcgttgctcgcggtagccctggcggtggcggcctacgccgcctccctgctgtgctggctggccgccctgcgccacctgccgctgggccgcgcctacagcctgttgagcgccagctacgcgctggtctacctgctggcggcgagcctgccggcgttcgatgaaaccttcagtaccagcaagaccctgggcgtaggcctggtggtgctcggcgtgttgaccgtcaacgcccgccgcaccgctgccgcgcccgcgcatcatccgtcgaggaaagcaccatga

SEQ ID NO: 318768 - DNA, 348 bp, Pseudomonas aeruginosa
atgagcgccgcgctgctgctcgccaccctgctcatgaccggcctcggccaggttgcgcagaagctcaccgtggagcactggcgcctggtcgccgccgacggctggacggcgcgcctgcgcagtccgtggccgtggctggcgctgctcgccctcgggctcggcctgctctgctggctgctgctcctgcaacgggtggaagtcggcagcgcctatccgatgctggcgctgaacttcgtcctggtcaccctggcggcacgcttcgtcttcgatgagccggtggatcgccgccacctcgccggcctgttgctgatcgtcgccggcgtggccctgctcgggaggagcgcatga

SEQ ID NO: 318769 - DNA, 1650 bp, Pseudomonas aeruginosa
atgagccgccgccagacctgttcgctgctgctgatcgccttcggcctgttctacctggttccattgagcaaccatggcctgtggattcccgacgagacccgctacgcgcagatcagccaggcgatgctgctgggcggcgactgggtgtcgccgcacttcctcggcctgcgctacttcgagaagccggtcgccggctactggatgatcgccctcggccaggcggtcttcggcgaaaacctgttcggcgtgcgcatcgcctcggtcgtcgccaccgccctcagcgtcctgctcgcctacctgctggcccgccgcctgtggcgcgacccgcgcaccagcctggcgtgcgcgctgctctacgccagcttcggcttgatcgccgggcagtccggctatgccaacctcgacccgcaattcaccttctgggtcaacctgagcctggtggcgctgtggcatgccctcgaggcggggagccgccgcgcgcgcctgctcggctggaccctgctcggcctcgcctgcggcatgggcttcctgaccaagggcttcctcgcctggctgctgccggtgctggtcgccctgccctacatgctctggcagcggcgctggcgcgagctgcttggctacggcgcgctggcggtgctggcggcgctgctcgtctgcctgccctgggcgctcgccgtgcatgcgcgggaagcggactactggcggttcttcttctggcacgaacacatccgccgcttcgccggcgaagacgcccagcactctcgcccgtggtggttctacctgccgttgctggcggtctcctgcctgccctggagcggcctgctgccgagcgcgctgcgccaggcctggcacgagcggcgccaagcgccggtggtcttcctggcgctatggctgctgttgccgctggcgttcttcagcctgagccggggcaagctgccgacctacatcatgccctgcctgctgccgctggcactgctcatgggccacgtcctggtgcagcggctgcgcctggggaacagcgtcgcgctgcgcggcaacgggctgctcaacctgggcctggcgctcctcgcgctggcggccctggcctacctgcaactgcgcaagccggtgtaccaggaagaacccttcgagctgttcctggtcctcctggtgatcggcgcctgggccgccgccggcctcgcccagtggcgctacccgctacgcgcctgggccgcgccgctgctggcgagctgggtgctgatcgcgctgctgccggcagcgatgcccaaccatgtggtgcagaacaagacccccgacctgttcgtcgccgaacacctcgacgaactgaccggcgcccgccatctgctgagcaacgacctcggcgccgcctcggccctcgcctggcgcctgcgtcgtagcgacgtgacgctctacgacacgcgcggcgagctgaagtacggcctctcctaccccgagcacagccagcgcagcgtgcccttggcagacatccgccagtggctctggcaggcacgccaggacggctcggttgccgtgctgctgcggatcaacagcgccagcgaccgctaccagctggcgctgttgccgggcgacggcgaacgctaccggaacggcaacctggtcctggcgatcctgccgcaggtgcgcccatga

SEQ ID NO: 318770 - DNA, 888 bp, Pseudomonas aeruginosa
gtgatccaggccggcctgcgcatcgacgtcgacaccttccgcggcacccgcgacggggtgccgcggctgctcgagctgctcgacgaagccgggctgaaggcgaccttcttcttcagcgtcggcccggacaacatgggccgccacctctggcgcctggcgcgcccggcgttcttctggaagatgctccgctcgcgcgccgccagcctgtatggctgggacatcctgctggccggcaccgcctggccgggcaagccgatcggccgcgaactcggcccgctgatgcggcggacccaggccgccggccacgaggtcggcctgcacgcctgggaccaccatgcctggcagacccacgccggcgtctggagcgtgcagcagctcggcgagcagatccgccgcggcagcgattgcctggcggacatcctcggccagccggtgcgttgttccgccgccgccggctggcgcgccgacggccgggtggtcgaggccaagcagcccttcggcttccgctacaacagcgactgccgcggacgcggcgcgttccgcccgcgcctggccgacggcagccctggcatcccgcaggtgccggtgaacctgccgaccttcgacgaggtggtcggtcccggcctgccgcgcgaggcctacaacgacttcatcctggaacgcttcgccgctggccgcgacaacgtctacaccatccatgccgaggtcgaggggctgctcctcgccccggcgttccgcgaactgctgcggcgcgccgaacggcgcggcatccgcttccgcccgttgggcgaactgctgccggacgatccgcgcagcctgccgctggccgaactggtgcgcggccgcctggccggccgcgagggctggctgggagtgcgccagccatga

SEQ ID NO: 318771 - DNA, 1989 bp, Pseudomonas aeruginosa
atgacctcgaaagccgtcgtcttcgcctaccacgacatcggttgcaccggtatcgaagccctgctcaatgccggctacgagatcgccgccgtcttcacccatgccgacgacccacgggaaaacaccttctacgcctcggtcgcgcgcctctgcgccgagcgcggcattccgctgcacgcgcccgaggacgtgaaccatccgctgtggctggagcgcatccgccaactgcgcccggactatctgttctccttctactaccgccgcctgcttggcgccgaactgctcgcctgcgccgcacgcggcgcctacaacctgcacggttcgctgctgccgcgctaccgcggacgcgccccggcgaactgggtgctggtcaacggcgaaacgcagaccggggtgaccctgcatcgcatgatcgagcgcgccgacgccgggccgatcctcgcccagcaggccgtcgccatcgaccccgaggacaccgccctgagcctgcacggcaagctgcgcaaggccgccggcgccctgctgcgcgacagcctgccgctgctcgccctcggcgtgctgccggaagtcgagcaggacgagagccaggccagccacttcggccggcgcaccccggcggacggcctgctcgactggcacaggccggcacggcagttgtacgacctggtgcgcgcggtgacccagccctaccctggcgccttctgccaggtcggcgaacagaagctgatcgtctggagcgccgaggtggtcgccggcaaccacggtcgcgagccgggcagcgtactgtcctgcgacccgctgcggatcgcctgcggcgaggactcgctggtgctgcgcttcggccagcgcggcgagcgcggcctgtacctggccggcacgcaactggccaccgagctgggcctggtcgagggcgcgcgcctgcgtggcgcggcgtccggcccgcagcgccgcacgcgggtgctgatcctcggggtcaacggcttcatcggcaaccacctgtccgaacgcctgctgcgcgacggtcgctacgaggtccacggcatggacatcggctccgacgccatcgaacggctcaaggccgacccgcatttccacttcgtcgaaggcgacatcggcatccattcggagtggctcgaataccatgtgaagaaatgcgacgtgatcctgccgctggtggccatcgccacgcccatcgagtacacgcgcaacccgctgcgggtgttcgaactggacttcgaggaaaacctgcggatcgtccgctactgcgtgaaatacggcaaacgcgtggtgttcccttccacctccgaggtctacggcatgtgccaggacccggacttcgacgaagaccgctcgaacctggtggtcgggccgatcaacaagcagcgctggatctactcggtgtccaagcagttgctcgaccgggtgatctgggcctacggccagcagggcctgcgcttcaccctgttccgtccgttcaactggatgggcccgcgcctggaccgcctggattcggcgcggatcggcagctcgcgggcgatcacccagctcatcctgcacctggtcgaaggcacgccgatccgcctggtcgacggcggcgcgcagaagcgctgcttcaccgacgtcgacgacggcatcgaggccctcgcgcggatcatcgacaaccgcgacggccgctgcgacgggcagatcgtcaacatcggcaacccggacaacgaggcgagcatccgccagctcggcgaggaactgctgcgccagttcgaggcccacccgctgcgcgcgcagttcccgcccttcgccggcttccgcgaggtggagagccgcagcttctacggcgacggctaccaggacgtggcccaccgcaagccgagcatcgacaacgcccggcgcctgctcgactggcagcccaccatcgaactgcgcgagaccatcggcaagaccctcgacttcttcctccacgaagcgctccgcgagcgcgaggcacaggcgtga

SEQ ID NO: 318772 - DNA, 1020 bp, Pseudomonas aeruginosa
atgaagccctatccgatcgacctggtctcggtggtgatcccggtctacaacgaggaagccagcctgcccgaactgctgcgccgcaccgaagccgcctgcctggagctgggccgcgccttcgagatcgtgctggtcgacgacggcagccgcgaccgctccgcggaactcttgcaggccgccgccgaacgcgacggcagcgccgtggtggcggtgatcctcaaccgcaactacggccagcacgcggcgatcctcgccggcttcgaacagtcccgtggcgacctggtgatcaccctcgatgccgacctgcagaacccgccggaggaaatcccgcgcctggtggagcgcgccgcgcagggctacgacgtggtcggcagcatccgcgccgagcgccaggactcggcctggcggcgctggccttcgcgcctggtgaacctggcggtgcagcgctccaccggggtcgccatgcacgactacggctgcatgctgcgcgcctaccggcgcagcatcgtcgaagcgatgctggcctgccgcgaacgcagtaccttcatcccgatcctggccaacggcttcgcccggcatacctgcgagatccgcgtcgcccacgccgagcgcgcccacggcgaatcgaaatacagcgcgatgcgcctgctcaacctgatgttcgacctggtcacctgcatgaccaccacgccgctgcgcctgctcagcctggtcggcggcggcatggccctggccggcttcctcttcgccctgctcctcctcgtgctgcgcctggccttcggcgccgcctgggccggcaacggcctgttcgtgctgttcgccgtgctgttcatgttcagcggcgtgcagttgctcggcatgggcctgctcggcgagtacctcgggcgcatgtacagcgacgtgcgcgcgcggccgcgcttcttcatcgagcgcgtggtccgcgccacgccctccgcgcttccctcggccctacagcgggccggtttcacctcttcatccagcgagccttccacgccatga

SEQ ID NO: 318773 - DNA, 855 bp, Pseudomonas aeruginosa
gtgttcgtcgacgtcgaccgcgacaccctgatgtgttcggcgcaggcagtggaagccgccatcggcccgcgcacccgcgccatcgtgccggtgcactacgccggctccaccctggatctcgaaggcctgcgcacggtcgccgggcgccacggcatcgccctggtcgaggacgccgcccacgcggtcggcagcgaataccgcgggcgcccggtaggcgcccgcggcacggcgatcttttccttccacgcgatcaagaacctgacctgcgccgaaggcgcgatgttcgtcagcgacgacagcgccctcgccgaacgggtccgccgcctcaagttccacggcctcggggtcgatgcctacgaccgcctgagccatggacgcaagccgcaggcggaagtgatcgagcccggtttcaaatacaacctggccgacctcaacgccgccctcgcgctggtccagctcaagcgcctggacgcgctcaacgcgcgccgccaggccctcgccgaacgctacctggaacgcctcgccggcctgccgctggcgccgctcggcctgcccgcgcacgagcagcgccacgcctggcacctgttcatcctgcgcatcgacgccgaggcctgcggcctgggccgcgacgccttcatggaagccctgaaggcgcgcggcatcggtagcggcatccatttcatcgccagtcacctgcaccactactaccgccagcgccagccgcgcctgagcctgcccaacagcgagtggaactcggcccgcctgtgctccatcccgctgttccccgacatgcgcgacgacgacatcgagcgcgtcgcccgcgccatcgaggagatcctggagaaacgtcgatga

SEQ ID NO: 318774 - DNA, 360 bp, Pseudomonas aeruginosa
gtggccctgcgcgtgcccaccggcagcccggacgcggtacgcctggaacatcgcgtcgccggcgccgacgccaacccctacctgctgctggcctcggtgcttgccggggtgcaccacgggctgaccaacaaggtcgagccgggtgccccgatcgaaggcaactcctacgagcagttggagccgagcctgccgaacaacctgcgcgacgccctgcgcgaactggacgacagcgagatcctggcgaagtacatcgatccgaagtacatcgacatcttcgtcgcctgcaaggaaagcgagctggaggagttcgagtactcgatctccgacctcgagtacaactggtacctgcacaccgtgtga

SEQ ID NO: 318775 - DNA, 1371 bp, Pseudomonas aeruginosa
atgtcgaatcctccccccaccgcagaacgaacccagcttcgcaagtccctcaagctgtggcagatcgtcatgatcgggttggcctacctgaccccgatgaccgtcttcgacaccttcggcatcgtatccgggatttcccagggacacgtgcccaccgcctacctgctggccctcgccggcgtgctgttcaccgcgatcagctacggcaagctggtccgccagttccccaccgcaggctcggcctatacctacgcgcaacgggcgatcaatccccatgtcggcttcatggtcggctggtcgtcgctgctggactacctgttcctgccgatgatcaacgcactgctggcgaagatatacctgaccgcattgttccccgaggtcgccccgtggatctgggtggtgatgttcgtgctgatcatgaccctcatcaacatcaagagcgtgaacctggtcgccaatttcaacaccgtcttcgtgctggtccaactggcgatcatcgtggtcttcatcggcctggtgattcacggcctgaacaacggggaggggaccgccacggtgctcagtacccagccgttcttctccgagcacgcgcatctctcggcgatggtggcgggggcgacgatcctctgcttttccttcctcggtttcgacgcggtgactacgctgtccgaggaaacccgcgacgccggcagggtgatcccgcgggcgatcttcctcaccgcgctgtacggcggggtgatcttcatcaccgtgtcgtatttcctgcagtcctatttcccgaccaacgtacgcttcaaggaacccgacgcggcgctgccggaaatcgccctgtacgtcggcggcaagctgttccagtcgatcttcctctgcgccaccttcatcaataccctggcgtcgggcctggcctcccaggccagcgtgtcgcgcctgctgtacgtgatggggcgggacaacgtgctgccggagcggatcttcggcttcgtccatccgaaatggcgtacgccgtcgatcaacgtgctcatcgtgggcatggtggcgctctcggcgatctccttcgacctggtgacggcgaccgcgctgatcaatttcggcgccctggtggccttcaccttcgtcaatctctcggtgatcgtgcatttctatgtgcgcggcgggcgcaaccgcagcctcaaggagcatttccactacctggtcctgccattgctcggcgcggccatcgtcgcggtgctctggctcaacctggaaagcacctcgctggtgatggggctgatctgggccggactgggcttcggctacctgttctacctgactcgcagcttcagccgtccgccgccgcgcttccaggagagcgagctgagcccgacccagtga

SEQ ID NO: 318776 - DNA, 1230 bp, Pseudomonas aeruginosa
atgacataccctgaacgtcccctgcttcatctgctgacgcgtaccagcctggtgggccagatcatcgtcggcctgatcgccggcctgctgctcgccagcttcttcccggccgccgcgctcaaggtcggcttcatcggcaaggtcttcgtttccgcgctgaaggccgtcgcgccggtactggtgttcgtcctggtgatggcatccatcgccaaccacaagcaaggccagcagacccatatccggccgatcctgctgctgtacctggtcggcaccttcagcgccgcggtggtggcggtgatcgccagcttcgccttcccctcgagcctggtgctggccagccacccgggcgagatgtcgcctccgggcggcatcgccgaggtgctccagtccctgctgctgagcgtggtggacaacccggtcaacgccctgatctcggccaacttcatcggcatcctggcctgggccatcggcctcggcatcgccttccgccacgccagcgataccacccgcaacctgctctccgagctgtccaacggcgtctcgctgatcgtcaaggtggtgattcgcttcgccccgctgggcatcttcggcctggtcgcctcgaccttcgccgagtccggcgtcgaggccctgaaaggctatgcccacctgctggtggtgttgctcggctgcatgctgttcgtggccttcgtggtcaacccgttgatcgtgttcctgaagatccgccgcaatccctatccgctggtgctgacctgcctgcgcgaaagcggcatgaccgcgttcttcacccgcagctcggcagccaatatcccggtcaacctgcagctctgcgagcgcctgggcctgcacgaagacacctattcggtatcgatcccgctgggcgcgaccatcaacatggctggcgcggcgatcaccatcaccgtgctgaccctggcagcggtgcataccctgggcatcgccgtggacgtaccgaccgcgatcctgctcagcgtggtggcgtcgatctgcgcctgcggcgcgtccggcgtggccggcggttcgctgctgctgatcccgctggcctgcagcctgttcgggattcccagcgaggtggcgatgcaggtggtggcggtaggcttcatcatcgcgatcctccaggactccgcggagaccgcgctgaactcctcgaccgacgtgctgttcaccgcagccgcctgcgaggcggaagagcgcaaggcgagcgccgcctga

SEQ ID NO: 318777 - DNA, 903 bp, Pseudomonas aeruginosa
atgtcgtctccttccttgcccgacgccagtctccgcgccagcaccctgcatctgccggccggtccctggagcaccgtgctcgactgtctctgcgcgcgtttcccggccatcgaccgcgacacctggctggcgcgcatgcagcggggccgggtgctggacgccgaggggcgtgcgctgggcccgcaggcggcatatcgcgaaggcctgcgtgtgcactacttccgcgagttgccggtggaggcaccgattcctttcgaggcgcgcatcctgtaccgcgacgagcatctgctggtggcggacaagccgcacttcctgccggtgatgccggccggcggctacgtcgagcagacgctcctggcgcggctggcccgcagcaccggcaatcgcgacctggtgccgctgcaccggatcgaccggcataccgccgggctggtgctgttctcgaccaatcccggcagccgcgggcgctaccaggcgctgttccgcgagcggcgcatcgacaagtgctacgaagcgatcgctccggccttgccgcaactggacttcccgttgctgcgcaggacccgcctggtgcccggcgagccgttcttccgcatgcgcgaaggcgagggcgagccgaacagcgagacgcgcatcgaggtcgtcgagcgcaacggccgctggtggcgctaccggctgtatccggtgaccggcaagaagcaccagctgcgcgtgcaccttgcggcactcggcgcgggtatccagaacgatgggttctatcccgagctgctggacgccgagggcagccccgacgactacctgcggccgctcaagctgctggccagggggctgtgcttcgacgacccgctgagcggggagaggcgtatgttcgaatccgggctgcggctcgattggcaggtgtag

SEQ ID NO: 318778 - DNA, 1875 bp, Pseudomonas aeruginosa
atgccccgtcatcccttctccccttccttcctcgccgccagcgtcttctgcgccgccaccccggccctcgccgcactgcaaccgatcgccgaggcgccgctggccggcgaaaccgagttccgctgccagttcaacgccgacaacagcaccgattgcgtgagcacctacagcttcaccatcctcaagccgagcggccgcgagatgctctcgcgcatcgatcgcagctacgcggagaccgacagcctgatcgtggagaaggccgagctgacccagcccggcggcaagccggtgccgctggaccagtcgcagatcgatacgcgcaccgcgccgaacccggaccagggcttcctgcgcgaacgccagacctccctggcgttccccaacctgcgcgtcggcacccgcatcagctacaccctgcgcgagcacttcaccgccaagccgctgagcacccagttccactacattctcagccgcccgccgatgccggtgcgcgacgaccgcttcgtcgccgagttcaaggccgagcggccgatcttcgtgcgcagcgagctgatggacgcctatcgcatcgaacagagcgccgacaagaagaccctcaaggtcagcctgaaaaagccgcaatacaccaactacatcaacgaagccggcaacgcctacctgcgccataccccgcgcctggagctgggcagttcgctggacctgcaggacaacttcggcccgttcgccgcgcgctacaacgagatcctcgccgcggagctgcccaagggcgccgcggcggccgtcgccgcggtgaagggcaagccggctcgcgagcaggtcgccggcctgatgcagtacatcaacgacacctaccgctacctgggcgactggcgcgccagcgagcgcggctacgtgcccttctccctggcggagatcgagcgcaatggctacggcgactgcaaggacctggcgatcctcctcgccgccatgctcaaggccgccgggatcaaggccgaaccgaccctggtcagccgcggcgacgtggtctgggacctgctggtgcccggcatgtacgcgccgaaccatgccatcgtccgcgccgaggtggacggcaagacctggtggctggacccgaccaacccggtgttcgctcccggccgcatcatgcccgacatccagcagcgctgggcgctggtgctgggcgccgacggcaaggtgcggcgcgacgagattccgctggaagcgcccggcgacaccctgcgcgtgacccgcagcgagcattacacccatgacggcgaagcccgggtcgagtcgcgcgtggagctttccaacgcgccgctgatgcagctcagcgtcgccgatcgccagcgcggccgcaccagcaccgaccaggacctgtgccgcaacttcgccaaggaaggcagcgactgcgtgctggagcgcgacgacagccagttcgtgctgccgcccagctatacgatcagtgccaggcttaccgaccgccgcgccctcgaccggctcggcggagagtatttctacaaccgccaggacctggccagccagtgggatgccttcgccaagtaccgtagcgaaggccagttggccgagctgtacctgggcgaaccgcagatcacgtcctacgacatcagcctgtccggcggcaagactgacgagccggcgcacagttgcgagatccgcagcccctggttcgacatcgacctgcaggccgaaccggccaaggatggcggctaccactatcgttatcgggaagtgcagaagaccagttggctcaaccacgacgagatcaacagcgccgagttcggcaagctgatcgagcagagccgcggttgcgtcgagcaactgcgcctggtggtcaagctggacaagcgtccctga

SEQ ID NO: 318779 - DNA, 261 bp, Pseudomonas aeruginosa
atgaagttcctgctgatcgggctgatccgcttctaccagtacgcaatcagcccgctgatcggtccccgctgccgcttctaccccagttgctcgcactacaccctggaagccatccgcgtgcatggcgcgctgcgaggcggctacctcggcgcgcgccggctgctgcgctgccacccctggcacccgggcggctacgacccggttccggagcgccaggaacaggcgtgcgcctgccacagaacggcaaagcccggcaaatga

SEQ ID NO: 318780 - DNA, 1356 bp, Pseudomonas aeruginosa
atgacccgagccctgcccctgctcctgcttgccctgtcccttcccgccgcggcgacggacagcgagtcgttcgcccgccgctacctggcctatgcccatgccgtcggccagcacagcgaacgactctggcccggctggcggatggccgacaaggccttcctctacagcgatggccgcagtacctgggtcgccgatgccgaaggccgcgcgcagcgcaccacggtggcgggcgacagcgacccggatctcgacctgagctatgcctttccgcgttaccggggccgtccggcggtgctgctgcagatcagcgccgcgcacctgcggagcaataccggcaatagcgagacgctggccgccatcggcccgcacgaagccttccatcgctacgcccaggaagactggccgggcctgcgcaagcccggtggctatcgcggcgacctggccacgctcgacccgcgcccgcgggaataccgctatgccctgttccagtcgctgctccaggccctgcgcacgcccgggcagcgcgacagctacctgagcgacgcccagggctggctgcgccgctggcgcgaagcggctcccgaggaaagccggctggcggcgcaggtcgatctcagcgaaggcaccgcgcgctacatcgagatggccgccgccgcgcgctaccgcaccgatttcgccgaggatccgcaacgctatcggcaggcgctgcgggagtacgccctggccttctacgatgccaacgagatcggcgtcggcgtcgacagcgaagcctacgagatcggcgcgctggccggagtgctgctggacctgcgcgacgacgacgcggactggaaggaagccgcgacggccggcacctggccgctggactacctgctgcgcgaccagcctccggcctggagcgaacttcccgacgacgcgcgggcgcgcggcgagcgctaccggcgcgagatgggcgccacccgccagcgcctggtcgagttgcaggaggccttcgccgacccacggcgaccgctgctggtgatcccgcaaccgcgacgcaccatcggcttcgccacggcggccagcgaggtgcgcgggggcttctacgtccttgccgacgggccgttccgccaggcctacctcggcgcgcgctggaatgtcggcgagctgaccctggacggcgtcgactacctggagggcgacgccgaggcgtactgcccgggctacggccgttcggcgctgattccgttgcgcggaggcgattggcgcgaaggcacgctggcgccggaagaacccggcctgcgcggccgcctggcgactgctcgcagcctcgtcgacgggcggaccctttattgcgcggcggagaatgctccttga

SEQ ID NO: 318781 - DNA, 933 bp, Pseudomonas aeruginosa
atgagcgaaaacaccccgcttctttccgtcgatctccccgccgaactgcgccagcgccagagcgaactggcgcagtcgctgctcaggcattgcccccgcgacggtatctacggcaccgccgtcgaccccctcgccctgatccgcgccgacggccccaccctgccggcgcgcggcatgcacaaacctgccctgtgcatcatcgcccagggccgcaaggaggtgcagttggccgaggaacgctatatctacgatccgctgcactacctggtggtctcggtcaccctgccgctggccggccaggtgatcgacgcctcgccggacgcgccctacctctgcgtccggctggatatcgacccggcggaaatcacccagttgatctccgacgccgggcccatggaagtggccagccggcgcggcgaccgcggcctctacgtcgaccgtatcgacgccagcctgctggatgcggtgctgcgcctgatccatctgctggacagcccgcgcgacatcccgatgctggcgccgctgatcctccgcgagattttctaccggctgctgcgcagcggccagggccagcgcctgcacgagatcgccatcgccgacagccaggcccaccgcatcacccgcgccatcgactggatcaaccagaactacggcaagccgctgcgcatcgagcaactggcccaggtggtcaacctcagcccctcgaccctgcaccaccgcttcaaggccgtgaccgcgatgagcccgttgcagtaccagaagcagctgcgcttgcaggaagcacgccggctgatcttcagcgagggcctggaagtggccgccgccggctaccgggtcggctacgaaagcccgtcgcagttcagtcgcgagtacagccggctgttcggcgccccgccgctgcgcgacctggcgcgggcgcgcaacaccgcctag

SEQ ID NO: 318782 - DNA, 177 bp, Pseudomonas aeruginosa
atgtcaaatcaacaggccagactgtcatcgggcggcgtgccgccggagcgcgcgccgggcgcctcccgttcgcggccggtgcgcgacggcgcgctggtccccgaggcgccttcccgttcgcctgccggccccgccgcgggcggcacgctggcgcggacccatcccggcaactggtaa

SEQ ID NO: 318783 - DNA, 297 bp, Pseudomonas aeruginosa
atgccagcgttcaatcgggccagtcacctggtcagcattcgcgcccgcagcggccagtcgcaccgcctcggcctgcgcctgcaagagctggcgcaggcgggccaggccgcgcccggttgcctgcgctacgaactgcgccaggcggacggggacgccgacctgtggctgttgcacagcgagtggagcgatgaagcggccatgcaggcgtacctgtccggcgacgcccagcgggtcttcgccgaggtgctctggcaagcgctggcggcgaccctggacgtgcaggagcggccgttctga

SEQ ID NO: 318784 - DNA, 1995 bp, Pseudomonas aeruginosa
atgtccgcctcgctccccaacgacaccccgcctgacgaagccctgcccctggtcctggccggtcccctgctgcgccgcgcagagcccggacgcctggtgttctggctggccacgtcatgcccgacgaccatcgaactgatcctcgccagcgaaggcgaggcggagcgtcgggtccgcctcgcggaaggaacccactcggccatccgcatcggcacccatgcctggctgcacctgctggatgtcgcgctcgacccgccgttgccctgcgcccgcctggtcgactacgacctgcgcctcgccgccgacggccgggagcctgcgggaatcgccgaatgggcgccgcatctgccctaccccggtcgccagcgcgccagcctggtgctcaagccacgtctcgaccagttgctccacggctcctgccgcaagccgcatcacccagcggccgatggcctgctgcaggtcgaccggctgctggaggaaaacctgctgcaggccgaaagccgcccggcgttgttgatgatgagcggcgaccaggtctacgccgacgacgtcgccgggccgatgctggtggccatccatgggttgatccaccgcctcggcctgtacggcgaacacctggaaggcgcactggtgaacgacagcgaggcactctacgcgcacccggccacctactaccggcgcgaggacctgctgcccgccttcgagtccaacgaagccctgcgcgagcgcttcttcggcggggtgaagaagccgatcttcacctcggccaacgcccacaaccatctggtcggcctggccgaggtgctggcgatgtacctgctggtctggtcgccggcgccctggcgcctggtcaggctggaaccgccgccggggctggatgcgcggcacgcgcagcgcttcgccggcgagcgccggcacatcgaagccttccgcgatggcctgccccgcgtggcgcgggcgctggcgcatatctcgtcgctgatgatcttcgacgaccacgacatcaccgacgactggaacctttcagcacgctgggagctgaccgcctacggccatccgttctcccggcggatcatcggcaacgccctgctcgcctacctgctctgccagggctggggcaacgacccgcagcattgcggcgaatggctggcgccggtcgcggccctgatggagggtgccgcggcagacggccggctgccctgcgccgagcaggaccgcctgctcgatgccctgctcgacttccagcactggcactaccggttgcctggcagcccgaccctgatcgtcctcgacacgcgcacccgccgctggcgtagcgagcgcaacctgggccggccctccgggctgatggactgggaggcactgagtgaattccagcaggacctgctcggcgaaaaggcggcgatcatcgtgtcgccggcgccgatgttcggggtcaagctgatcgagggcgtgcagaagctcttcagctggatcggccagccgctgctggtcgatgcggaaaactggatggcccatcgcggcgcggcctcggtgatgatgaacatcttccgccactcgcgcacgccgggtaactacctgatcctttccggcgacgtgcattactccttcgtctacgacatccggattcgccaccgcgagcgcgggccccggctctggcagatcaccagcagcgggatcaagaacgaattcccgcgacgcctgctggactggttcgaccgcctcaaccgctggctctatgcgccctggtcgccgctgaactggctgacccagcggcgcagtctggaaatccgcccgcgcgttccgcagcacagccaggccggcgagcgcctgtggaacagcgccgggatcggccaggtattcattggcgaggacggccgtccgcgcgcggtgttgcaggtcaatgccgatggctcgccggcgaccgccttcgagcgacatcgcgacgtcgaagacgaacgagcggaccagtcgccggtcgcgccgggtcgctga

SEQ ID NO: 318785 - DNA, 507 bp, Pseudomonas aeruginosa
atgggcatggatcagacacgcaatcgcctcgtcggcctgatgttccagaacgactattcctggctgagcgggcgcctgcggcgctacctcggctgcccccacagcgccgaggacatcgcctcggaaaccttcctcaaggtccttgccctgccggacccggcaagcatccgcgagccgcgcgcgctgctcaccaccatcgcccgccggctgatgtacgacggctggcggcgccaggacctggaacgcgcctacctggaaagcctggccgggcttccggaggccctcgcgccgtccgccgaggagcaggcccaggtggtggaaaccctgctgcgcctggagcgcatgctcgccgggctgtcgccgaaggcccgcgccgccttcatccatagccagatcggcggactgacctacgtggagatcgccggcttgctggaggtttccgtcagccgcatccaccagtacatggtcgagggcttcaagcagtgctaccaggtgcttgccgaatga

SEQ ID NO: 318786 - DNA, 954 bp, Pseudomonas aeruginosa
atgagccagggaaggcgagaacgcatcctcgacgaagcggcgcagtggatggcgctgctgcaatccggccatgccggcgccgaggagcgcctggcgttccagcagtggcgccaggccgatgccgagcacggtgcggtgttcgaccggctcagcctgggcttgcagtcgtttcgcgacgagcccctgcacggcttgcgcgccgagcaattgatcggagccctcgaggcgccgtccgcccgtcgccggtttctccagcgcagcctcgccctggcggcgttcggcgtggcgacgctggcgctggggcggatcggcatcgtcggcttcccctggcccggcgacctgtacaccggcaccggacaacgccagagcttccgcctggaggatggcagccaactggtgctggacgcgcgcagccgggtacgccccgaattcgatggctaccggcgtcgcctgcgcttacgcgagggccgcctgctggttgacgtggcacgggatccggcgcggccgttcgtcgtcgacaccgggcgtggccaggtcgaggcgcagggaacccgcttccaggtcagcgatgacggcgccagctcgcgagtggtggtgctcgagtcgcgggtgcggatcaccactgccgacggacggcaatgcctgttggagcgcggccagagcgcccgtttcgacgcctcggcgattctcgcccgaggtcctgccgaaggcggcgagagcgcctggctggatggccggctggaggtccgcgaccgcccgctgggggaggtgctggaagcgttgcgcgcctatcgccgcggcatcatcagcgtcgccgacgacgcggcggcgctgcgcgtcagtggcatctacccgctggacgacagcggcgcggcgctggcattgctggagcagagcctaccgatccggctcgactaccacgggccctactgggtcagcatcgccagccgctga

SEQ ID NO: 318787 - DNA, 471 bp, Pseudomonas aeruginosa
atgcaacacagccaagtgtcccccaacgcgcgccagcaactggccgagaccgtggtcctgaacaaggcccgcctgggcctgtcctggcaggacctggccgacggcaccggtctcgccctgaccttcgtcaccgccgccctgctcggccagcatgccctgccagaggcggcggcgcgcaaggtcgccgcccaactcggcctggacgacgacgcggtgctcctgctgcaaagcatcccgctgcgcggcagcattcccggcggcattcccagcgacccgaccatctatcgcttctacgagatgctgcaagtctacggcagcaccctgaaggcgctggtccacgaacagttcggcgacggcatcatcagcgcgatcaacttcaagctggacatcaagaaggtcgaggacccggaaggcggctcgcgggcggtgatcaccctcgacggcaagtacctgccgaccaagccgttctga

SEQ ID NO: 318788 - DNA, 663 bp, Pseudomonas aeruginosa
atgcgtgacatcatcgacggctttctccgcttccagcgcgacgcctacccggcgcgctcgcaactgttcaagtccctggccacccggcaagcccccaaggcactgttcatcgcctgctcggacagccgggtggtccccgaactgctgacccagcgcgagcccggcgaactcttcgtgatccgtaatgccggcaacatcgtccccggctacgggccgcagcccggcggggtcagcgcctcggtggaatacgcggtggcggtgctcggggtcggcgacatcgtggtctgcggccactcggactgcggcgcgatgggcgccatcgcttcctgcgcctgtctcgaccagctgccggcggtggccggctggttgcaccacgccgaggccgcacgggcgatgaacagcgcccacgaacacgcctccgaggcggcgcggctggacgccctggtgcggcacaacgtgatcgcccaactggccaacctgcgcacccacccctgcgtcgcccgcgccctggagcagggtcggctgaacctgcacggctgggtctacgacatcgaaagcggccgcatcgacgccctcgacggcgccagccggcgcttcgtctccctcgccgagcatcccgaagtgcgcgcggtaggcggcgaacccgggcaggcggtcgcctga

SEQ ID NO: 318789 - DNA, 2286 bp, Pseudomonas aeruginosa
gtgacggaccgtgccgccccttccaactggatgctcgccctgctcgcctgcgcgcaactgatcatcgccctcgacgccaccatcgtgttcgtcgccctgccggaaatcagccgggcgctggatttctcggcgcaacgcctgcaatgggtggtgagcgcctatacggtggccttcggcggcttcctcctgctcggcgggcgcgccaccgacctgctcggccggcgccgcatgtacgtcctcggacaaagtctgtacgccctcgcctccctcgcgggcggcctggcccagagcgagttgccgttgatcctcgcccgcgccgtgcagggcctgggtggcgcgctgctgttcccggcgaccctggcgctgatcggcaatcacttcgccgagggcccggcgcgcaatcgcgccctggcgatctggagcatcgcctcggcgttcggcctggccctcggctcggcgctcggcggcgcgctcaccgaactgttcggctgggcctcgatcttcctggtcaacgtgccgctggccggcgctgcggcgctgctcgccctgcgtctgatcccggccgacgcccggcgccagcgcggccggcgcttcgacctggccggcgcgctgacggtcaccgccggcgccaccctgctggtcttcgccctggtccagggccccgagtcgggctgggatgcgccctcggtacgtttcggactttacctttccgtcccgctgctgctggcgttcctcgccatcgaacactacagccgcgacccgctgatgccgctgcgcctgctgggcaaccgcaacctgcaggtggcgatgctactgaccgcgatcttcatgagcagctacggcgtgcagtactacttcctggccatctacttccagtcggtgtacggctacagcgtgttgcagaccggcctggcgttcctcccggcgactctgctctgcaccctcggtatccgcgtcgccgagcgcctgctggcccgccacggggcacgcgcgacgctggtcgccggcctgctgctgggcgcactcgggctcggcctgctggcagcgtgcctgccgctggggcgcggcttcctggcgctgctgccggccatcgtgatcctcagcgtcggccagggcatgacctggaccgccatgtgggtcagcgccgccagcggtgtcgaccccgccgaacagggcgtcgcctcggggatggcctcgatgacccagcagatcggcggtgcgctcggcctggccctgctggtggcgctggccaacgcccaggtgcgcggcgccgatgccgccagcctgctgaccagccaggcgcgcggcatcgaatgggtgaccgcgctcagcgccctgctcgccctgtttggcgccgccctggccttgcgtctgcgccgcgaggaacccgcggcgttgcagccgagtcgcggctgccagggcctggaaggccaggggcgcggcgccgggatggctgccctggcgccagaacagcgctacctggcgggtcggcagcgccggccgcagcgccatgcagcgcaacccggcctgctggcgcgccaccgcctccggcaggatgctggccagtcttccgcggcgaaccacgtcgacgatggcgctgatcgagttcgcctccagcgccacccgcgccgtcaccccttgctggcgcaggtaagcgtcgatgtgccggcgcgtggcgaagtcgtcgcgcaacaacgccaacggcaactccgccagcgctgcggcggccagcggcgcgtccgccgccgggtgttccgcccccagcaccaggcccaggcgctccaggtagagcggctggctgtcgatctccaccgaacccggctcgctgaaggccacaccaaggtccaggcgatcgtcgatcagcgccgcctccagggcgtcctggggcaactcctcgaggctcaactcgatgcccggatagcgctgattgaacggatccaccagggcgcccaccagatagcaggtgaaggtcggcgtcatgcccaggcgcaggcggccgcgactgaggtcgcgcacctcgtggatcgctcgttgcgccgcttccagctcgcgcaaggcacgccgcgcatgaagcaggtacagctcgccggcatcggtgggacgcacgctcctgccggagcggtcgagcaattgcacgcgcagttgctcttccagttgccgcacctgctgcgacagggtcggctgcgaaacgtgcagcgcctcggcggcgcgggtgaagttgcgatgctcggcgacagcgagcaggtagcgcaggtggcgaagcagcatggaaacatccaactatag

SEQ ID NO: 318790 - DNA, 903 bp, Pseudomonas aeruginosa
atggacctgaatgccgtcaagttgctcgcccgcgtggccgagacccgtagcttcacccaggccgccgtttccctcggtctgacccagtccggcctgtcgcgcgccatcggccggctggaagccgaactcggcgtgcgtctgctgcaccgcaccacccgcagcgtcagcctgaccccggacggccagctgttctacgagcgctgcgcacccttgctggcggagctggaggaagtcgagaagttgctggtggaccgccagtgcgcgccgagcggtccgctgaagatcaccaccccgcaggcgctcgggcggatcgtgatcatgccggcgctgcgcgaactgacccggcgctacccgcaattgcagatcgaggcggcgatgaccgatcgcctggtcgacctcaccgaggaaggcttcgacgccgccgtgcgtctcggccgggtcggcgacgtgcgcctgatcgcccggccattggcggcgttgcgctgggtcacggtggcgtcgccggaatacctgcgcagtcacggcacgccggagcgcctggagcaactcgccgggcacaactgcccgacggtgcgcgacctgcataccggcaagctgctggaatggcagttccagcgcgacggccagccgctgagcctggcggtgcgcggcgacctggtgctggacgtggccgacgcgctggtcgacgcggcgctggtcggccagggcatcgtccaggtgatgggcttcatggccgaggaggcgatccgccggcgtcgactggtacgcatcctccagccgttcgaaccgccgctgtgcccggtgtcgctgatctacccgccgtcgcggcagtgctcgctgaagatcggcgcgctctacgaggaactgaagagcgcgcactggtgcggggcgctgacgtactga

SEQ ID NO: 318791 - DNA, 2958 bp, Pseudomonas aeruginosa
atgccgcaccatgctccatccacacgcctgccttccagcctggccctggccgcgctgctcgcggcggcctacgccgcgccgccggaggcacgtgcggagacgcccgcgcccgccgccaaggcgctcaccttcgacgtcgccgccggcccgctggaccaggtgctgctaggcatctcgcggcagagcggcttgctgatctccttcgagcagtcgctggtgcgcggccggcaggcgccggcggtgcgcggtccgctgagtgtcgaccaggccctggaacaggccctgcgcggtagcggcctgcagttccgccgttccgagcgcggcgcggtgatttccgccgcgccgctgcgcgcggccgtaccggcggcgaaggtgcagccgctggcggcgaaagcggagcagaccctggagcgggtggtggtgaccggctcgcggattccccgcgcccagcaggaagggccgtcgccggtcacggtgatcagcagcgaggaaatccagaaccgtggctaccgcaacgtcttcgaggccttgcagacgcagacccagaacaccggcatgacccagggcgaggactacggcaacacctggcagccggcggccaacgccctcaacctgcgcgatctcggccccaaccacacgctggtgctgatcaacggccggcgcgtcgccgactacccgaccgcctatggcggctcggtgaacttcaccaacctggcgaacatcccggcggtcatgatcgaccgcatcgagatcctcagcggcggcgcctcggcgatctatggctcggatgccatcgccggggtggtcaatatcgtcctgaagaagaaattcgatggcgtcgacgtcaacctgcgcgccggcaccaccgagcgcggcggcggcgacaaccagcgcctgcaactggtcggcggcggtgcgacgggcgacttcgaaggcctgttcggcctgcaggtcgagcagcgccagccggtctgggccaaccagcgcggtttcatggacagctacccggacggcaacaacgtcggttaccggctgaacccgcagagcggacgctacctcggcgacgcctcctgcgccggcctcggcggcctgttcggcggcaacgtggcgccggtgccgggcgccaggggtggctatcgctgcatgaccgaccagtactacaacaactactggaccctgcagaccaagaaggaaaactacgacggctacgccggcggcacctggcacctgagcgacagcggcaagctgttcgccgacctgctgttcggcttcgaccacctgcagaacaatacccgcggaccgtccttcacctcgccggacttcatcaatgcctccagcggcgacctggagcgctggtaccggctgttctcgcccgaggagatcggcggcaagagcagcaacaacagcaagtggcgcgaggtgtcctggaccggcaccctcggctacagcgaccgcgtcgccaatacttcctgggaatacgaactggccgcgacccgctccgagtaccgcagcgaccgcactacccgctacaccccggcggccgggatcctcgacctgtacctgggccgcaagctcggcgaacgcgacggctacccggtctacgatcccgatccggcgcgcctcggacgtccgctgagcgaggaagagtggcgcagcctgcggcgcaacgtgacccagcacagcgagtcctactcgcagacctacagcttcaccggcaacggcgaactgttcgacctgccggccggcccggtggccttcgccggcgtgctggaggtgggcaagcagggctacaggatccgtcccgactcgcaatacaacgacggctctctctacaacgtctccaaggccagcagctccggcggctcgcgcgaccgttacgccgccggcggcgaattcagcatcccgctgcacgacacgctgctggcgtccgccgccggccgctgggaccagtacaggttcagcggtcgcaccgaggagcagaccacctacaacctggggctggagtggcgcccgctgaccagcctgctgctacgcggcagctacggcaccagcttccgcgcgccggacctgaactacatctaccaggccgacgccaacggctactacccggcgcagaaggactactacggttgcgagaaaggcgtcgacggcgcctgcaagaacggccgggtcgactacgtgcagagcggcacgcccgacctgaagtccgagcgcgggcgctactggagctacggcttcgtctggtcgccgtcgagcaggttcgacttttccgccgactactaccacatccagatcgatgacctgctgaccaccctcgatccggacaaactgctgcgcgacgaggcggcctgccgcagcggcgggctcgatccggactcggcgcagtgccgcgacaccctggcgcgggtcgagcgcaacgccggcgacgccagcgtcgacccgaatcgcctgaacaaggtctacgtcaatgccatcaacgcggccaaggagcgcaccagcggcatcgacctgcgcagcaacatccgctggggcgccggcgactacggcgccttctcctcgaccctcggctacaccctggtgttgtcccacgactacaagcagtccgacgactaccccagcgagaaccagcgcgacagcctcgactcccacgactggcgcagcaaactcaacgccagcctgacctgggactacgcacagttcacctcgacgctcttcgcggtgcgctacggcagcgttaccaacgccgctggcagcgggcgcctgagcccgtggacggtgttcaacgccagcgcccgctaccggctcaacgaacgcgccagcgtcggcctgacggtgaacaacctgctcgaccagatcaagggggacgactccgatggctggccgtactatcccaccggcaactacgacgccatgggccgccaatggtggctggacttcagctatcacttcggtggttga

SEQ ID NO: 318792 - DNA, 1809 bp, Pseudomonas aeruginosa
atgcccggacgcatcctggtcttcgcctgctgcctgctcgccagcctggcccgcagcgagccgcgccatgccatcacgctctacgacgagccggcgaaatacccgccgggtttccagcacttcgacttcgtcgacccgcaggcgcccaagggcggcagcctgcggcggatggaaagcggcagcttcgacacgctgaaccccttcgccaaccgcggcacgccgatcagcatgacccaggccgcgctgatctacgaaaccctcggcttccagtcactggacgagccgttcaccgaatacggctacctggcgcgctacatcgagaaagccccggacaacagctgggtgcgtttccatatcgatccgcgggcgcgcttcagcgacggcgtggcggtcaccgccgaggacgtgaagttttccttcgatagcctggtcgagcagggcagcccgttctggcgcgcctactacaaggaggtccgcgagccggtggtggaggatcgcctgcgcatccgcttcgatttccgtcatgccggcaaccgcgagctgccgctggtgctggcccagctctacgtgctgcccaggcattggtggcagggacgcgacttcaaccgcagcagcatgcagccgccgctgggcagcggaccttaccggctggagaaggccgaggcggggcgttcggtgagctaccggcgcaaccccgactggtgggctcgcgacctgccggtcgggcgtggcctgtacaacttcgagcggatccgtttcgactactaccgcgacagcggcgtggccttgcaggcgttcaaggccgggcaggccgacatcaatgtcgagaccagcgtcaaggcctggagcagcggctacgactcgccggccctgcgcgatggccggttgcgccaggagagctttccctacccgtacccggccagcctccagggcctggtgttcaacctgcgccggccgctgttcgaggaccgccgggtacgccaggcgctgagcctgttgttcgacttcgaatggaccaaccggcagctcttcggcggtcgctacaagcgcctgcgcagctatttcgacaactcggagatggccgcccgcggcctgcccggcgccgacgagctggccttgctggagccgctgcgcgggcaaatccccgaggaggtcttcggccaggcctacgctccgccggtgaacgacggcagcggcgatatccacgagcgcctggtgcaggcctaccgcctgctcggcgaggccggctggcatgccgtcgacgggcgcctgctggataccgccggacggccgctgcgcttcgacctcctgctccagggcaagggcctggagcgcgcgctgctgccgttccagcgcaacctggcgcggatcggcatcgatatgcgcctgcgccaggtggacgcttcgcaatacatcgagcgcatacgtgcgcgggactacgacatgatcgtttcgagcttctcccagtccaattcgccgggcaacgagcagtacagcttctggcattcctccagctacgccgatcccggcggctacaaccgcatcggcctgaaggacccggccatcgaccggctggtccaggcggtggtcgaggccgactcgcgggccgccctggaaaccgccgtgcgcgccctcgaccgggtgctgcaatggggctactacctgatcccgacctggtattccgacgaggtctggatcgccagctggaatcgcttcggccgaccgccgcaggcgccgcgctacagcctggggctgaacacctggtgggaagtccgcgagcgggccgcgccgagccgggaggcgcagtga

SEQ ID NO: 318793 - DNA, 1074 bp, Pseudomonas aeruginosa
atgggcggctacctgttgcgccgcctggcgctgatcctgccgaccctgctgggcatcctgctgatcaacttcgccatcgtccaggccgcacccggcgggccggtggatcaggccatcgcgcgcctgcagggcgtcgacggcggcggcccgctggggcgtggcggggagggtgggcatggcgctctggaaccgcagcgccacggcgagaccggcatcgatccgcagctggtggccgccctggagcgccagtacggcttcgacaagccgccgctgcaacggctctggctgatgctgtcgagctacgcccggctggatttcggcgagagcttctaccgcgacgcgcgggtcatcgacctgatcgccgagaagctgccggtctcgctgtccctgggcttgtgggcgacactgatcacctacctggtgtcgattcccctgggggtggccaaggcggtgcgccacggcagcgccttcgacctgtggagcagcgcgctggtggtgatcggctatgcggtgcccggcttcctcttcgccatcgtcctgatcgtgctgttcgccggcggcagctacctggactggttccccctgcgcggcctggcttccgagggcgccgagcgcctcggcccgctggcgcgcttcgccgattacctctggcacctggcgctgccggtgggttcgctggtggtcggcggtttcgccagcctgaccctgctgaccaagaacagcttcctcgacgagatatccaggcagtacgtcgccaccgctcgcgccaaagggctcagcgagcgccgggtgctctacggccatgtgttccgcaacgccatgttgctggtggtggccgggctgccggcggcgctggtctcggtgttcttcaccgggtcgctgctgatcgaggtgctgttctccctcgacggcctcggcctgatgggctacgaagcggcgctcggccgcgactacccggtggtgttcggcagcctgttcatcttcaccctgctcgggttgctggtgaagctggccggcgacctggcctacagcctggtcgacccgcgcatcgacttcgccgcgaggaaacagtga

SEQ ID NO: 318794 - DNA, 1017 bp, Pseudomonas aeruginosa
atggccatcgtcctttccccgctgcaccgccgccgcctcgccgcgttccgcgccaaccgccgcgggcgcctggcgctacggctgttcctcgcgctgttcgtcacctgcctgttcgccgagctgatcgccaacgaccgcccgctgctgctggaataccgtggccagtggttcctgccggtgctgcgggactatccggaaaccgccttcggcggcgagctgccgttcccgccggactaccgcggtcgcttcatgagcgaacgcatcgcccgcgacggctgggcgctgtggccgccgatccgcttcgacgcgcgcagcatcaactacgcgcgcccggcgccggcgccgccctcggcggagaactggctgggtaccgacgaccagggccgcgatgtgctcgcgcgggtgatctacggcctgcgcctgtcgattctcttcgccctcggcctgaccctggcctcgtcgttgctgggaatctgcgcaggcgcggtgcagggctactacggcggctggatcgacctgttcggccagcgcttcatcgaggtctggtcgggtctgccgatgctttacctgctgatcatcctcgccagcctggtgcagcccggggtcggctggctgctggcgatcatgctgctgttctcctggaccagcctggtcgacgtggttcgcgccgagttcctgcgcggtcgtcacctggagtacgtcaaggcggcgcgaaccctcggcctcggcgacgccggggtgatgttccggcacatcctgcccaacgccatggtcgcgaccctgaccttcctgccgttcctgctctgtggcgcggtgaccaccctgaccgccctggacttcctcggtttcggcctgccgcccggctcgccgagccttggcgaactggtcgggcagggccgcgacaacctccaggcgccctggctcgggctgaccgtgttcgtggtcctggcgaccttgctcagcctgctggtgttcatcggcgaagcggtgcgcgacgccttcgatccgaggaaatga

SEQ ID NO: 318795 - DNA, 1644 bp, Pseudomonas aeruginosa
  misc_feature (459)..(468): n is a, c, g, or t
atgaaccgggaactgttgcgagtggaaaacctgagcgtcgcctatggcgacacgcaggtcgtgaaggggatcgacttcagcctgcgcgccggcgagaccctggccctggtcggcgagtccggctccggcaagtcgcagaccgcccacgccctgctgcgcctgctgccgggcgcggcgcgcctgggcggcagcgtgcgcctggacggcgaggaactgctcgccctgtcgccgcaggcattgctggcgattcgtgggcagcgcatcggcatggtgttccaggagccgatgacctcgctcaatccattgcagcgcatcggccgccaggtcggcgagggcctgcgcctgcatcgccgcctgcgtggcgccgcgctgcgcgggcgggtactggaactgctcgaactggccggcctcgagcagccgcgacgcctgctcgaggcctatccgcaccagctctccggnnnnnnnnnngcctatccgcaccagctctccggcggccagcgacagcgagtgatgctggccatggcgctggcttgcgagccgcaactgttgatcgccgacgaaccgaccacggctctcgacgtcaccgtgcagaaacgcctcctggagctgctgcaaagcttgcagcgacggctgggcatggcgatcctgctgatcagccacgacctcaacctggtgcgccgggtcgccgatcgggtctgcgtgatgcgcgatggccagatcgtcgaggagaacgcctgcgagacgctgttccgctcgccccggcatccctacacgcgcctgctgatcgaggccgagccgggtgggctggcggagccggtggcgtgccgcgagacctgcctggaggtgcgcgcgctgagcctcgactaccccgcgcccggcggctggctgcgccggcgcgcgggactgcgcgcggtgcacgaggtcagcctgcggctgcgccgtggcagcaccctggggatcgtcggcgaaagcggttcgggcaagtcctccctcggccaggcgctgctgcgcctgttgccggccgaagggcagatcctgttccagggcgagcgcctcgaccggctgcacggcaagcgcctgttgccattgcgccggcagttccaggcggtgttccaggacccctacggcagcctcaacccgcgccttagcgtggaacagatcgtcggcgaaggcctgcgtatccatggcatcggcgatgccggcgaacgccgcgcgcgggtgctggaggcactgcgcgaggtcggtctcgacgagccttgcctggaacgctatccccacgagttttccggcggccagcgccagcgcatcgccatcgcccgcgcgctggtgctgaagccggcgctgatcctgctcgacgaaccgacctcggcgctcgaccgtagcgtgcagtgccaggtggtcgagctgctgcgtcggttgcagcgtcgccacgggctgagctacctgttcatcagccacgacctggccgtggtacgcgccctggcccacgacatcctggtgctcaaggacggccgggtggtggagcagggcagcgccgctgcgctgttcagccagccgcgccacccctatacccgcgagttgctcggagcgatacccgcgctgcgcctggaagagcatctgcgggtggccgggctgggaatctga

SEQ ID NO: 318796 - DNA, 1182 bp, Pseudomonas aeruginosa
atgagttcgttaccgttgtacttcgattacgccgccaccacgcccgtggacgagcgcgtgatccgggccatggtggagtgtctcggctaccaggcgtgttttggcaatcccgcgtcgaattcccatgcctacggccgccaggcgcggcgggcagtggagcgggccagggagcaggtggccgcgctggtcggcgccagcgccgggcagattgtctggacttccggcgccaccgaatccaacaacctggccctcaagggcgtggcccaggcgctggacgcacccggccacctgatcaccagtcgcctggagcacaaggcggtgctggacaccgtgcagcaacttgccgatgacggctggagcgtgacctggctggcgcccggcaccgatggcctgatccggccggaacaggtggaggcggcctggcgcgccgatacccgcctggtgtcgctgatgcgggtcaacaacgaactcggcaccctgaccgacatcgccgccatcggcgaacgggtgcgcgagcgcggcgcgctgttccacgtcgacgcggcgcaggccagcggcaaggtggcgatcgacctgggccgcctggcggtggacctgatgtcgttctccgcacacaagacctacgggcccaagggcatcggcgcgttgtacgtcgggccgcgcgccgagcggcggctgaaggcgcagatccacggcggcggacacgagcagggcctgcgttccgggaccctggcgacccaccagatcgtcggtatgggcgaggccttcgccctcgccggcgagcttttcgaggaggagggcaggcgcatcgccggactccagcggcgtctgctggaggggctggcgcagatcgacggctggcgcctgaacggcagcgccgacgcacgcatcgcgcataccctgaacctgaccttcgacaacccggcctttgtcccccaggcactggagtccagcctggcggtgtccagcacctcggcctgcaactcggcgcggccggcgccgtcccacgtgcttctcgccctcggccacgatgccgccagcgctggccgcagcgtgcgcctgagcctcggtcgctacacccgcgaggccgacgtcgacgcggcggtggccgccctcaaggccgcggcggatagtggcgcgccggcgtggcagccgttcctcggggtatccagggcaggctga

SEQ ID NO: 318797 - DNA, 1224 bp, Pseudomonas aeruginosa
atggacgatctctcccccgattccgccttgccgcctgccggcagcgcccaggacaacgacgcgccgcgccagctggtggtctgcatcgacggaacctcgaaccgcttcggcgaccagccgaccaacgtggtgcgcctgtaccgctcgctgtcgcgcgatccgcgcagggtgctggcctactacgaccagggcgtcggcaccttcggcctgaaggaaaccctgttcgagtggcagaagtttccctcgcggatcgccggcctggccttcggctgggggctcaagcgcaacgtcgagggcgcctatcgcttcctcgccgagcactaccggcccggcgaccagatattcctcttcggcttttcccgcggggcctacgcggtgcgcgtgctggccgcgatgctgcgcgcggtgggcctgatcgatgcgcaccagccgcacctcttcgactacgcctggaccctgctcaccacccgcatgccgccccgcgacgaagacaagcgggccggcacgcgtcgccgcggaccggacttcggcctgctgggacgcttccgcaaggtcttcggccggcaggtgaaggtgcatttcctcggcctgttcgacaccgtgacctcggtgggctgggtctacgacccgctgaccgtgccgtattcctcgaacaacgaaatggtcgacgtggtccgccaggccctggccatcgacgaatgccgctgcttcttccggcagaacctctggttcggcgagaaggaccgcaagtccgacgtgttgcaggtgtggttccccggcatgcactccgatgtcggcggtggctatgcgccgaaggactcgcggctggctctggtggcctttacctggatgctcggcgaggcgctggaggccggcctgcatgtcgacccggcgcgcagccgcgaccagttgcgcgcacgttcgaagcagggcccggacccgaccgcgccgatcctgccggtgatgacccggccctggcgcctggccgagtggctgccgctgctggtctgggaccgccgcagcggcaaccgcgcctggcgctggtcgcgtggccggccgcgctcgcggccgctggaaccggtcgggcaggaaacccgggtcaagctgcaccgttcggtgcagcggcggctggacgaatgccccgactaccggccgtgcaacctgccagcgctggaacgctgcgacctcatcgacgattcgccgttgctcgacggctaccgctag

SEQ ID NO: 318798 - DNA, 1056 bp, Pseudomonas aeruginosa
atgagccgccagccgaaacccgcccgcctggccggcggtgccctcgccctgggtctgctgctgggcctgccgaatcccgtcgaggccgcgcaggacaatggcatggaccactcggccatggaccacggcgcgatgcctggcatggaccacggccagaggacctccgccccggcgaaacccatggaccaccaggggatggggcatggccggatgccggggatggaccacggcaccgcatcgcccgccccggcacagcccatggagcaccagggaatggaccatggccggatgccggggatgagccgcgctgcgcggcaacctccggcgcaggccgcgcccagccagagccgtacgccgatcccggtgccgaccgaggccgaccgccgtgccgcctttccgccgctggaggggcacaaggtgcacgacagcgcgctgaacagcttcttcctgctcgaccagttggaataccaggacgccgacgacggcagcgcgctggcctgggacgccagcggctggatcggcggcgacatcaaccgcctgtggctgcgcagcgaaggcgaacggctcgacggcaagaccgaggacgccgaggtccaggcgctgttcgggcacgccatcggtccctggtgggacctggtcgccggcgtgcgccaggatttcaagcccggctcgccgcagacctgggcggcgttcggcgtgcagggcctggcgctctacgacttcgaggcggaagtcaccgccttcctcggcgagaacggccagagcgcgctgcgcctggagggcgagtacgacatcctgttgaccaaccggctgatcctccagcccagcgccgaggtcaacctgtacggcaggaacgatcccgcccacggcatcggttcgggccttgccgatagcgagctgggcctgcgcctgcgctacgagatccgtcgcgagttcgcgccctacatcggggtgacctggaaccgctcctacggcaacagcgccgacctggcccgcgccgagggcgaggacgacgacgaggcgcgcttcgtcgccggtatccgcatgtggttctga

SEQ ID NO: 318799 - DNA, 1845 bp, Pseudomonas aeruginosa
atgcacagaacttcgcgacgcaccttcgtcaaaggcctcgccgccaccggtctgctcggcggactgggtctctggcgcgccccggcctgggccctggccgggccgggccagcagaacctgctcgccggcgacagtttcgacctgttcatcggcgagaccccggtgaacctcagcggctcgccggccaccgccatgaccatcaacggttcgctgcccggcccgaccctgcgctggcgcgaaggcgacaacgtgaccctgcgggtgcgcaaccgcctcgccgaggacacctcgatccactggcacggcatcatcctgccggccaacatggatggcgtgccgggcctcagcttcgagggcatcgctcccggcggtctctacgaataccgcttcaaggtccggcagaacggcacctactggtaccacagccactcggggctacaggagcaggccggggtctacggcgccctggtgatcgacgcccgcgagccggaaccgttcagctacgaccgcgactacgtggtgctgctcagcgactggtcggacgagaagccgcagcgcatcctcgccaagctgaagaagcagtccgactactacaacttccacaagcgcaccgtcggcgacttcatcgacgacgtcagcgccaacggctgggccgcgaccctggccgaccgcaagatgtgggccgagatgaagatgagtcccaccgatctcgccgacgtcagcggctacacctatacctacctgctcaacggacagccgccggacggcaactggaccggcctgttccgccccggcgaaaagctccgcctacgcttcgtcaacgcctcggcgatgagctatttcgacgtccgcattcccggcctgaagatgaccgtggtggccgccgacggacagcacgtcgagccggtcagcgtcgacgagttgcgcatcgccgtggccgagacctacgacgtgatcgtcgaaccgggcggcgagcgcgcctataccctcttcgcccagtccatggaccgcagcggctacgcccgcggcaccctggcgctggccgaagggcttagcgcgccggtgccgacgcccgatccgcgcccgctgatcggcatggacgacatgggcatgggcggcatggaccacggcgccatggggcatggcgcggcgacgaggcccgccagcgagatggaccattcgaagatgtcgggcatggacatgaatggcatggaccattcgaagatggccggcatggacatgaacggcatggaccactccaagatggccggcatggaccactccaggatgggcatggacaccatgccgatgcagtcccatccggcttcggaggacggcaacccgctggtcgacatgcagaccatgacgccgacaccgaagctcgccgaccccggcctcgggctgcgcgacaacgggcggcgggtgctgacctacgccgacctgcgcagccgcttcgccgacccggacggccgcgaaccggggcgcaccatcgagctgcacctgaccgggcacatggagaagttcgcctggtccttcgacggcatcaagttctccgacgccgagccgctgcgcctgacctacggcgagcgcctgcggatcgtcctggtcaacgacaccatgatgacccacccgatccacctgcacggcatgtggagcgacctggaggacgagcaaggcaatttcctggtgcgcaagcacaccatcgacatgccgccgggcacccgccgcagctaccgggtcaccgccgacgccctgggacgctgggcctatcactgccacctgctgttccacatggagatgggcatgttccgcgaagtgcgggtagacgaaggagacaacgcatga

SEQ ID NO: 318800 - DNA, 639 bp, Pseudomonas aeruginosa
atgagcccgaccctgcaagatgcccggctgctctgggacttcctcggccagggccgctgccatgtgccctgcgaactgctggtggtatgcggctcctacgacctgcgagtctgcgaccacgcctgcgaactgctcgaacgcggcctcgccgaacgcctgctgttcaccggcaacaccgggcactggacgcgccatctctgggtcgagccggaagccgagctgttcgcccgccatgccagggcacgcggggtaagcgacagcctcatcgtgatcgagccgcgggcgaccaacttcgccgagaacatcgccttcgcccgcgagctgttccccgacctgcgccgcgcgaccttcgtcaccaagcccaactcgatccgccgcgtggcgctgaccctgccggtccgctggccgggtctggagggacacgtggatgcgcccgactacgcatttcccgacggcatctcgaacctggtcggcgtactcggggtgatcgacgagatggtcggcgaccttgaccgcatcatgcgttacccggcgctgggcttccaggccgcctgcccgatcccggcgcaggtcatggacgcctgggaacgcctggtggcgcgcggtttcgaccgccacctggtgaacccgccgcgctga

SEQ ID NO: 318801 - DNA, 669 bp, Pseudomonas aeruginosa
atggacggcgtcctgatcagctcccgcgaagccatcgccgcggcctggagccgggtcgccggcgaacagggcgtggcgctcggcccggactgcctgcgcgaccacgtgcacggtcgcccgggcggctacaccctggactatctgttcggccacctgccgatggagcgccggcggatcctcaagcaacgggtcgatgcgctggaggaaggcgccgactgtcccctgctgcccggcgtcgccgcggtgatccgccagctgcgttggctggacgtgcccttggcgctggtcaccagcagttggccggcacgcatcgaccacgtgctgcgccagcacgacctgcaggcggcgttccgcaccctggtcagccgcgacgacgtggtccacggcaagccggctccggatggctatcgcctggccgcggccaggctcggcgtggcaccgtcgcgctgcctggtgttcgaagactccctcagcggcgtgcaggccgcctgtgccgccggcgcgacctgcgtggcgatcggcgaggagagcggcctgctcgccgccggcgcgcgctggtcggtccgggatttccgcgagctacggatcgtccgcgaagacgaccggctgtactgccagcatcggcaccccgccacgaccggcagcgagaggagcgttggcgtcccatga

SEQ ID NO: 318802 - DNA, 1164 bp, Pseudomonas aeruginosa
atgtacctgatcttttccggctacttcgccgccgaggggctgatttatccgttctggccgacctggctggccagcctgggcttcggcgccagccagatcggcctgttgatcgccgcggcctactggccgcaggtgatcgccggggtggcgctgacctacgtggccgactggcgcatcgaccagttgcgcctggcgaccctgctggcggccctggccggcgcctgcgccctgctgttccagctggccgagggcctacccctgttcatcgccctgagcgtgctctacggcgcattctggaccagcgtgctgccgctcaccgaatcctacctgctcaagcgcgacaaggccgccctgcagaactacgggcgggtacgcgcagtcggttcgctggccttcatcctcaccgcgaccctgggcggcctgctgctcggtcggttcggccagcaactggtgcccgccctggtcggcctgacgatgctgctcaccgcgctggcctgcctgttgctccgtcgccgcagcctgcgccgtccggactcgccgctgccgggcgccaggcgccgtcccgacctgcgcgggatcctccggcaacgccccctgctgctggccatcgccgcggcgggaatgatccaactgagccactcgctgtacttcaccaccgcctcgctgggctggcagacgctgggctactcgtcgttctcggtcggcgccttctggggcctggcggtgatcgccgagatcagcttcttcgccgtctccaaccgcatcctggaccgccacccggcgctccaggtgatgctcttctccagcctttgcgcggcgctgcgctggggcctgctggccggcagcgaacacctcgccgcgatcctcctcggccagtgcctgcacgccctcagcttcgccgcctaccacgccgcggtgatgcgttacatccgcgaccacgcgccggaaagcgcgcgggtactgacccaggggatctactactctctggcggtagcgctgcccatgggcctcgccagtccggccgccggctggctgtacgaaggcctgccgcagtggtcctatctgatcatggcgctgttcgccctcggcggcgcggtcctggtctggcttgccctacagagtgcccgagatgcatcgactagcgttttcagccgttctgtttga

SEQ ID NO: 318803 - DNA, 1725 bp, Pseudomonas aeruginosa
atgatcattctcgggatcaccaacaacgacctggccggcgcctgcctggtgcgcgacggcgggatcgtcgccgccgccagcgaggagcgcttcacccgccagaaggaccacaaggcctggccgagccgctccatcgactatgtgctcggcgaggccggcatcgacctggccgacatcgaccgcatcgcctacggctggaacgccgggttcgacgccgggcggcacctcgacctctatctggaccgggtcctcgaggaagcccgcgagcgtcccgagggcctgccgcacctgcgcaagcggatcgccgacgaaatggccaacgacaaggccaagcgcggcgaattcgatgccttcgtccgcgccaacggcctgcgcggcaaggtcgagtacatcgaccatcacgaatgccacgccctcggcgcgttcgtctgctcgccgttcgacgaggcgctgaccctcacctgcgacggccgcggcgacttccagtcgctcaccgtcacccactaccgcgccgacagcggcgaggcggtcctgcaacgcgagaccagcgtcgacagcctgggctacttctacgggcgcatcacccgcctgctcggcttcaagccgaaccgccacgaaggcaagatcaccggcctggcggcgttcggcgacgcggaaaagctgctgccgctgatgaacgacatgatccgcctggagaacggccgcctgcgcgcccgctgcggcgaactgtacctgccctcctacgacggctacagcgatccgctgctgcaacgctgcgcggcggaacgcccggcggatgtcgccgccgccgcgcaacggcactccgaagacctgctggtggccatcgcccgggagcacgtggcgcgcaccggctgcgccaacctgtgcctggccggcggggtgttcggcaacgtcaagctgaaccagcgcctgcgcgagatccccggggtccgcgatgtctacgtgctgccctgcatgggcgacggcggcctggccctggccgcggcggtggcggtggcctatcgcgagaacggtacgcgcttcccggcgccgagcatggccctcgggccggacgcgcgcagcgccgcgcagaatgccgagctgatcgccagccagtacccgcagctggcctacagccggccggccaacctgatcgagacgctggtcgaagcgctgcgggaaaaccaggtgctgggcatgttcaagggccgcatggagttcggcccgcgcgccttgtgcaaccgcagcatcgtctaccatcccggcgatgccagcgccaacgactggctcaatcagcgcatggaacgcaccgagttcatgccattcgccccggtcaccgcggtagaacacgccgaggcttgctacgttggctggcgtgaagaccaggtggcggccgactacatgaccatgacctacgactgccatgcggatttccgcgagcgctgcccggcagtggtgcatgtcgacggcaccgcccggccgcagatcatccggccgcaggccgatccgttcatgcacgccctgctgcatgcctggcatgcccgcagcggccagccggcgctgatcaacacctccttcaaccgccacgaggaaccgatcgtctgcgccccgcaggacgccctcggcgcgctggaggacggcatggtcgacctggtggtactgggcgagtccctgctggtctggcgcaagggcgagaacgccttcgccagggcgcgcttcgagtga

SEQ ID NO: 318804 - DNA, 2643 bp, Pseudomonas aeruginosa
atgcaccgatcgctccacaccgacgcgccgctgggcgccgccctgctgctggccctgcagctcgctcccggcagcgccgccgcggcggaggatcaggcgcctgtcgacccgcccacggtccagttgcaacgaatcgaggtgaccggcagcgcgatccgccgggtcgatgcggaaaccgcggtgccgatcagcgtcctgcgcgccgaggagctgcgccaacagggcgtgaccagcaccgaggaactgatcggccggctttccggcaaccagggcgtatacaactccagtcgctcggtcggcagcgccaccggcggcgcctcgttcgccgacctgcgcggaatcggcgcgaacaagaccctggtgctgctcaacggccggcgcctggcgaacaatgccatcgacggctccgcggtggatctcaacaccattcccttcgccgccatcgaccgggtcgaggtgctgcgcgacggcgcctccgcgctgtacggcaccgatgccatcggcggggtgatcaacttcatcacccgcaagagcctgaacgaaggccgcttcgacagcggctacgcctcccccacccacgacggcggcggcaaccagcgcaacgtcagcgctagctggggcttcggcgagctggaggaggatcgcttcaatgtcttcgcggtggccaactacgacaagcaggagcgcctcggcgccaaggaccgtggctacacctacaactaccagccgggacgcggcctcgactacagttccggaaccgccttccccggcaactggagccagggcgccaacgccagcaatccgctggccgccggcggttgcaagggcgccgacctgattccgcgcaacggcatctgccggcagagcctgtggcgctacctcgacctggtgccggaaaccgagaagacctcggtgttcagccgcgccaccggcaagctggccgacgagcacaacgtcagcctggagtacttctggtcgcgcaacgacaacgctacccaggtcggcccagggaccctcaccggcctgcagatcgatcccggcaccgccttctatcccggcaacggcatcactcccggtcccggcggcttcgtcctcgacccgagccggccggtggaggtcaactggcggcagagcgtgctcgggccgcgcctgcaatcctcgcagaacaccggccagcgcctgctgctcggcttcgacggccagttcgccggctgggactacgatatcggcgcctcgtacaaccagaacaaggtggtcgaccatatccacagcggctacgtcgatgatcgcgccgccgccctcggcatcgccaacgggacgctgaacccgttcgggccgcagaccgacgccggcctcgcctacctcggcagccatgccctgagcggcgacttccgtacctcggtcggccgcgtcaagggcctggacgcccgcgccagccgggagatcggcgactggttcggcgccgggccggcggccctggcgctgggcggcgagttccgcaaggaagcgttccaccaggacatccaggacttcgccggcaacgtgcagagcctcggcgtcgatcccgccgccacggtcagcggcgagcgcaacctgaaggcgcagtacgccgaactcaacgtgccggtgctggacagcctggaactcagcgcggcgatccgccacgacaagtacagcgacttcggcagcaccagcaacccgaaatattcgttccgcttccagccgttccgccagttggtcctgcgcggcgcctacagcgaaggtttccgtgcgccgtcgctgtacgaactgtacaacccgaccttcaccacctataccagcgccaactacgacgacccgcgcctgtgcgccggcggccagccgagccagggcggcatcgccaaccgcgactgcgcccagcagttctacaacgccaccggcggcaataccgacctgcgaccggaaaccgcgcgcaacgttaccctgggcctggtctaccagccgctgcgcgacctttccgtcggcctggacttctggtggatcaggatcgccaaccagatcgccgagtttcccgaagcggcgatcttcgccgacccgcaggcctacgccggacgcatcgtgcgcaaggccgacggctcgatcgatcacgtcgtcaccggactggccaacctcggcaaggtaaagaccagcggcgtcgacctgagcctcgattatcgtttcccggccagccgctacgggcagttcgggctcgacctgcaaggcacctacgtgtcccgctacgacttccagcagcagatcggcggccagtacctggacaacgtcggcgacttccagggcgtcggcgtgatcgcccgctggaagcacgtcgccaacgccacctggagccgcgacgcctggcaggccaccctgagcaaccgctacaccagcggctacaacgactacgaccgcgccagccacggcaaggtcggctcgtggaacctctgggacctggccggcagctaccgcctcagccacgcgctggggctgaccctcggggtgaagaacctgttcgaccgcgaaccgccgttcagcaaccagacctacaccttccagagcggctacgacccgcgctacaccgatccctacgggcgcatcctgttcggccgcctcagctacagcttctga

SEQ ID NO: 318805 - DNA, 2109 bp, Pseudomonas aeruginosa
atggctcgcaccactcccatcgagctttatcgcaacatcggcatcgtcgcccacgtcgacgccggcaagaccacgacgaccgagcggatcctcttctacaccggcgtcaaccacaagatgggcgaggtccatgacggcgcggcgaccatggactggatggtccaggagcaggagcgcggcatcaccatcacctcggcggcgaccacggccttctggcagggctcgaccaagcagttcccgcaccgctatcgcttcaacatcatcgacacccccggccacgtcgacttcaccatcgaggtggagcgctcgctgcgcgtgctcgatggcgcggtggtggtgttcagcggcgccgacggagtcgagccgcagtccgagacggtctggcgccaggccaacaagtaccatgtgccgcgcctggcctacgtcaacaaaatggatcgccagggcgccgatttcctccgcgtggtcgcgcagatcaagcaacgcctgggccatgtcccggtgccgatccaactggcgatcggcgcggaggaaaacttcagcgggcagatcgacctggtgaagatgaaggccatctactggaacgatgccgaccagggcaccagctaccgcgaggaggagatcccggcggagctgcgggcgctggccgaggagtggcgggcgcacatggtcgaggccgccgccgaggccaacgacgaactgatgaacaagtatctggaaggcgaggaactgagcatcgaggagatcaaggccgggctgcgccagcggaccctggccaaccagatcgtaccggcggtgctcggctcctcgttcaagaacaagggcgtgccgctggtgctcgacgcggtgatcgactatctcccggctccgtcggaaatcccggcgatcaggggcaccgacccggacgacgaagagaagcacgacgagcgccatgcggacgacgacgagcctttctcggcgctggcgttcaagatcgccaccgaccccttcgtcggcaccctgaccttcgcccgcgtgtattccggggtgctgacttccggcgacgcggtgctcaactcggtgaaaggcaagaaggagcgggtcgggcggatggtgcagatgcacgccaaccagcgcgacgagatcaaggaagtgcgcgccggcgacatcgccgcgctgatcggcatgaaggacgtgaccaccggcgacaccctgtgcgccatcgacaagccgatcatcctcgaacgcatggacttccccgatccggtgatctcggtggcggtggaaccgaagaccaaggccgaccaggagaagatgggcatcgccctgagcaagctggcccaggaagacccgtcgttccgggtgaagaccgacgaggagaccgcgcaaaccatcatttccgggatgggcgagttgcacctggacatcatcgtcgaccgcatgcgccgcgagttcggcgtcgaagccaatatcggcaagccgcaggtggcctatcgcgagaccatccgcaacacctgcgagatcgagggcaagttcgtccgccagtccggcggccgcggccagttcggccattgctggatccgcttcgctccggccgacgaggggcaggaaggcctggagttccacaacgaggtggtcggcggggtgattccccgcgaattcatcccggcgatccagaagggcatcgaggaccagatgcagaacggcgtgctcgccggctacccgctgatcggcctgaaggcgacggtgtacgacggctcctaccatgacgtcgactccagcgagatggcgttcaagatcgccgcctcgatggccaccaagcaactctcgcagaagggcggagcggtgctcctggagccggtgatgaaggtcgaggtggtgaccccggaggactacatgggcgacgtgatgggcgacctcaaccgccggcgtggcctgatccagggcatggaggataccccggcggggaaggtgatccgtgccgaggtcccgctgggcgaaatgttcggctatgccaccgacgtgcgctcgatgtcccaggggcgcgcgagctactcgatggagttcgtccgctatgccgaggtaccggccagcgtggccgaggcgatcgtcgccaggcagggccgctga

SEQ ID NO: 318806 - DNA, 2595 bp, Pseudomonas aeruginosa
atgcttgcttcagcgattgccagcggtaccgcagtctcccaggtctccaagcatctcctaatgttcctggccgcccttttcctcgccctcggtgcatgcggctgggcgatcctgcacatcgccaggcaccaggacgacatcgccatcgagcagagccatttctacgtggaaaaggcgctgcagaatcgccgggaaaattccgagcagttctccaccacctattccttctggaccgatgcttacgtctatctgggaaaccgggtcgatgtggactgggccttcaccaagaacaacctcggctcggtgctctacaccaccaacggctacgacggcgtcttcgtcatcgacgaccgtggcactcgctacgccatgctcgagggcgagctttccgaacgctcgctggccgactcgctgaacgccgacaccggggacatcctccgctccgcacgccgtgccgcggtggacgaagcggcgatcagccgctacgtcgacttcgacggcgcaccggcgatcctggtcgcctcggcgatcaagcccaccagcgatcatgcgcccatcgacctggccaaggcctcggtgatggtcttcgtcgaccggctgaccccggcgaagctggccaagctcggcggcgactacggcatcgccaacctgcacctgctggccggcggcgcggcgggcgacaaggaaagccttgccctggagggcactccccatcgcctggcctgggtgtcgtcgcgtccgggtagcgccatgctgcgggagaccgcgttgccgctgctgggaatcttcgtgctcgccgccgggctgctgttctggctgagccgcagcgccgtgctcaacgcccgcgcggtggatcgccagcagaaggtcctgaaacgcagcaaccaggccctgctggccagcgaggaacgtttcaagtcgatagccgaggcggcctcggactggatctgggaagtcgacgggcatttcgtcttcacctatctctccgtgcgcttccgcgacgtcaccggctaccagccggaggcctggatcgggcggcggctggacgagttgctggatagcgatacggtgaacatcgtcaagtggctggaagggctgcccgatgccggtgcgccgtccagcctggtctgcgctttccgcgacagccagggccaggcgcgggtcggcaagctgagcgccagcgcgatccgcaacggcgtcgccagcggctatcgcggcacggcggccgacatcaccgacgaggtcgaagcccatgcgaagatccagcatctgtccctgcacgatgccctgaccggcctgccgaaccgcaacaagctgttccagttcctcgaacgcctgctggcggaaaaggctggcaagtcgccggtagcggtactgatgctcgacctcgaccgcttcaagccgatcaacgaccagcacggccatcccgccggcgatgcggtgctctacgccatcgccgaacggctgcgcgcctcgacccgcgaccaggacatggttgcccggctcggcggcgacgagttcgtggtggtcagtacccacgtgtcgtcgaagctggaaatcgagaagttctgtagccggctgatcgacgtgatcaaccgcgaggtcgcctacgaagggcacagcttccatgtcggcgccagcatcggcgtggccctggcgtcggagcacggcggcgatccgcgcggcctgctgcgttgcgccgacgtggcgatgtacgaggccaaggccgcggggcgcaatacctggcgtttctacttggaagccatggactcccatctcgccgagaagaagctgcgcgagaccgagttgcgcgccgccttgcagaacggcgagttcgagttgtactaccagccgcgtttcctggcgcaggaacagacgatcgcctcggcggaggcgttgatccgctggaaccatccgcgccgcgggctgatcggcccggacgagttcatcggcctggcggaagaaagcgacctgatcgtgcagatcggcaactgggtgctgcgcgaggcctgcgccaccgccgcctcctggccgggcgaggtgatggtctcggtgaacgtgtcgccggcgcagttcatgaccggcgatatcgtctggcaggtgcgcgaggcgctgcgcctggcccacctggatgcccgccggctggagctggaggtgaccgagaacgtcatgctcaacgatgtcgacggcgcgctgcggaccatgacggccctcaaggaattgggcgtccgcctcaacatggacgacttcggtaccggctattcctcgctcggctacctgcgcacctatcccttcgacagcatcaagatcgacaagcgcttcgtcgccagcatggagaagaccgggcgcgaccgttcgatcgtgcaggccatcatcaatctcggcaacgccctgaacctgcgggtcaccgccgagggggtggagaccgaagggcagatgcatatcctgcgcgacgagcaatgccacgaactgcaaggattcctgctcagccggccgctggatgcgcagggcctgcgcgacctgctggcgcgcgaggcggggcagacccaggcgccacaggtttccgccgagggccatgctgcgcgccgcccttga

SEQ ID NO: 318807 - DNA, 1662 bp, Pseudomonas aeruginosa
atgcttcttcgaaccatcagtgtggaaactgccgagcagacggaactgaatgcggccttgttgtgtggtttcgccattcccgccagcgaccgcaacttcatcgcctacagcctcaacgaacaggtcgacgaaaacgactcgcgcgtctacatcgcctccctgttcaagaccgacgacggcttccgcctgggccgtctcgacaccgacgaggcctgcgaggcggccatccaggtgttccgccaactggtccgcgaagccaccaccggcaaccgccggaccagcgatctggcctaccacctcatcgacctgcaggacgcggccatcgccccctcgcggcgggaagaacaccgctccctggtgctcgaacgcgaatgggtgatgaagctcgtcaccttcgagtccccccatggctacggccccgccctggatggcgaggaaccctgcgcggaagtcccgccgctcgtccaggaggcccttttcgaagacgccgctcccgatgtcctcgccgaagacgatgcggacgagaccacggacgggccggcggagcccatcgacgagcccgaggcggcggaagacgaaaccgtcaccgaggccggatgcgtcgagcccgagccgcggccggaggcggaaacggcagcgcccgagggtggggcgccagccgagttcgcggcgaaagcggagcagtccgccaaggtagcggatgccgaggccatcggcgccttcgtcgacaacgccagtcatcttcgcgaggagcttgccgacctggcgcagatgctccaccccgcgctgcacgccgccgacgccacgggcagcgccaaccttccgtctccagacgccgccgaggaatcctccatgcccccgagcccctcccccctcgccgcacccgcgccggaaccggtatcggccagggtccccagcctgtcgctgcgcctccgggtgccgcccgcacgcctggccggcgccgagggcggggccaacgccagagaggcgcccacccaggccgccgccgtcattcgccaacccgaggatgaagcccacgtggatacggataccgcgctcgatatcggcaacgataccgagcatctgctacaggacgtgcagggcaccctggccgacctcgccggcatggcccagcaactgagccagcagaagcaggaagcgctcaagcagcaggagtcgctggagtcgctccagacgcaactgcacgagaaggagcggcaattgcaggaaaaggaaaagcagctccggcagtggcacaagcgcctgcaggacgaccgccaggcgctggagcgggaaaccgagcagagcaaccgtctcctcgccgagcgcagcgcggccctgcaacaactcgcggaaagcgtcgaagcccgcgagcgcagcagcgcgcggcgagccgaagtactgcagatcgagcaggaacgcctcgaagagttgcgcagccagcagaacctgcgccaggccgaactggaaaagcgcgaagccagcgtccagcagcgcagcctggaactcggcgagcgcttcaagaagctggaaagcgcccgcgagaagctggcgcagatcgtcaagggtttcaacgagaccgtacagttcaataccgctctgcacgccatcagtcataccgggttgaagcgccaggaagagagcgcagccgaactggaataa

SEQ ID NO: 318808 - DNA, 210 bp, Pseudomonas aeruginosa
atgctggatcacgacctgactgtcgccctgctctgccgtctcaaccagaaccagagtgccctcggcatggccctggaggagctggcgatctgggcgaagcgccatgaaggcggcgaaacctacgatgtcgtcatgaaccacctgcagaccctggagcgcaacgccgatttcgtcgccgaggccatcgtcgtcctgatggcggatcgctga

SEQ ID NO: 318809 - DNA, 951 bp, Pseudomonas aeruginosa
atgtccgtgaccgatgccagtttcccgatcatcaactggtcgaaggcgatgccttcgttgcgccagctgatgtatttcgcctgtgtcgccgagtacggcagcatcggccaggccgccgaggtgctgcacgtttcgcagccgtcgctgtcgcggcagatccaggcgctcgaagtgcacatcggcgaggcgctgttcatccgcggtccggccggggtgagcctgaccgaagtgggcagggtggtgcattgccgcgcggtgaagatcatcgccgaggccaaggcgctgacccgcgacatcggcgacggcgacgaccgccagttgcacatcggtttcagccgctacctcgatcccggctggtccggcgagctggcccggcaactgaaggaagcgcgggtgtgcagcgccgtttcgccatcctgggcgccatcgctggacctgctcagcctggtccgcgagtcgtccctggacgcggcgatcatcggcgcgccgccgaaggtggtgcgcgaatacgagctgatggagatcggcagctacgagcacgtcatcgccctgtcggaaaccctgcaccggcgactggcgcccgactggtcgctgaacgacctgattggcgagccgctgctggtaccgaaggactcgctgtttcccgcctacagccagttcatgaacgatgcgatggatgccgccgccttcgcgccccggcgcagcgtgcggccgaacgacctgagcattctcctggcccaggtcgccagcggcgacggcttcgccttcctgccgttgtcgctgaccaagttcgcctatccgggggtggccttcaccgctctgccggcggcggtcaacgaaggcttccgcctgccggtggggctggcggtgtcgccgacttcgcggcttcgcgccagcgacacccagttcgaatgcttcgtcgagaccgcgcggcgggtcgccgccggttga

SEQ ID NO: 318810 - DNA, 1905 bp, Pseudomonas aeruginosa
atgaccctatcgcgactcagccttgccatcctttccgtcctcgccggtgccccggcattcgccgacgacagcggcgtcgacctcgaccagggctggaaccagacccagaagaccgcctggctggaagccggccagggctcgcggatgctgccgctggcctggctggtggcgctggagcagcgcgccagcgaagaaccgctgatgtccgatgcgctgatccgccagtacggctatgtcccgcacaccctcggcggttccagcgtgaaggtggtgcagggctacgcggtcgaccgcagcgacgacagcgacctgaccttcaccaagctgcgctggaaagccctgcagggctccagggaaccctgggtcggaccgacctgcagcatgtgccacacttcgcacatcagctaccagggcacccagctgaccgtctacggcgggcagaccatgggcgacctcgccggcttccagctggagatcctcggcgccctgcagagcacccgcgccgacaccgccaagttcgagcgcttcgcccgcaaggtgctcggcgccgatggcctggtcagcggctacaacgatgccaacaaggcacgcctgcaggcagccctggacgccaccatcgtgcgcctgcgcgacggctcgcacttcaacctgccgcacgatcccgagttcggcccgggccgcctggacgccatcggttcgatcttcaactcggtgggctacgaactgcatgccgacgagcagatctacggcgccgaggacgcccccgtgagctatccgttcctgtggaacgtaccgcagctggaccgcgtacagtggaccggcttcaacccgaaccacatcaacgtggtcgagatcgacaaccgcaagttcgacgtcggcgccctggcgcgcaacgccggcgaggcggtcggggtattcgccgacgtcaaggtgctcagcccgatccagtcggcgctgcacatcggctacccgtcgagcatcaacgtcgacaacctgatccgcatcgaagaccagctcggccaactgaagccgccggcctggccgaaccagctgttcggcgccccggagccgaccagggtcgccgagggccgcgagctgtaccggcaacattgctccagctgccacacgccgctggaccgcaacgacctgcggaccccggtgaagaccgtgctcacccacctgcaggcgcgcggcgaggtcgcgccgatcggcaccgacccgtggaccgcctgcaacagcatcgcccaactgaagaccggctacgtgcgcggcaagccctacctgtccttcgtcggcaccggccagcgcggtttctacggcaagcaggcctatgcggtggacgtgctccaggaagtggtggtccaggccctggccgcgcgcggcctgagcgtcgccctgggtgccttccagaccgccgccctgggcatcttcgacgggcagttgccgccgctgatcagtccggtgccggacagccccgacgccgacagcgccgaagcgaccgccgcggacgctccaggcgccctgctcctggccgaaaacgtcgcggccggcagcgacaaggcccggcgcctggagcagtgcctggcgatgaccagcgacctgatggcctacaaggcgcgcccgctgaacggtatctgggccagcccgccctacctgcacaacggctcggtggcgaccctctacgacctgctgctgccgccggacctgcggccgcggaccttctataccggcagcgtcgagttcgacccggtcaacgtcggctacatcaccgatgccggcggcgccaaccgcttcctcttcgacagcggcaagccgggcaacgccaatggcggccacgactacggcaacgcgcagttcaacgagcagcagcgccgcgccctggtcgagtacatgaagaccctctga

SEQ ID NO: 318811 - DNA, 1875 bp, Pseudomonas aeruginosa
atgcatccgaccttttcgcgggtcctgctggccgccgcactggccgccgccggcagccctgccgtcgccaccgaaatccagctcgagcaaggctggaacgccgagcaacgcgcctcctggtacgacgcctcgctcggttcgcggctgctgccgctggcctgggcccaggcgctggagcgtccggacagcgaggagcgcctgttctccgaagacaacgcccggcgcctcggctttcccctgcgcaactggcaaggcggcgaactgcgcctgccgcgcggcttcgccctcgaccagcaggacgacagccagttctccgacacccgcctgcgctggaaagcccgccagtcgtccagcgaaccctgggtcgggctgaattgcgccggctgccactccaccgacatcagttaccgcggcagcgaactgaccgtcgacgccggcgccaccctggccaacgtccaggcgatcttcgacgaagtgctcgccgcgctgcgccgcaccagcgacgacggcgacaagttcgcgcgcttcgccggcaacgtcctcggcagcgaggacagcccggccaaccgcgagctgctgaaggccgccctggtcaaacgcgcggcgctgatcgacaccctgttgagcatgtccgcgaccgacctgcaacccggcccggggcgcctcgacgccaccggccagtcactcaaccgcgcggcaatcaactccggcgcccgccatctgcaagcgaacccgaccgacgcgccgaccagcttcccggcactgtggcacacgttgcagatggacaagctgcaatccagcggattcgtgcccaacgtcaaggtcctcgatctcaacggccaggtcttcgacctcggctacctggccggcgacatcggtgtggtccagggcgactacggcgacgtggtcagccatccgctgtccggcctggagggctatatatcgagcatccgcgtggacaacctgacccgtgtcgagggcctgatccacaagctcaaggcgccggcctggccgagccagctgttcggcgccccggacagcgccaggctggcccagggcaagcgcctctacgaggagaactgcgcggcctgccatgcgagcatcggccgcgacgacctgcaaaccccgatcaaggtccgccaggtgcgcctgaaggcccatggcgacgacgcgccgatcggcaccgacccgtggatggcctgcaacaccttcaccttcagcagccccagcggcgactacttcggcctgttccgaccgtccctcggcacccccagcggcgtcggcatcgtcgggcggacttcgaagatcgccgacatgcaggtccccgaggtgttccagatcatgctcggcaagaaaggccagctggccgacggcatcgccgagatcatccacgccatcgtcaccgggcagcagaccctgcccggctccgacagcctgcaagcggtgcccgccggacaattgctgctggccggcgccgcccctgccgacagccaggcgcagagcctcgccgccggcgaagtccccaccgacaagagtgcgcgcaaggactactgcctgaataccgagcatccattcctcggctacatcgctcgcccgctgaacggcatctgggccaccgcaccctacctgcacaacggttcggtgccgtcgctgtacgacctgctgctaccccaggagcaacggccggccactttctacaccggcagccacgagttcgatccgagccgggtcggctacctcaccgcgcccggcccggacaacgccttccttttcgacacccacctggaaggcaactccaacgccggccacgacttcgcccgcgagtacgacgaaagccagcgcctggcgctgctcgaatacctcaagaccctgtga

SEQ ID NO: 318812 - DNA, 1407 bp, Pseudomonas aeruginosa
atgaacgacccccagggcttcgaggccatctcgcgccgcgaacagggcctgcaacggcggctctcggccgcgcagatgagcatgatcgccatcggcggcgccatcggcaccggcctgttcatgggcagcgccttcgccatcggtttcgcaggccccagcgtcctgctcagctatgccatcggcgcgctgatcaccctgctgctgatgggctgcctggcggaaatgaccgtggcccatgccacccccggctcgttcggcgccttcgccgagcactacgtcggcccgctggccgggttcctggtgcgctacgcctactgggcggccatcgtcctggcggtgggcaccgaggtcacggcggtggccatgtacatgaagtactggttcgccggtatcccggaatgggtctggatcatctccttctcgaccctgctgatcggcctgaacgccagcagcgtgaaagccttcggcaacttcgaatactgcttctcgacactgaagatcgccgccatcgtcgccttcatcctgctcggcgcctacctggtgttcggctccgccaacccggcctacggcgtgcacaactacagcgcccacggcggcttcttcccgcacggcctgaaaggcatgtggatcgccgtggtggtgtcgatcttcagttatctcagcgtggagatgatcgcggtcgccgccgccgaagccgaacatccggaacaggcggtgaggtcggcgttccgctcgaccatcgtgcgcctggtggtgttctacctgctgaccctggcgctgatgctcgccatcgtcccctgggaccaggccgggcagagccagagcccgttcgtcacggtgatgcaggcgatcggcctgcccggcgccaccggggtgatgaacttcgtggtgctggtggccgcgctgtcggcgatgaacagccagctgtacatcaccacccggatgatgttcagcctgtcgcgcgcggggcacgcgccgaagggcctcggcgaactgagccgccagggcgtgccgctgaacgcgctgctgctgtcgagcgtcggtatcgccctggcgaccctgctcaacctggtctaccccgagcagtccttcaccctgatgatggcggtgtcgatgttcggcgccctcttcacctggctgatgatcttcttcacccacctctgcttccgccgccaccgcgcccgccacggcggcgcgccgctggccttccgcatgcgcctggcgccctggtcgacattgctcggcctggcgctgatggcggcgatcctggtcaccaccttcttcaccgaggcgttccgcatgaccctggtcttcggcgtgccgttcctcgcgctgctcagcgcactctacctggtcttcgtccgcaagcccggcagggattgtccgatagaacgggcaacgccctag

SEQ ID NO: 318813 - DNA, 1251 bp, Pseudomonas aeruginosa
atgaccactcgtgacgactgcctggcgctcgacgccggcgatcccctggccgacctgcgccaactgttcgccctgcccgacggcgtgatctacctcgacggcaactccctcggcgcccgcccccgggccgccgtggagcgcgccgccgaagtggtcgccgcggaatggggcgaggggctcatccgcagctggaacagcgccgactggcgcggcctgccggagcgcctcggcgacaagctggcgcccctgatcggcgcgcgcgccggcgaagtggtgatcaccgacaccacatcgatcaacctgttcaaggtgctcagcgccgccctgcggatccaggaggaagacgcgccagggcgcaaggtgatcgtttccgaatcgagcaacttccccactgatctgtacatcgccgagggccttaccgacatgctccagcgcggctaccggctacgcctggtagatgacccggagcaactgccggcggcgatcgacgcggataccgcggtggtgatgctcagccatgtcaactacaagaccggctacctgcacgacatgcgcgaggtcacccgcctggtccacgaaaacggcgccctggcgatctgggacctggcccactcggccggcgcgctgccgctggacctgcacgcggccgacgccgactacgccatcggctgcacctacaagtacctcaacggcggccccggctcgccggcctacgtgtgggtcgcgccgcgcctgcgcgagcgtgtctggcaaccgctgtccggctggttcggtcattcccgccagttcgccatggagccgcgctaccagcccggcgaaggcatcacccggttcctctgcggcacccagccgatcacctcgctggccctggtcgaatgcggcctggatatcttcgcccggaccgacatgcagcgcctgcgcgacaagtcgctggccctcgccgatctgttcatcgaattggtggaaagccgttgcgaacgcttcggcctgaccctggtgaccccgcgcgagcatgcccggcgcggcagccatgtcagcttcgagcatgcccagggctacgccatcgtccaggccctgatcgaccggggggtaatcggcgactaccgcgagccgggcatcctgcgcttcggcttcaccccgctgtacacccgcttcgtcgaggtctgggatgcggtgcaggcgttgctggaaatcctccagagcgaagcctggaaagagccgcgctaccaggtccggcacaaggtgacctga

SEQ ID NO: 318814 - DNA, 642 bp, Pseudomonas aeruginosa
atgacttcgctccgctactgggacatcagtcccgccctcgacccgagcacgccgacctggcccggcgacacgccgttccagcaggaatgggcggcgcggctggacgagcagtgcccggtcaacgtcggccggatcaccctttcgccgcataccggcgcccacgtcgacggccccctgcactaccgcgccgacggcctgcccatcggccaggtgccgctggacgtctacatgggaccgtgccgggtgatccactgtatcggcgctaacccgctggtgacccccgaacacctcgccggccagctcgacgacctgccctcgcgggtgctgctgcggaccttcgaacgggtcccggcgaactggccggaaggcttctgcgctatcgctccggccaccatcgagtgcctcgccgagcgcggcgtcaggctggtcggcatcgacaccccgtcgctcgacccccagcactccaagaccctcgacgcccaccacgcagtgggccgccacggcatggcgatcctcgaaggcgtggtcctcgacgacgtgcccgccggcgactacgaactactcgccctgccgctgaaattcacccacctcgatgccagcccggtgcgtgccgtgctgcgcgccctgcctaccgcggagtaa

SEQ ID NO: 318815 - DNA, 477 bp, Pseudomonas aeruginosa
atgtccctggacgccatcgatctgcgcattctccgtcacctgcagcaggacgggcggatgagcaaccaggacctggcggagaaggtctccctctcgccatccgcctgcctgcgccggctgcgcctgctggaaagcgaggggatcatccgcggctactcggtggaactggatgccgagcgactgggcgtggagctggaagccatcgtccatgtgtcgctgcgccaggacgtcgagggttggcacgaggcgttcatcgccagggtccgggactggccggaggtggtcaccgcctatgtggtgaccggcgccaccaactatgtgctacgggtccgggcgcgcaacctcaagcactattcggacttcatcgtgaacaagctgaaccgcgccgccggcgtcaccgacatccgctcggaaatcgtcctgcaggagatcaaggccggtgccgacctgctcgacctggtgaacctgaagagttga

SEQ ID NO: 318816 - DNA, 1275 bp, Pseudomonas aeruginosa
gtgagtgaatatatcgagaccgacgacgcaagttacttccgggtcaggcgccaggcctatgtttccgcggaactgcaccggcgcgaactgcacgagatattcgacgacagctggctgtatgccgcccacctcagcgaactgcgcgagcccggcgacttcatcacccgcgacgtcggcgggcgcaacctgatcatccagcgtcgcgccgatggcgagccggcggtctacctgaacgcctgcgcgcaccgtggggccaaggtctgcgccgagcgccagggcaacagccagcgcttcacctgtccctaccatggctggacctacgacagccacggcagcctgatcggcctgccggacaaggccgcctaccagcatgccgggcaatgccatccggagctgtccctgacacgggtgaaacacgcggtctaccgcaacttcctgttcatccactacgccgcccggcaaccgtccctggaaacctacctgggccaggcgaaggactatatcgacctgatctgcgaccagtccgaggcggaactggagatcatccccggcggcttcgagcattcgatcaaggccaactggaagctgctcgcggaaaacggcgtggacgcctaccacctgccgttcgcccacaagcgctacctggaatacctgaataccctcggcaccgatccggagtcgcacaagcgccacggacgcggcgaggcgctgggcaacggccacgcgctgatcatcagcggcccgccgtccaccggacggccgatcgcctactggagcccgttgttcccggaagcgctcaagccgtccatcgccgccaagttcgaacgcctggtggaacgcttcgggcaggcgcgggcagaggacatcgcccacactaacaaaagcctgttcatctttcccaacctggtgatcaacgacatcctcggcctgaacatccgctcgttcttcccgactgccgccgatgaggtcagcgtcaccgtatggggcgccggcttcgccgatgagacccgcgaggagcgggcggcgcggatcaatgggttgatctcgttcatcggcccgggcggtttcggcacccccgacgacgtcgagatcctcgaatcctgtcagcgcgcctacgcccacgccgccctcggctacagcgatttttcccgcggcatgggaccggcaacccgccgccacgtcgacgaggagcagaaccgcggcttctggcgcgagtggagccgccggctcgggcagcagcctgccgccctgcggcttctcgccgtggccgtctga

SEQ ID NO: 318817 - DNA, 1833 bp, Pseudomonas aeruginosa
atgtgtggaatcaccggctggaccgactggagccgcgacctcggcgagcagcgcagcatcctcgaacgcatgacccgtaccctggccccgcgcgggccggacgccgaaggcctgtggctgtcgcggcacgcgctgctcggccatcggcgcctggcgatcatcgacctggagaacggcgcccagccgatgcttgccgaggctggtgggcgggtggcgctgacctacagcggcgaggtctacaacttccgcgagctgcgcgccgagctggagacgctgggccaggtcttccgcacccgctcggacaccgaagtggtgctgcgcgcctatctgcaatggggcgaggcttccttcgtccggctccgcggcatctacggcttcgccctgtgggacgagcgcgagcagagcctgtggctggtgcgcgatcgcttcggggtcaagccgctgtactactacccgaccgccggaggcgtgctgttcgcctcggaacccaaggcgatcttcgccaaccccgaggccaacccggtgctcgacgccagcggcatcgccgagctgttcgccctgaccaccgcgccgactcccggccacggcctgtacaagggcctgcgccaggtccggccgggccaggcgctgcgcttcgaccgcaatggtgtgcgcgagttggtctactgggcgctgcgcgcggaacgtcacgaagagggcgccgaggacagcgccgaacgcgccggccagttgctccgcgaggcggtggccgagcaactggtggccgacgtcccgctgggcagcctgctttccggcgggctcgactccagcgccatcagtgccttcgcggtggccgcgctggatggcgacgcgcggcgcctgccgaccttctccgtggacttccccggcgaaggccgcggcttcgtcccgacgccctggcaaagcagctgggacgaaccctatgcgcagctggcggcgaacttcctcggtacgccgcaccgtaccgtgctggtcgccccggaagaggtgctggaacaggacgaggcggtgctccaggcccgcgacctgcccggctggggcgagctggacgcctcgctctacctgctgttccgccaggtccgcgagcacaccacggtggcactgtcgggcgagtcggccgacgaggtgttcggcggctacccgttcttccacgacccgagcgccctcgcacacgacggcttcccctggctggccggcaagagcgggccctggcaactgctgcggcgggaggtcgccgaacgggtggcggcgccggaatacatccgggcgcgctaccgcgaggccctcgccgaagtgccgcggctggatggcgaggatgccgcccagcgacgccagcgcgaggtcgcctacctggcgctgagccgctggctgccggcgatgctcgaacgcaaggaccggatgagcatggcggtcggcctggaagtgcgcgtgccgttctgcgaccaccgcctggtggagtacgtatggaacctgccctgggcgctgaagagcgtcgccggggaaagcaagagcctgctgcgccgggccctgcgcgggcacctgccgcaggcgatcctggagcggcgcaagagcggtttcccggccaaccccgacccacgttacctggcgctgctgcgcgagcgggtcggccgcctgctcgacgacggccgctcgccgctgttcgaactggtggacgccgggcgggtccgccaggctctcgaacagggcacgccgctgcccagcccgcgtgcctcggcgagcccgaccgccggcctggcctacctgctgaacctggaccgctggctgacccgccatggggtcgacatcagcctctga

SEQ ID NO: 318818 - DNA, 510 bp, Pseudomonas aeruginosa
atgagccttgccttgtcccgtcccgacagcgacctgctggcgcgggtcagcgatttcctcgtcgccgaagccgagctgctcgacgaccgcctgctggatacctggttcgcgctgttcgagcgcgccgcacgctaccgggtgctgcccttgcaggagcaactggccggccaggcgccggaggacagcctgtacatcatcgacgacgaccacgtgcgcctgcgcgagcgggtcgacagcatcctcggcgggcatacctggatggagcagccgcgctcgcgcacccgccgcctggtgggcaacgtgcggctgaagcgggtcgagggcgaactggtcagcagccgcagcaacttcgtcgtccatcagttccgcaaccgcgaggcctggagcttcgtcggcgaagccagtcatgtcctgcgcgacggccccgggggcttgcgcatcgtctcgcgggagatccgcctggaccacgagaccatcagcgcccagcggcgcatcagcatcatcctgtga

SEQ ID NO: 318819 - DNA, 903 bp, Pseudomonas aeruginosa
atgaataccgatccgttgctgcccggcttcgactacctgaccctgcacacctctgccgcgcgcctccgcgtcgccgtgaagggcagcggcccgccgctgctgctgttgcatggctatccgcagacccacctggcctggcatcgcatcgctccgcgcctggccgaggactacagcgtggtcctcgccgacctgcgcggctatggcgaatcgcgggcgctggacgaggagggcgccgactattccaaggccgcgctggcccgcgaccaactggaaacgatgggccagctaggcttcgaacgcttcgcggtgatcggccacgaccgcggcgcgcgggtcggctatcgcctggcgctggaccatccgcaagcggtcgcggccttcgtctcgctgaccgtggtgccgatcctcgacaactgggccgcggtgaacaaggccttcgccctcaacgcctaccactggttcctcctcgcccagccgtacgacctgccggagcgcctgatcggcgccgatccggagcacttcctcgactacaccctgcgacgcatggcccagggccgcgacatctaccacccgcaggcgctggaaagttaccgccgggcgttccgcgaccccgccgtgcgccatgcgatgtgcgaggactaccgggccgcggtgggcgtcgatgccgacgccgaccaggccgatcgcgacgccggccggcgcctgcaatgcccggtccaggtgctctggcaggagcgcccctacgccgccgggcagcatccgctggaaatctggaagacctgggccgggcaggtcgagggcgccgccatcggcgccagccacatgcttcccgaggacgcgccggacgcggtgctggagcacctgctggggtttctcgccagccaccgggaggcgctccgatga

SEQ ID NO: 318820 - DNA, 657 bp, Pseudomonas aeruginosa
atgagcgccgtcgaacgcgatccggcggcgcaggcgacgctctggcgacagcgggtgttcgaggtgcacgcggcgatgtccgcctacgtcgccgagcgccatcggcgtgaagacctgggggactgggtggcgaccagcgcgcggatattcgccgatctgccggcgaccgacgacctgcgcgccgaagcctggcaggcggtgttcttccgcgcccaggcgctgatcgaacagttcatcgtcgcgcgcccggcggattaccggctcgacgactgggcgcgcgccaccgcgcggatctatcgcgcgctggaaccggcggggcggggcgatccggccagcgccgccgaccgtctggcacgccaggccgcgctctacggttcgcgtttcgaggtgcaggccgaggctgacgggcgcgcggtattccacaaccgtcactgcgcgatctgggactaccgcgagcgcgcccgcgcccgaggcgtgccgatcaccctggagtcggcctgcacctattgcaccaagctgctgtcggcgttcgtcgccgccagcgattgccgcgccgactggcggctctacgaagagccgcaaggccacggctgcgtatggaccatcacggcggacagcctcaaccaaggagcaggcgtacatgaacgcgatcattga

SEQ ID NO: 318821 - DNA, 849 bp, Pseudomonas aeruginosa
atgaacgcgatcattgaacaggcgcgcagcctggacggctaccaggattccagcgaactgctgcaacgtcgcgaccaggactgggtgctcgaccgcgccggcatcgagccgcgcagcctgctcgatctcggctgcggcatcggctcgctgctgctcggcggcgcccggcgctggcccggcctgcaacggttgtggggcatcgagcgttcgccgctacgcctggagcaggcgcgcgcgcagttgcgcggggctggcgtcgaggcgcgtctgctggagggcgacctgctcgacctgccgccgctggcggaacgcttcgagctgatcagcatgaccgccgtgctgcactggctgtatcccgatgaagagcggctgttccggtgggtcgcgcggcacctcgaggcgcagggggtattcctgttcacctcgcaccatccgttcgccgaggatggcctcggcggcgaggacgacctggtcgcccaggccctggtcgagatgggcctggctgcgccggaacgggtggtggcgctctacgcggaagccgggctgctgccgatgggcacccgcacccgtggccgggaggcgttgcgcgaacgcgtcgaacgacacttccgggtcgactccatcgtctcccgcccggcggtcctgcgtgtcgccgactccgccgaataccagcgtttccacgccgccaccttcggcacctatttcgcaccgctggtgccggcgacgcgcctggaggaattcttcgtccgcctcgggcggatcgccgagcggcgcatgcaggccgacggacaggtcagcgaaatcccggtcagtgtctggcgctgccgggctcgggagggcgaggcataa

SEQ ID NO: 318822 - DNA, 2652 bp, Pseudomonas aeruginosa
atgtccaacccgcgttcgccacgtcttcgactcgtccccgtgctctgcgcggtcggcctggcctgccttggccagcccggcgagtcggcggcagaggaggtccgcgccaccagcagcgccgagatccagcgcttcgacatcccggccggcgaactggcccaggtactgctgagcatagtccgccagagtcgcaccccgatcgccttcgaccagcacctggtggagggcctgccggcaccggcgatccagggctcctacagcgtcgagcaggcgctgcagcgggccttgcagggcagcggcctggaatacatccgcagcgccgccggcgtgctcagcctgcaacgcgccacggcgccggatgccgcgctgccggcggcgaagcccgccgggaccctggccacggtggtggtcaccggcacccgcaaggccgatgtcaaggccggcgagagcctggcaccgatcgatgtggtcagcgccgagcaattgcgcgacagtggcagcggcgacctgcgcgacgccctggtgcgcctgctgccctcgctgtcgcgccaggcccaggcctacaacgcttcggcgctgaccaacgcgcagtcgctgcgcggcctgagtcccaaccacgtgctggtgctggtgaacggcaagcgccgtcacgagaccgccaacatcaatgtcagcggcgggctgcagagcggctccaccggggtcgacctggataccatcccgctcgccgccatcgagcgcatcgaggtgctgcgcgacggcgcctcggcgcagtacggctcggacgccatcgccggggtgatcaacgtcatcctcaagtcggccgaccacggcggccggctcgcctacgacaacggtcgctacggcgatggcgacggcctgacccagaacggcggggtgaatggcggcctgcgtttcggcgagagcggtttcctcaacctcagcgcgcagttccgcgaacaggcgcggaccatccgcgccggcatcgaccagcgtaccgggcactacggcaacccgtccatcggcgacccttcgctgcaccgccaggcgctggcctacaacgccggcgtggcgctggacgacaacgtcgagctgtacagcttcgccacctatacccatcgctcggtgtcctcggcgcagatctaccagttgccgtccctggcgccgcgactctatccgaacggcttcaccccgcgcatcaccagcgacgaggacgactattcgctgaccctcggcacccgtggcggcgagctgttcggcgcctgggactgggacctcagttcgacctacggtgccgaccgcccggagatcggcatggaccattcgatcaacctcgccctctacggcgagaccggcgattcgccgcgctccttcgacctggcgcgctacaaggccacccagtggaccaacaatctcgacctgcgccgcgacttcgacctcgcctggctgccggcgccgctgaatttctcctggggcctggagcagcgccgcgagctctacgaggtcgaggccggcgatccctggtcctactacaacggcggttccaaggcactccccgggcaggcgccggccaccgccggacagtggagccgcgacgtgctcggcgcctatctcgacctgtccatcgccctcgacgagcgctggcaactggagacggcggcgcgctacgagcactacagcgacttcggcagcaccaccaacggcaagctcgccagccgctaccgcttcagccccgaggtatcggcgcgggccagtctcagcagcggcttccgcgcgccgtcgctggcccaggagaactacacaagcctgggcgtctcgccgaccatcgccagcggcctgctggcggtcaactcgccggcggccaggctgctcggcgccgaagacctggagccggaaaaatcgatcagctacaacctcggcctggtgctcgatcccttgccggacctgaacctggccatcgacgcctatcgcatcgagatccgcgaccgcatcgtcgacggtgccacctattccggacagccggcgatcgatgcgctgcgcgccggcgggatcagcatcccggccggactgacccaggtcagcacccactacatgaccaacggcgccgacacccgtacccacggcctcgacctcaccgccagctacctgacccggctcggcgagtggggccggatcgactggcgcctgggcgccaacgtcaatcgcacgaagctggtcaggaatcatcgcgggcgcaacggccagccgctgctcaacgaccagcagcaggcctggatcaccagctccacgccgcgcagccaggtcagcctgcaggccgactggagctaccggcgctggggcctgaccctgcgagaaacgcgctacagcaagacggtttccgaactggactactacaccggcgagcatgcctattcgaccacggtcttcaaccgcttcgagaattcgcccaagtacatcaccgacgttgccctgcgctatgcggcgagccgcaacctgaccctgagcgccggggccaacaatctgttcgacgtgaagcccgacaagctgccggccgagagcgcctacctcggcttcaaccagtacgacacctatgcctcgcagatcagcttcaacggcgccttctactacctcggcgcggcctacaccttctaa

SEQ ID NO: 318823 - DNA, 1080 bp, Pseudomonas aeruginosa
atgagcatcgaactgcgcggcggcgtgcgcgcctccgcggtcatcggcgacagtgccttcgcccgccaggccgcgcgtttcctgccggacacccgcagtcgcgcggtgagcgccttcgacatccagcagaaggcccgcctggaagaggcggacggcctcgacggcgcgctgttcaccgtttccgctgcctggcccgacccctggctggtcgccggctgggctttggccgcggcgccgcgcctgcgcgccaccgtcgcgcaccgaccggggagcgcccagccgaccgttgccgcgcgcgccctggccactctcgacggcctgtccaacgggcgcgccggcgtacacctggtgatcggctccagcgacgccgacgtgcgccgcgacggcgacttcgccgacaaggacgaacgctaccggcgcgccgtggagtacctggaggtcttcacccgcgccctggaaagccgcgaacccttcgactaccacggcgagttctaccggctggaggacgccggcagcggcttcctgccgatccagcggccgcgcccgccgctatccgttggcggctcctcggcgcaggcacaacgcctggcggtgcgcttcgccgacgtctacgccggccacttcgccagccccacgcagaccgcggagctcaagagcaggctgaacgaggaggcggcggagcagggacggcggctgaaattctggaagcacttccaggtgatcctcggcgacagtccggcggcggccctggacatcgccgagcactaccgccaggccgctttcgaactgcttctggcacggcccctcgacgaactggcggcatcgccgcaggtcgcccgcgacggcgagcgcgaccggctcgcccggctggagccggaggccttgcgcgaatgggtggcgaataccgtgcagcgcagcttcgccggggtgctggtgggcagcgtcggcgaggtggcggaacagatcctggcctttcatcgcgccggcatcgagatcgtccagctcgaggccaccaccgagaacgccgaggacatccgcttgcgccgccaactgatcgagcgcctgaggcgcgacgcatga

SEQ ID NO: 318824 - DNA, 1281 bp, Pseudomonas aeruginosa
atgagcggcgtcgcccgcgaggccatggaggacgtcgcgccggcgcctggcgtcggcgagttcggcgtggccagttgtggggtgctgctggcctcggtagtgggggtgatcttcggccccaccgggctggtgatcagcagcttctcgctgttcatcgagccgatcgccgccgacctggactgggaccgcggccagtcggcgctgccggtgaccctgctgggcctggcggtagccctgagcagcccgctgaagggctggctggtggatcgctggggcgcgcgcgccctggtcctgccgctgaccgccgcgctggccctgtgcctggccagcctggcgctggcgcgcagcggctggcagctatacctgctgttcgcgctgctcggcctgctgacgccgggcaacattccctatgcgcggattctcggcggctggttcgagcgtcgtcgcggcgcggcctacggcatcctcggactcggcttcggcgtcggcgggccgctggcgctgtacctgggcagcgcctgcatcgacgccttcggctggcgcgccaccttcctcgtctatggcctgctcgaaggcctcctggcgctgccgctgctctatgcgttgttccgcgagcgacccggcgacctgccgcaggcgctgcgcccgccagccgacgcgctgcccggagcgacgccaggccaggcctggcgctcggcggacttctggctgatcgtcggcaacctgatcctcggcgtgttcgccgtcactggcgtgatggtgcatggcgtgccgctgttgcaggagcgcggcctgtcgcgggaagtcgccaccgacgtgctggcggcgctgtgggtcggcatgatcgtttcgcaaccggcgctgggctacctgctggaccgctacgacaccccgcgcatcgccttgccgttcgccctgctggcggcgctcgggctgctgctcctgctccttggcggaccgccggcgctgctctggggcgcggtgttcctgatcggcctgggcgccggcggcgagaccggcaccacccagtacttcgtcagccgctacttcggcctgcgccatttcagcgtgatctatggctcgatccagcccttcaccttcgccatcgccatcagcctggggtcctggctgctgggttacttctacgaccgcgcgggctcctacgcgggctcgacgctggtcctgctcggcgcgttcggcgtggcggcagggctgctggtcatgctcgggcgctatcgctacgccatcgacggggaggcacgcagccatgggcgagactga

SEQ ID NO: 318825 - DNA, 1194 bp, Pseudomonas aeruginosa
atgggcgagactgaacggagcagggcggaggtcggcgtctggctgctggccggactggccttcgtggtcggcacggtggaactggtggtggccggggtgctcgacgaactggccgccagtttcgccgtcagccagggccgggccgggttgctgatgagcctgtacgcgctggtctatgcgctgctcggcccgctgctggtctacctcagcgccggtatcgagcgccgccgcctgctggccggcgcgctgctggcgttcatcggcgccaacctggccagcgccgccgcgccgagcttcgccctgttgctggcgagccggctgctggtggcggccagcgcctcggtcatcgtggtggtggcgatcaccctggcggtggccattgtcgcgccggaacggcgcggccgagcgatcggtctggtgttcgccggcatcgtcgcctcgctggtgctgggcgtaccgctgggcaccctgatcggcgagttctggggctggcgtagcctgttcctgctgctcgccggggtcgcgttgctcggcctgccgctgctcctgcgcctgctgccggccatccccggcgcgcccggcatcgccccggcggagcaactgcgggcgctggcccggggccgggtgccgttcgcccacctggcatcgctgttgcagatgaccggccagttcaccgtctacacctacatcgtgccgttcctggtcggcagcatggccctcgacaaaccgaccatcagcctggtcctgctggtctacgggggcggcggcatcctcggcgcgctgctcggcggacgcgccgccgaccgctggccggggccggccaccttcgtcgccttcctgctcctgcacgcactggccctggtcctgctgccgttcgccaccggcggcctgccgctgctgctgggcgctgtggtgttctggtgcgtgttcaacatggcgccggggccggcgatccagaaatacctggtggaactcagcccggacaccgcggcgatccagatcagcctcaacaccagcgcgatccagctcggcgtggccctgggcgccttcatcggcgcgatcctggtggaccaggtggcggtgcgcgcgctcccctggtggggcgccgcgctgatcctcggcgccgccgcctgcggctggctgtccgcgcagcggccggcgggcacggcggactgccgggagcgcctcgattga

SEQ ID NO: 318826 - DNA, 510 bp, Pseudomonas aeruginosa
atggatagccaaggctccatcaagaacaccctgatcgcccagttgttccagcagaactacgactggctgtgcaagaagctgtcctaccagaccggctgtagccacagcgccgaagacctcgccgccgaggccttcctgcaggtctggatgctccccgacccggcgtcgatccgctcgccgcgggcgttcctcgcgaccatcgcgcaacgcctgatgtacgagagctggcggcgcaaggacctggagcgcgcctacctgcagatcctcgccgaggctccggaggcggtgcagccgtcgcctcacgagcagtggatgctgatcgagagcctgcaagccatcgaccgcctgctcgacggcctgtccgggcaggccagggcagtgttcctgatgagccagctggaaggcctgacctacgtgcagatcggcgaacgcctcggattgtccctggggcgcatccaccagttgatgaaggatgccttgcactgctgctaccggggattccaggaatga

SEQ ID NO: 318827 - DNA, 957 bp, Pseudomonas aeruginosa
atgagcgagaagccggaacggcaacgcatcgtcgaggaggccatcgaatggatggtgcgcctgcaatccggcgacttcagcgccgccgagggcgatgccctggaacgctggaaggcgctgtcgagcgagcatgccgaggtgttccggcaactgcttggcagcctcgcgccgctacaggactcgccctggcgcggccagccgagcgctaccgtgctgcgcgccttggagcagccgtcgagccgccggcgcttcgtcggcggcgccctcgggctgttcgtcctgctcgccggcggcgccggcctggagcgctgggtccaggccggcatgggtctgcccggcgaactggcgaccggcaccggcgagcgccgcgactggttgctggccgacggcagccgcctgcgcctgaacgcgcggagcaaggcgcgaccgctgctcgacggcgcccagcggcgcctggagctgcggcgcggcgcgatgcgcctggaagtgaaggaggacccgcgcggcgccttcgccctcgactgcgccgccggacgggtggactgcgccagcggcagcctgctgctggccgaggagcgcggggcgatccgcctggtgaccctgcgcggcagcgcgcggctgaccaccggtgagggacgccagctggcggtggcggcacgacgtagcctgctgttcgatgccggcggcctgctcgaacagggcccgatgcaggccggagaggatgcctgggccagcggctggctggaggtccacgaccgctccctggcctgggtcgcggaggccttccggccctatctgccaggcatcctccagctcgacgcggagatcgccggcaaccgcgtcagcggtctgttcccgctggacgacatgcacacgtccctggacatgctcggacgcagcctgccgatccgcgtgctgcgctacagcgactactggatcagcctgcgccccgcctga

SEQ ID NO: 318828 - DNA, 846 bp, Pseudomonas aeruginosa
atgggttgccagcaacacgcatggccggcgcacgcgccggagcaggtcgaggccgaggtcaactatatccgcgacaacggccaacggccggtcgcctacacctatccggcccccgccgggacgccgcagcgcagcgcgctgttgcagccgacccgggtggcgatccgcaatgcgcgtctgctggcgcaaccggccagcctggagcgcgagggtttccaactggtgcgcgaggcgagcgcggtgggcgatttcgaggatgaagcccaggttcgtgaacgctactacccggaaagcatcgccctgctccgccgcctgaccggcgccgccgaggcggtgatcttcgaccacacgctgcgcgtcgaccaggccgggcgcgaagaacgcggcctgcgcgaaccggtgcgctacgtgcacaacgaccagaccctgcgctcggcgccgcgccgggtccgcgaccacctgccggcggaatgcgccgaacggcgcctggccggacgcttccagatcgtcaacctgtggcgtccgttcggccatccggcgcagcgcgcgccgctggcgttgctggacgcccgcagcctggcgttcgacgacctggtggccagtgacctggtgtaccgtgacaaggtgggcgaaacctactcggtcaagcccaacccggagcaccgctggtactactacccgcacctgctgccggaggaagcgctgctgctgaagatctacgattcgcgggaggacgcgcaggcccgcctcggcgcgcacaccgccttcgacgatccctgcaccccggccgatgcgccgccgcggcagagtatcgaactgcgttgcctgctgttcttcgacgaatga

SEQ ID NO: 318829 - DNA, 1035 bp, Pseudomonas aeruginosa
atgcccactccgccctggtctccccgccgcagcgccatcagcgcgcacctgctgatccagttcggcatcgaccgcggcctcggcctggagcagtgcctggcaggtagcggcctggatatccgcctgctcggcgatccctccggggaaatcgacgcggcccaggaactgagcgtcgtgcgcaacctggtccggcacctgggcgacgcctgcgcgccgggcctggcggcaggcctgcgctatcacctcaacgcctacggcatctggggcttcgccctgctcagcagcccgaccttcctcagcgccgcgcaactgggcctgcgctacctcgacctgaccttcgccttccatggcatccgcctggaggtacacgacgatgaagcgcacctggtgctcgacgacgccggcattcccgaggacctgcggattttcctcctcgaacgcgacgccggtggcgtgctgcgcatccagcgcgacctcaccgggcagcgcctgccgatcctccgcgccggcttccgccgcccaccgcccgccgatcccgcgccctacgtgcgcgagctgggcctgtgcccggcgttcggccaggcggacaaccgggtggtcttcgaacggcgcttcctcgacctcccgctgcccggcgccaatccagaggtggcgcgcgcctgcgaggagcagtgccgcgccctgctcgcccgccgccaggtgcgcggcggtctggccggacgcatccgcgaccgcttgctgaggacgcccggccacttgccggacatgcagaccctggccatggaactgcacctcaccgtgcgtaccctgcgtcgccgcctggacgacgagggcagcagctaccgcctgttgctcgacgaggtgcgccaggccctcgccgaagagctgctggccaccggcgcgattcgcctggaggagatcgccgagcgcctcggctacggcgaggtgtccaacttcatccatgccttcaggcgctggaaaggcatgacgccgcgccagtatcgccagcggcgacgactcgacgcgatgtcctga

SEQ ID NO: 318830 - DNA, 1476 bp, Pseudomonas aeruginosa
atgcacaacgagtcccgccctgaagcccccttgcgggtgctggtggtcggcgccggcttcgccggtctcggcttggcgatccgcctgcgacaggcaggcatcgacgattatctggtcctggaaaaggccgccgatgtcggcggttgctggcgggaaaaccgctacccgggcgccgcctgcgacgtcccctcgcatctctattcgttttccttcgagccgaaggccgactggtcgcgcaagttcgccccgcaggcggaaatcctcgactacctgcggcattgcgcggacaagtaccgtctgcgcgagaagatccgtttccactgcgaggtggaggaggcccgtttcgacgccggcagcggcgaatggcaggtgcgctgctccgatggccagacgctgcgcgcacgggccctggtctgcgccaccggccagttgagccggccgctgctgccgcgcctgcccggcctggagcgcttccagggtccggcgttccactcggcgaactgggacgccgaggtcgagctggccggcaagcgggtcgcggtgatcggcaccggagccagcgccatccagttcgtcccgcggatcgccccgcaggtgcaacgcctgtcgctgttccagcgcagcgcgccttacgtgatcgccaagccggaccgcacctacgccgactgggaacgccgcctgaaggcgcgctggccgtggctgcaacgcctggatcgggggctcaagtacctgcaccacgaatcgcggatgctcgccttcgcgaccttcccggcgctgatgaaggtgatgcggctgagcttccatcgtcacctgcaccggcagatcgccgatccgcaactgcgcgcgcggctggttcccgactacccgctgggttgcaagcgcatcctgatcagcaacgactattacccggcgctggccaggagcaatgtcgaactggtcgacacgggcattcgcgaagtcaccgaagacgccgtggtcggccgtgacggccgccggcacgaggtcgacgcgatcatcttcggtaccggcttcgccgccaccgagttcctcgccccgatgcgcatcctcggcctcgacggacgcgacctgcggcaggcctgggcggatggcgcggaagcctacaagggcatcagcgtcagcggcttccccaacctgttcatcctttacgggccgaacaccaacctcggccacaactccatcgtctacatgctggaaagccagttcccctacgtgctcggctgcctgcgccagctccaggcgcagggcttgcgctacctcgacgtgaagcccgaggtccagcggcgcttcaacctggaggtgcaacaggggttgcgccataccgtctgggagcgtggctgcgacagctggtacaagactgccgccggcaagaacaccaacaactggccgggctacaccttcgtctatcgctggcgtacgcgccggccggagcttgccgactatgacctggcccgctga

SEQ ID NO: 318831 - DNA, 957 bp, Pseudomonas aeruginosa
atgacctggcccgctgaagcgcccctgatgtcgccgccgcaacgcctgcgcgccggtctcctgcgcggctgcctgcgcctgttgttccgcgggctggtccgtccgcccatgccagtggcgctgcaacgcggcgtgttgcgcgggctgagcctggcgacgctgggcgccggcggcgtcgtccgcgagcgccgcagcctcgccggcgtgccctgcgagtggttgcggccgcgcggggtggaggcgcggcgccgggtgctctacctgcacggcggcgcctacctgatcggctcgccggcgacccaccgggcgatcaccacgcacctggcccggcgttgcgccgccgaggtctgcgcggtggactaccggcgcgccccggaacatccgttccccgccgcccgcgacgacgccctggcggtctacctggcattgctggaggccggccattcgccgcgccggctgctgctcgccggcgactccgcgggcggccacctggcgctgtccctggccctggagctgaaggcgcgcggcttgccgttgccggccgggttgctgctgttctcgccctggaccgacctcggctgccagcgcctgcacacgccggcggccggcgacccgctgctgtcgcgggcctggctggaaagcgcggtgcgcctgctgctgccggccgacgcggagccaggctcggccgccttgtcgccgctgcatgccgacctggcggggctgccgccgctgctggtacaggccggcgaggacgaactgctgcgcgacgacagcctgcgcctggcgcaacgggccggtgagcagggcgtcgcggtgcgattgcagcgctacgccggttgctggcacgtgttccaggctcatgccggcgtgttggccagcgccgaccgggcgttggacgaggcggccgcgttcgtcgtcgaatgcagcgcggagggcgacaggtgcagaacattctga

SEQ ID NO: 318832 - DNA, 759 bp, Pseudomonas aeruginosa
gtgcagaacattctgatcagtggtgccgcttccggaatcggcgccgccagcgcgcggctgttccaccgccggggctggcgggtcggtttgctggacatcgatgccgaggcgttgcgcggcttggccgcgcaactgccgggcgcctggcaccgcgccgtggacgtcagcgagcccgacgtggtcggcgaggcgcttgcgcagttctgtgccgatggccgcctgcgcctgctgttcaactgcgccggcgtcctgcgtttcggccgcttcgaagaggtcgccctggaggaccacgcgcggttgctggcgatcaacctgcaaggcgtcctcaactgctgtcacgcggcctttccgttcctgcgcgcgacgccgcaggcgcaggtgctcaacatgggctcggcatcggggctgtatggcgtaccggagatggccgtctactcggcctcgaagttcgccgtgcgcgggcttaccgaggcgctggagctggaatggcgccgccacggtattcgtgtggccgacctgatgccgccgttcgtccgcacgccgatggtcgccgggcagccctaccagccgccggtgttgcgtcgcctggggctgagactggacgccgaggatatcgccgaggcggcctggcggcaggcgcacagccggcgggtacaccggccggtgggcgggttgttcacggcgctgtactgggctgggcagttgtctccgccgtgggtgaaccgagcggtgatggcgtggttgtcgcgggacgaatag

SEQ ID NO: 318833 - DNA, 399 bp, Pseudomonas aeruginosa
atgacccgcgccatcaacgatcccggaaacgaagaccccggctccctgctggaaaccgacgccgacgccctgctcggcggtgccgccgtccaggcgccggaagagcgctgccggctcgcgtcccaggactgcatccgcgcgtgcgagcgctacctggcgctctgcaccgagtccagcagggaacaacgccagcacgccggcgactgcgccgacctctgccgcctcgccgccctgctactggagcgccgcagcccatgggcgccggccgcctgcgagctggcggcgcgctatgccctggcatgcgcggagcgttgcgatggcgacgagccgctggagcgcgaatgtgcgggtgcctgccggcgcttcgtcgaagcctgtcggccgttgttgccggcctga

SEQ ID NO: 318834 - DNA, 1773 bp, Pseudomonas aeruginosa
atgtccagcacggttgccgatcaattgctcgaacgcttgagccagtggggggtgaagcgcgtcttcggctaccccggcgatggcatcaacgggatcatgggcgccatgggccggcgcgccgaggcattcgactatatccgcgtgcgccacgaggagatggcggccttcatggccggcgcccacgccaagttcaccggagaggtcggggtgtgcctcgccacctcggggccgggcgcgatccacctgctgaacgggctctacgacgcgcgcatggatcatcagccggtgctggccatcgtcggccagcaggcggctaccgcgttgggcagcgactaccagcaggaagtcgatctgcagagcttgttcaaggacgtttccgcctatgtcgagaccgtggtcagcccggcacaactgctccatgtgctggaccgagccctgcgcgtggcggtcggcgagcggcaggtggcgacggtgatcgtgcccaacgacgtgcaacagatggcggccccgaagcgccagccccacgagcacggccacgtgatgtcggcggtgggcttcgtccagccgcgaccctacgcgcgcgacgccgacctggaagccgccgcggcgatcctcaatcgcggccggcgcgtggcgatcctcgccggtgccggcgccctgggcgcgcaccggcaactggaagcggtcgccgagcgcctggccgccggagtggccaaggcgctcctgggcaaggcggcggtttccgacgacctgccgtacgtgaccggctccatcggcctgctcggcacccgcgccagcagcatgctgatggagcattgcgacaccctgctgatcgtcggcagcactttcccctacagcgagttcctacccaaggccggccaggcgcgggcggtgcagatcgacctgtatccgcgcaacatcggtatccgctatccgatcgaccaggccttgctcggcgatgcaggggaaaccctggagcgcctgctgccgctgctcgagcagaaaaagcacggtgcctggcgccgccgggtcgagcgggcggtgacggcctgtcgcgaggaagcccggcgccaggccgaagagccagccgacccgatcaacccgcagcgggtattccgttccttgtcggagcaactgccggacgatgcgattctctgcggcgacagcggctcgtataccaactggtacgcccgcgacatccgcatgcgcccgggcatgctcggctcgctgtcgggcaagctggcgaccatgggcagcggcgtgccctacgccatcgccgccaagctcgcctatccgcagcggccggtggtggcgatggtcggcgacggcgccatgcagatgaacggcaacgccgaactggtcaccgtgcagcagtactggcagcgctgggactcgccgaccttcatcgtgctggtgctgaacaacggcgatctcaaccaggtgacctgggagcagcgtgccctggccggcgacccggagttcagtccggcgcaggaagtgatcgatttcccctacgcgcgttatgcggacatgctcggcttcaagggcatccgcgtggatcgcccggaggacatcgacgccgcctgggccgaggccttcgccgccgaccgcccggtgctgctggaggtggtcaccgacccgaacgtgccgccgctgccgccgcacatcagtttcgagcaggccaagcacctgcttggcgccatgctgcaggacgatcccaaacgctggggggtgattcgccagagcgcccggcagatcctcgcgcggcactga

SEQ ID NO: 318835 - DNA, 477 bp, Pseudomonas aeruginosa
atgcccagtcgcctgtcactgatcgccgccctgctgttgcccctggccgtccaggccgaacccgctgatacccgcgccctgctcgccgacagcctggccgacagccaggcccaggtggaggcagccgagcaagccatgcgccgttccgaaaacaaggcggtgcagctctatgccaagcgcgtactcaccgaacagcaggagttcgaccaccagttacgcgccctggccggggaaaaggccttggcgctgccctcgccgcgccagaccgaacggcaggccgccgctcccggcggcttcgacgagcgcggtttcctcgacgcgcagattcgccagcaggaccgtctggttgcacgcttcgagggaatcgcccgggactccgccgatcctgacctgcgccgcttcgccgacgaatggctggcgcgcttctaccaccaccgcgaactggccgaccagttgcgtagcggccgcgccgactga

SEQ ID NO: 318836 - DNA, 939 bp, Pseudomonas aeruginosa
atgaacgactccatccacggcggcctgcgggtgtgccagagcaccccgctggtccagttgcaggatcgcggccgcttcggttgccgccatctcggcgtgacccagggcggcgccctcgactggctgtccatgggctgggccaactggctgctgggcaatcccctggacgccgcggtgatcgagatcaccctcggcggtttcgtcgccgaatgccgtgacggctggttggccctggccggcggcgatctcggcgcgaccctcgatggccagccgctaccggcctggggcgcgttcgccgtgcgcggcggccagcgcctggccttcgcccacccgcgccagggcgcccgcgcctacctggcggcgcccggcggcttcgccggcgagcgccagttgggcagcctggccacggtggcccgcgaaggcctgggcggcccccgcgccgacggcaaggccctggccgcaggcgacagcctcggctggctggccgatggcgcgcgaccgcgcgcgctgcccctgcccagcgaacggatcatggactgcaccggcgaagcgcgcctggagctgatcctcggcgcgcagatcggcgacttcccggccatgagcctgttcgatgcgttcaacggcgactggcaggtggatacacgcgccgaccgcatgggcgtacgtctgctcggcccgcgcctggaatgccggcagcagtcgatgatttccgaaggcatcgccctcggcgcggtgcaggtgccgccggacggtcagccgatcgtcctgctcaacgaccggcagaccatcggcggctacccccgtctcggcgccctcgccccgctggcgctggcgcgcctggcgcaatgcctgccaggccagcgggtgcggctgctgccgacggtgcaggaggcggcgcaccgcgagcatcgacgcctgctggcggcctgggacgcatag

SEQ ID NO: 318837 - DNA, 714 bp, Pseudomonas aeruginosa
atgagccaaccgcaaccgcgcatcgaggtggccgccatcgacagcttcgtcctgcgcctgttcgagcgcatcgacgaagccaacatgccctggctgctggcggcggaggaaaacctgcgggcggcgttcggcgccgccctgctcgacctggtgccgtcctacaccaccctgctcctgcaatacgacctgctccagctcgaccctggcgaggcccgcgcgcggatcgccgcggcgctgtccgacttgcgcccgaaacgccaggacggcggccgtctgcacatcctgccgacctggtacgacccgcgggtcggccccgacctggcccccctggcgcggcgcaagcagctcggcgtcgccgagctgatccgccgccacagccagcgcgagtaccgggtcttcgccctcggtttcagccccggcttcgccttcatggggctggtcgaggaagccctggcggcaccccgtctggcgactccccggcaacgcatcgccgccggcagcgtcggcatcgccgagcgccagacggcggtctatccgcaggcctcgccaggcggctggaacctgctcgggcgctgcccggtgcgcctgttcgacctcaccctggacggctacagcctgctgcgcgccggcgaccgggtgcgtttcgaacccatcggacacgccgaattcgtccgtctcggcggcgacgacacgcccctggaggtccaggcatga

SEQ ID NO: 318838 - DNA, 744 bp, Pseudomonas aeruginosa
atgaacaacctgttgttgaactgcgatatcggcgagagcttcggtgcctggcgcatgggcctggacgccgaggtgatgccgctgatcgattgcgccaacatcgcctgcggcttccacgccggcgatcccggcaccatgcgccgcaccgtggccctggcggtggagcatggcgtgcgcatcggcgcgcaccccggctaccccgacctgatcggcttcggccggcgctcgctggcctgctcggcgcaggaagtggaagacctgctgctctaccagatcggcgccctcgacggactctgccgcgcccagggcacgcgggtacgctacgtcaagccgcatggcgcgctgtaccaggacatgatgcgcgacccggcgatcctcgccgccgtgctgcgcgcactggcggcctacgaccgcaccctgccgctgatgctgatgagcacccgcgacaacaccgcggcgcgcgcgctgggcgaggcccacggcatcgagctgtggttcgaggcgttcgccgaccgcgcctacgacggcgccggctacctggtctcgcgcagccagcccggcgcggtacaccacgacgccgagacggtgctcgcccaggccctcctgctggcccgtggcgcggcgctgcgagccagcgacggcagcgccctggcgctggaggcgcagaccctctgcgtacacggcgacaaccccgcctcgctggctgcggtgcggcgcatccgcgacgccctggaggcggcatga

SEQ ID NO: 318839 - DNA, 1230 bp, Pseudomonas aeruginosa
atgcatcccactccccgcctggctgccgcgctgctcgccggcagcgggctgggctggccgctgctcgcccaggccgacctggtcgaggacagccacgccagcctcgaactgcgcaacttctacttcaaccgcgacttccgccagagcggcgcgcgcgacaacgccgacgaatgggcgcagggcttcctcctgcgcctggagtccggcttcagcgaaggcaccgtcggcttcggcgtcgacgccatcggcctgctcggcttcaagctcgactccggcggcggcagcggcggaaccgggctgctgccggccgacggctccgccggcggctcccaggatgactacgccaagctcggcctgaccgccaaggcgcgggtctccaacagcctgctcaaggtcggcgcgctgcacttcaagagcccgctggtctcggccaacgacacccgcctgctgccggaactgttccgcggcgcgctgatcgacgtgcaggagatcgacggcctgaccctgcgcggcgcgcacctggaccgcaacaagctgaacagttccagcgactaccaggtgttcagcgccaaccgcatcggcgggcgcagcgatgccttcgacttcgccggcggcgactatcgcctgaccccggcgctgaccgccagcctgcaccagggtcggctcaaggacatctaccgacagaccttcgccggcctggtacacaccctcgacctcggcggacagcgttcgctcaagagcgacctgcgcttcgcccgggccagcgaggacggcggcttccgcgaactggacaaccgcgccttcggcgccctcttcagcctgcgcctgggcgcccacgcggtggccgccggctaccagcggatcagtggcgacgatccctatccctacatcgccggcagcgacccgtacctggtcaatttcatccagatcggcgacttcggcaacgtcgacgagcgttcctggcaactgcgctacgactacgatttcggcgcgctcggcctgcccggcctgagcttcatgagccgctacgtctccggcgacaacgtcgcccgcggcgcggccaacgacggcaaggaatgggaacgcaacaccgacctcggctacgtggtgcagagcgggccgctgaagaacctcggggtgaaatggcgcaacgccacggtgcgttcgaatttcgccaacgacctcgacgaaaatcgcctgatcctcagctacagcctggcgctgtggtga

SEQ ID NO: 318840 - DNA, 1272 bp, Pseudomonas aeruginosa
atgaccctcgacgccggcccggacgcttcccgggacggtcatttcggctggtatcgcgccctcgacaagcaggaacgccgggccttctggagctgcaagatcggctacggcctggacggcatggacacccagatgctgagcttcgtgatccctaccctgatcgccctgtgggggatcggcaccggcgaagccggcttcatccacaccatgaccctgctcgcctccgccgccggcggctggatcgccgggatcctctccgaccgcatcggccgggtgctgaccctgcaactgacggtgctctggttcgccttcttcaccttcctctgcggcctcgcgcagaactacgagcagttgctggtcgcacggaccctgatgggcttcggcttcggtggcgaatggaccgccggcgcggtactcatcggcgaagtgatcaaggcccgcgaccgcggcaaggcggtcggcctggtgcagtccggctgggccatcggctggggcctcaccgccatcctctactcgctgatgttcagcctgctgccgccggaagaggcctggcgcgcgctgttcatgctcggcctgttgccggcgctgttcgtcctggtggtacgccggctggtcaaggaaccggcgatctaccgcgaggccaggcaacgcaaccagggcgccgacaaggtcagcttctacgagatcttcgcccccgggatgctcagcatcaccctgcgcgcctcgctgctgaccaccggcgcgctcggcggctactacgccatcaccgcctggctgccgaccttcctcaagaccgaacgcgggctgaccgtgctcggcaccagcggctacttggcgatggtgatcctcggctcctacgtcggctacgtggtcagtgccttcctcaccgacctgatcgggcgcaagaagaacttcgtcctgttcgccgtcggctccttcaccgtggtcctgctctacacccagttgccggtgagcaacggcgccatgctctggctcggcttcccgctcggcttcttcgcctcgggcatcttcagcggcatgggctcgttcctcaccgaactgttcccaacccgcatccgcggctccggccagggcttctgctacaacgccgggcgcgccatcgccgcgctgttcccgatgctgatcggcatgctcggccagaagctctcgctgggcctggggatcggcgccttcgccgcggtctcctacggcgtggtgatcctcgccgccctcagcctgccggaaacccgcggcaagcaactggaactctga

SEQ ID NO: 318841 - DNA, 1047 bp, Pseudomonas aeruginosa
atgcgtcgatcatgtgccgccggaaggtgggcgctggcatggaagctgctcgctcccgccaccttgtgtcccttgcccgtcggtacccgccacatgaacctgaaattcctcgagaccttcgtctgggtcgcgcgcctgaagagcttccgcctcaccgcggagaagctgttcagcacccaggcttccatttccagccggatcgccgtgctggaggacgaactcggcgtgaaactgttcgtccgcgactcgcgcggcgtgaccctgaccccggaaggcgacaaggtactggcctacgccgagcggatgatggacaccatgcacgcgctgaagcagtcgctcgacaccggcgccagcacccagggacggattcgtatcggcgccatggacacggtcatccacacctggctgagcccgttggtggccagggtcacggaaaccttcccggcggtggagatcgagctgatggcggacaccgcgcgcaacctctccgagcagttgcagaagggctacctggacctgatcttccagaccgactcgctgcgccacgagtcggtgctgaacctcgaactgggcagctatccgctgcgctggatcgtttccaccggctcgatctaccaccgcgactacgcctcgctggcggacctggcgcgggagcgggtggtgaccttctccaagcactcgcggccgcaccaggacgtgctcggcctgctgcacgccaacggcgtcgcggcgccgcgcctgaactgcgtgaactcggtggcggcgatgacccgcctgctgcgcgacggcttcggcgtcggcgccttgccgccggcgctggtcagccaggaactggaacgcggcgaactgaccctgctgcgcctcggcccgccgccgccgaacctgccggtggtggtgtcctggcgcggcggcaccggcctggaactggtggacgaagtggtggagctgagcaaggcggtgctggccgactacgcggccaacgtcggcccggagtgcatgctcctggcgccgctgaagaaaggagtggggcggctgcgttcgcgctga

SEQ ID NO: 318842 - DNA, 798 bp, Pseudomonas aeruginosa
atgcccgaaccgaccttccacgaactcgcgcaactgccgccgccggtcctgcgccaactgatccgccgcggcgactacaccggccataccagcggcctcggccagcgccacctgcaggccaacctggtgatcctgcagaaatcctgggccgacgagttccttcgcttctgtgccctgaacccccgggcctgcccgctgctcgacgtcagcgaacccggctcgccgcacttcgccaggctcggcgcggatatcgacgtgcgcagcgacctgccgcgctacagggtgcatcgacgcggccaggagcccgtcgaggtgagcgacatcggcaccttctgggaggcggatttcgtcgccttcgccatcggctgctcgttctccttcgagcaggcgttgctcgacgccggcatcggcctgcgccacctcgagctggggcgcaacgtggcgatgtaccgcagctccatcgctacccggccgagcggtcgcctggccgggcccacggtggtatcgatgcggccgttgaaggccgccgaggcgatccgggcgatccaggtcaccagccgcttccctatgacccatggcgcaccgctgcacctgggcgatccggcgctgatcggcatccgcgacctggcgcggcccgactacggcgacccggtgccgctcgcggcggacgagatcccgctgttctgggcctgcggggtcacgccccaggcggtgctcgccgaggttcagccggagctgtacatcagtcacgcgccggggcacatgctggtcagcgaccgactctacgacgagctctga

SEQ ID NO: 318843 - DNA, 981 bp, Pseudomonas aeruginosa
atggcgttcaaacggatagcactggcctactgcgtgcaactggatcgggtgatctccatcgccagtgcccgccgcgaatacttctcccaggccgagccgcgcaaacgcttcgacttcctctgctccagcgaagcgtgccgggcacaggggatcaaggtatcggcgagcaactacgacaagctgccgcaggacacccgcaaggccgcgcacttcagcaagttcccgcattccacccacctgccggactgcgagtggttcgtcgaggacgacgaggacgctctgcgcccgggcgagtccgccgaggaggccggccagcggcgcatccgcgacaagctggatgcctacgtcgaggagttcgacccggccattgccgaggaggccgcgccgccgcaagcggacccggacgccgagggacagccgccggcctccgccgcagtgcgcaccgacgctcccgccgcgcctcggcagagaacgcaacggccacggcgcacccgcgatttcgaactgctcgtcgacaccttccgccaggcccgcgccgagctgccggcggaagagttcaagcaactggacatccgcatcagcggcctcggccggataccgctgcgcgcctatttccagcacatcggctatgccaccccgggcagcgccggcaaggtattctacggcggcgccgacctggtccggcgctacggtgcgccgagccggccgcaaggcttccgcttcaagttccgcgaccgcatcgacggcaagccggtattcctctacgtcgccccggaaaccttgcagggctatccgcatcggcgctacctcgaagacatcctcggctgcgccgaaacggtgcgctacttcaccctctacgccctcggccggctcatcgaagcgccgagcggcaagagctacagcctggagccggatgccctgcgccacctgacgatcatccccggtccggcgaaggacgacgcccctcagagctcgtcgtag

SEQ ID NO: 318844 - DNA, 1077 bp, Pseudomonas aeruginosa
atgagccagcagcccgatccttgcaacgcctaccacaccgatgaacagcgctgggccgccgtgctggcgcgcgacgcggcggcggacggggcgttcgtctatgcggtgaagaccactggggtctattgccgtccgagttcctcggcgcgtcggcccaggcgcgagaacgtcgagttcttcgccactgccgaggcggccgaggccgccggctatcggcccagccggcgcgccgccggcgaccgcagcctggcggcggaacagcgcgccgagcgggtggcgcaggcctgccggatgatcgagacggcggagacgccgccggcactggaggcgctggccgcccgactgggcatgagtccgttccacttccatcgtctgttcaaggccgaaaccggcctgacgcccaaggcctacgcctcggcctatcgtgcccggcgcctgcgcgagcgcctgggccaggcatccgcctcggtgaccgaggcgatctacgagtccggtttcaactccaacagccgtttctacgagtcctcgtcgcaacgcctcggcatgcgcccgcgcgattaccgcgatggcggcgccggcgcggcgatccgcttcgccatcggccagtgctcgctgggcgcgatcctggtggcgcagagccagcgcggcatctgcgcgatcctcctcggcgaggagccggagccgttgctgcgcgagttgcaggaccagttcccgcgcgcccagctgctcggcggcgacgccgacttcgaacggctggtggcgcaggtggtgggcttcgtcgagtcgcctcaactgggactggacctgccgctggacgtacgcggtacggcgttccaggaacgggtctggcaggcactgcgggaaataccgccgggcagcacggcgagctatgcgcagatcgccgaacggatcggcgcgccgcgagcggtgcgcgcggtggcgcaggcctgcgcggcgaaccggatcgcagtggcgattccctgccaccgggtggtacgtcgcgacggcgacatttccggctaccgctggggcgtggagcgcaagcgcgaactgctgcgcagggaagagcgggattga

SEQ ID NO: 318845 - DNA, 243 bp, Pseudomonas aeruginosa
atgaaccgagccaagctctacctctgctgcgtcgcactactgctggtgccggccatcgccggtgcggcgactgccgactacgtctacggcatgccgctggacgtggccagggtgctgagcgtcgacgaggcgcccagcgatacctgccaggtggtgcgcgccaccctggtgtacctggactcccacggcgagcgccaggtgttgcactacctgaagcaggcgcgtgcgtgcagcgacgaatga

SEQ ID NO: 318846 - DNA, 1113 bp, Pseudomonas aeruginosa
atgacccgcatcaccgaagtcgtggtcgagcgtcgccagctcgccaccgccgccctgcgtacgcgcaacctgcccgccccggaggcgctggcggaaggccaggcgctgctggcggtcggcgagttcgccctgaccgccaacaacgtcacctatgccgccctcggcgatgccctgcgctactgggagttcttcccggccggcgaggggctgggcatcgtcccggtctggggcttcgccgaggtgcttgcctcgcgctgcccgggggtcgaaccgggcgagcgcttctatggctactatccgatggccagccacctgctggtcgcgccggcgcaggtccgcggcagcggcttcgtcgacgccagcgagcaccgccggaacctcccgtcggtctacaaccagtacctgcgctgcagcagcgacccgctctaccgggcctccgacgaggccctgcagatgctcctgcggccgctgttcaccacctcgttcctgctcgacgacttcctcgccgagcatgccttcttcggcgccaccgacctgctgctgagcagtgcctcgagcaagaccgccatcggcctggccttcctcctccagcgcaatcgtgcgcaacgcggccaggactaccgcatcgtcggcctgacctccgcgggcaaccgcgccttcgtcgaaggcctgggctgctatgacgaggtcctggcctacgaccgcctggacgcactggacaccagcggagacgcgttgagcgtggatttcgccggcaacggcgccctgctcggccagttgcaccagcgcctgggcgaccgcctgcgctacagttgcctggtcggcgccgcccactgggaccagcgcggcggcctgccgaaggcgctgccgggtccgacgccgaagctgttcttcgccccggcgcaggcggaaaaacgcctcaaggattggggcggcgcggcgttccaggcgcgcctggcggaagtctggggcgagttctcggccttcgtcggcggctggatccaggtccgccgcggtgtcggcggcagcgaggtgctggaggtctaccaggacctgctggccgggcgctcggcaccgcaactgggctacatcctttacctcgacggcggctga

SEQ ID NO: 318847 - DNA, 429 bp, Pseudomonas aeruginosa
atgaccagcctgccgctcgaagccaacgccgccgccaccctcgccgaatggcacgggctgatcgcccgccgcgacctctccgggttgccgcgcctgctgcaccccgacgccgtgttccgctcgccgatggcgcacaagccgtatgccggcgcaccggtggtctcgatgatcctgaataccgtgctcacggtcttcgaggatttcgcctatcaccgccagttggccagcgccgacggccgcagcgtggtgctggagttcagcgcgcgggtcggcgaacgcgaactgaaaggcatcgacatgatccgcttcgacgacgacggccggatcgtcgacttcgaagtgatggtccgtcccatgagcggcctccaggccctcggcgaggaaatgggccggcgcctggcgccctatctggccgcgagcaaggcctga

SEQ ID NO: 318848 - DNA, 906 bp, Pseudomonas aeruginosa
atgaagctgaacttgcagcagctcgacctcaacctgcttctggtcttcgatgccctgatgcgcgaacgcaacctgtcgcgcgcggcgatccgcctgcatcgcagccagccggcggtgagcaacgccctcgcccgcctgcgcgaacagctcgaccagccgctgttccggcgcaccgccaagggcctggaacccaccgccgccgccctcgccctgtacgtgccggtgcgccaggccctgcatctgctgcaggccggccttggctcccaggaaaccttcgatccgcacactgcgcggacctttcgcctgacgatgaacgactatgcccagttgcgcctgctgccgggcctggtgacccgcctgaagaccctggccccgcgggtgacgctggaggtacgtcccgacgaaggcgcctcgatcccggcgcaactggccagcggcgaactcgacctggcgatcgactacctgtacttcgacgagcccgagctggcctaccggccggtcggcgaggaacgcctggtggtgatcgcccggcagggccatccggccttccgcggcggcctcgaccgcgcggcctacgaggccgcgcagcacgtctcgatcctgccgcgggtcgggcgcggcagtccgctggagatcgtcctcggctcggccagggtacagcgccaggtgcaattgctggtgcctcactacctgaccatcccggccatcgtcgccagcaccgagctgctcggcaccgtgccacgccgcctggccgagcgcttcgccagcagccatggtttgcaactggcggacgtccccttcgagatggccccggtgcaggtcaacctgatctggcatcgccagcaggaagcggcgcccggcctgcaatggctgcgcgagcagatcgtgcagatcgaacagggctga

SEQ ID NO: 318849 - DNA, 1128 bp, Pseudomonas aeruginosa
atgtccttcgatccccaaccctttcgccagcagtaccgcgcggccatccggcccggctacaacccctggctgcacgccggcttcgtcctcgcctacggcggcgcctggatcgtcttcttcctctcccggctcgagcagccgagcctgctggaatggctgacggtgccggccgcgctggtgttcttcaactggggcgagtaccgcatccacaagtccctcggccaccacaagcacccgctggggcggatgttctacaagcgccataccggcgaccaccacagcttcttcgtcgccggccagatgcgctacgaacaggcacgcgactggcgggtgatcctgttcccggcctggctggtggtggtcttcagcctcggcgcgctgctcgcctggagcctgctcggcctgctgaacgacaacctcgccgcgctgttcgccgcgaccctactgctgggctacctcagctacgagatcttccacgcctgcgaacacctgccgccggagcatccgctcagccgtctgccgtggatccgccacatgcgccgcctgcacgaactgcatcaccgtcgcgagctgatgcagacgcacaacttcaacctggtcttcccattgatggactggtgctacggcaccctccactgggaagcggaacccgccgaggagcgcgccatgacccgcatgcagcaccgaatcgagatcgcccgcgggcccgaggcgaccctcgcctacgccgccagcccggcactctggccggaatggcatccctcgtcgttgcgggtcgacggcgccgctggcccgctgccggccggcgcgcgcttcgaggaggacattcacgccggcggccgcgccgggcacttgtcctggacggtggtcgagtaccagccgggacacctgtggcgcgccaacgcccgtggcgaccgggggctgcacctgcgcctgagctacgaatgccagccgagcgcggccggcacccgcttcgtgcgcaccctggaataccgcttcgacggctggtcgatgcgcctggccaacctgttcctgctgcgccgtcgcatcgaacgcgagtcggaggagtccatgcaccgcctgcgtcgggtcgccgaggcgcggatagcggcggcggaaagcgtatga

SEQ ID NO: 318850 - DNA, 933 bp, Pseudomonas aeruginosa
atgaacaagtttgccgaaatgaccaccttcgtcagcgtggtcgacgcccatagcttctccgaggccgcccgccgcctgggcaccaccaagtcgcaagtcagccagcgtatccagcaactggagaggcgcctgggccgggtgctgctgaaccgcacccggccgctgagtctcaccgaccccggtcgcacctactacgaacatgcctgccgcctgctacaggagctggagcaggcggaagcctcggtgctcgacgccgacgacgacctgcgcggccagttgcgcctctccgcgccgctggccttcactccgcgctacctggcgccgctgctggcgcgcttcgccgagcgccatccgcaattgcgggtggacgtgcaggccgacgatcgtttcgtcaacctccaggaaccgcgcttcgacatggccctgcgcatgggccggctggacgactcctgcctggtggcgcggccgatcaccgccaaccgccacctgctctgcgccagtcccgactacctggcgcggcatggcgtgccgcagcatcccgaggaattacaggcgcacgacgggctggtctactacaaccgcgagcccggcggcatgctctgtctgccggtggacggcgaaccggcctcgttccgcatccgggtgaggatgcgcaccgactccgggcaccagttgctcgaaggtgcgcgcgccgggctcggcctggcgatcctgccgagcttcctggccgccgatgccttgctggccggcgagctgctgccggtcctgcctggctactcgccggacggcgggcaggtttccgtggtctaccgcaagacccaacggacgccccggaagatcctcgtcctcggccagttcctcgaagaggaaatcggcgatccggcaccctgggaccgcgcgctcatcgagcgtggcctgttgccgccgggctga

SEQ ID NO: 318851 - DNA, 1638 bp, Pseudomonas aeruginosa
atgcaccaacccgaaaacccggcgcgccgcaccttgctggcgcagaccgtcgccggctccgccgcgctcgccctgggctcgctgctcggcggcgcgcccggcgtggccagcgccacggcggaaacgccccgcaaggccttcgatggcggcaggatcgatgtgctgatcgtcggcggcggctccgccggcgcggtcctcgcccggcgcctgagcgagcgcggcgaccgccgggtactgttgctggaagccggccaggcctatccggcctgggactaccccaggatcatcgccagcagcgacagcgtcggcggcgacccctccagcgactggggctaccagtcccaaccgggggcgatcgggcacccgatccatgcgatccgcggcaaggtcctcggcggcagctcggcgatcaacggcgcggtggcgatccgcgcgcggcgcgaagacttcgcccgctggaacctgccgggctggtcctacgacgacctgctgccggcgttccgccgcctggagacccgccagggcggcgacccggccctgcacggcggggacggaccgctgccggtgcggcaactgagccgcgccgatctctcgccgatgcagagggccttcgtcgacgccaccctggccaacggtttcaaggccatcgccgatttcgacggcgccgacgccaacggcgtcgggccgtacccgatgaatgtcgtcaacggtgtgcgcgtcaacaccggcatggcctacctcgacaacgccgtgcgcgctcgcgccaacctgtcgatccgcggcgacgcgctggtcgaccgggtgctcttcgaaggcaagcgcgcggtgggcgtgcgcctggcctccggcgaggaaatccacgccggcgaagtgatcctcagcgccggcgcctacggcagcccggcgatcctgctgcgctccggtgtcggcccggccgacgagctgaaggcgctgtcgatcccgttgcttgccgacttgccggtgggccgccggctcaaggaccatccgttctactacaacgcctatgccgcccggccggagcgcatcggcgcgcagtcgccggtgatcggcgccaagctctggacccatagctcgcgggcgcagaacggcgagctggacctgcacatcaccgccacccacctgttccccgctgagatgagcccgaccggggtcggcttcgtcctcgccgtggccctgacccggccgcaatcgctgggcagtgtgcgcctggccagccgcgacccggccgtcgcgccgctgatcgacctgaacttcctcgccgaggccgaagaccgcgcgcggttgctggaaggggtcaagctggcgcgccggataggccgcagcgaaccgctcgccgggctgatccacgccgaactcgggccggggcccgaggcacgcagcgatgcgcagatcgaagcggcgatccgcgccaccctcgatacctaccaccacccgacctccagcgcgccgatgggccgcgccggcgagcgctgggcggtggtcgacctggagggcagggtgcatggcctgcaaggattgcgggtgatcgacgcctcgatcttccccgatgccatttcggtggccaccaacatcaccaccatcgccgttgccgagcacctcgcgcagcgcatcgcctga

SEQ ID NO: 318852 - DNA, 1449 bp, Pseudomonas aeruginosa
atgaacggacacgccagacactggatcgacggcgcatggctcgattccgcgcagcggggacaatccttcgacccggccagcggccagccgatcggcacctacgccgacggcgggcgggccgaggccgatgcggcgatcgccgccgctgtgcgcgccttcgaagatggtccctggaaggacgaccacgcgctgcgcgcgaaagccctggaggaaatcgccgcggccttcgagcggcatgccgatgcgctcatcgacctgcttgccctggagaacggcaagatcaagcccgaggctgccttcgaggtcggcatggtgccgggcaagctgcgctactacgccggcctggcgcgcagcgaacggggcgccagcggcacgccgcgccccgacgtggtgtcgctggtgctgcgcgagccgatgggcgtcgccggcatcatcgtgccgtggaattcaccggtggtgctgatgatccgctccctggcgccggcgctggccgccggtaccaccacggtggtgaagatgccggggcagaccgcgcagaccaacgccatggtcgcgcggatcatcgccgaagcgccgtcgctgcctgccggggcggtgaacatcttcagcgaatcgggttccgaaggcgcccggcgattgatcgacgcggccgaggtgccggtgatcagcttcaccggctcgagcgccaccggccgagcgatttccgccgccggcgcgcggcacctgaagcgcttcggcctggaactgggcggcaagacaccgcacctggtgttcgacgacgccgacctggacgccgccttgcccgttctggagaagtcgctgacggtgttcgccgggcagttctgcatgaccggttcgcgcctgctggtgcagcgcggcgttgccgaacggctacgcgaacgcctggcgcagcgcctggaaaacctgcgcgtggggccggcggcggacccgcgcagcgacatggggccgctgatcgacaaggccaacgtcgagcgcgtcgagcgagccgtacgccaggccatcgccgccggcgcgcgggtggtggtccgcggcggcccggtaatcgagggcgagctggcggccggcgccttctaccgtccgaccctgctggaggtcgatgatccggacctggacatcgtgcaacaggaaaccttcggaccggtgctgaccctgcaggtattcgagcacgaggaggagggcgtcgccctggccaaccgcagcgagtacgggctggcggccggggtctggacccgcgatgtcgcgcgtgccttccgggtggcgcggaagatccgcgccggcaccgtgtggatcaacgactgggccaaggtctacgacgaattcgaggagggcggctaccgccagtccggcctcggccggctgaacggggtcgccgccctggacgacttcgtcgaatacaagcacatcagcctgaccaccggcgcggcctga

SEQ ID NO: 318853 - DNA, 636 bp, Pseudomonas aeruginosa
atggcacagacaaagacactgacggagcgagccgaggcgctgttcggcgaactgcacgggttgccgcttgccgagcggattgaagccatcaaccggatccgccggctgctccacgcgcacagtccgttcgccgaagagccggtcgattgcgtgcagtgggtgcgtgccgagcgcgtcgccggcaacgactacaaccccaataccgtcgcgccaccggagatgcgactgctgaggctgtccatcgagtccgacggattcacccagcccatcgtcgcctatccgcaggccgacgggcgctacgaggtggtcgacggctttcaccgcctgcgcgtgggcagcgccaagggcgcgctgcgccagcgtctgcacggctacctgccgatcgccgcgatacgcgccgggcgtgaaggcgacagcgagcgcatcgccgccaccatccgccacaaccgagcacgcggcgtgcacggcgtattgccgatgacggcgatcgtggtgaccctgctcaaggccggctggagcgaggccgacgtggcccgcgaactgggcatggacaatgacgaggtgctgcgtttcaagcaggtttccggattgcccgagctgttccgcgaacacgtgtattcccgctcctgggagtag

SEQ ID NO: 318854 - DNA, 1227 bp, Pseudomonas aeruginosa
atggcaggcaagcattaccaggatgccgatgtgcatgccgcaaccctatcccgcctccgactggtattccggaacttcgagcgcgtctgtgtcgccttctccggtggcaaggacagctcggtcaccctgcaattggcgctggacgtggcacgcgagttgggacgcagcccggtggacgtactgttcatcgacctggaggggcagtaccaggccaccatcgatcacgtcagcgagatgctcgggcgtcccgacgtacgcccctggtgggtctgtctgccactcaacctgcgcaacgcctccagcctggaggaaccctactggtgctgctgggagcccggcgccgaggccgactgggtgcgcccgctaccgaagcagcgaggggtgatcagcgacccggcgttcttccccttctaccgctaccgcatggagttcgaggagttcgtcgccggcttcaacgcctggctggccagggaagagcctaccgcgttcctggtcggcatccgttcggacgaatcgctcaatcgctacctggcggtcaagcgcaggagccgggcgaaacaatgcgcctggacgccgccgggcggctgcgcgccgctggcctggagcgcgcgcgaccgggccaacccgcaggcggtgagcttcttcccgatctacgactggcgtttcgaggatctctggcgttgcgtcgccgaccacggctacgcctataaccgcctctacgaccagatgtaccgcgccggcgtgccgttctcgcagatgcgcatctgccagccctatggcgacgaccagcgcaagggcctcgacctgttccaccggatcgagccacgcacctggttcaaggtagtccggcgcgtcgccggcgccaactatggggcgcgctattgtcgccagcgcttcctcggctaccgtggcggccttggcctgccgccctccttcggcacctggcgcgagtacagccagttcctcctgcgcagcatgccgccgcctctgcgcggcatctaccagcggcgcatcgagcgtttcatcctctggtggaagcagcacgactatccccttgccatctggccggacgcggggatcccggccctggagaatcgtcgcaagcagccgtcctggcggcgtatcgcgctatccctgctgaagcaggacatggcccgctcgctgtccttcggcttctcccaggccgatatcgacagactggtccccggtcgggagaagcgctcgtga

SEQ ID NO: 318855 - DNA, 483 bp, Pseudomonas aeruginosa
atggcggcaaacactatcacattcagcggcgaagtgaccgaccagacctgccaggtcgcggtcaacggcttcaccgaccccacggtgatcctcgacagcgtaccggtgagcgccctcgatggcgcagtgggccgcagcgccggcgaaaccgccttcaccctgcaactcaccgattgcgtcgcgccgacggccgacgagcatttcaccaccctgttccaggccaccaaccccagcgccgccgggaacctggtgaacaccgccgccagcggcgcgacgggcgtggcgctgcaattgctcgatagcgtcggcggcaacccggtcgacctggccggcggcgcggcggtgcccgccggcgatatcgtgctcgccaacggagccaccagcaccagctacgactacgcggtgcagtacgtctccgaagcggcgaccgtgacgcccggtccggtactcggcgccgtgacctacacgctgcgttacgagtga

SEQ ID NO: 318856 - DNA, 747 bp, Pseudomonas aeruginosa
atgcccagacattcgtaccgatccggcaggacatcggcgcttctgctcgtcctgctggcgagcatcgcccaggcgcgggcaagcgtggtggtgaccgggacccgggtgatctatcccggcgaggcacgggagaagaccgtgcaactgagcaatcgcgatgcgtttcccaacgtcgtccaggcctgggtcgacatcgacgccccggacgcgccgccggaccaggcggacgcgccgttcctggtcaacccggcggtattccgcatggccccggacagcggccagacgctgcgcatcgtctacaccgggcagggcctgccgggcgatcgcgaatcgctgttccatctcaacgtcctgcagatcccgccacgcaacagcagccatgcggatcggaaccagatgctgctgatgctgcgcaatcgcctgaagctgttctaccgcccggcgggcatccagggccgtcccgaggacctgcccgggcaactgcgtttcgcactggtccggcgcagcgccggctgggcggtgcgggtggacaacccgagcggctactacgcctcgttcgccagcgccacgctcagcgtcggccagcgccgctggcgcttgcgcagcggcatgctggagccgcgcagccatgccgaatggcaggccgaaacccgagaagccctgccgccgggacgcgtgcgcctgcacgcgctgctgatcaacgactacggcgcccatatggatatccgtcatgacctatcgccatga

SEQ ID NO: 318857 - DNA, 2619 bp, Pseudomonas aeruginosa
atgacctatcgccatgaacgccgctgccgcaccggcacggccctgatggcgggcggcatggcgctggcggcgagcgccttcggtcatgcccagcccggctacgaattcgatgatcgcctgttgctcggctcttccctgggcggcggcgacctgtcgcgcttcaaccaggacggtcggatcgatccgggtcgctatcacgtcgatgtctacctcaacgagcgcttcgccagccgcagcgaagtgagtttccgcgccaaccccgccagcggcgcggtggagccctgcctcgacgaagacttcctgcgccagcgcctcggcgccaagcctggtgacgatccgcgcaagagcggcgacgggcgccactgcgcctttctcggtgcacgcctgcccggctcgcggttcagcctggacgtcgcccgcctgcgcctggatctctcggtgccgcaagccttgctcgacctcaagccgcgcggctacgtcagccccgaggagtgggacgccggcgacagcatgggcttcgtcaactacgacaccaacctctatcgctccgaataccgcggcggcgaatcgggacgatcggactacgcctatgtcggcctgaacagcggcatcaacctcggcctgtggcgtttgcgccaccagtccaactacacctattcccgctacaacgggcaggccaggcgcaagtggaacagcatccgcacctatgcccagcgcgccttgccggcctggcgcagcgaactgacggcgggggagagctacaccgccggcaacctgctcggcagcatcggctaccgcggcctgagcctggctaccgacgaccgcatgctgcccgagtccctgcgccgctatgcgccgcaggtgcgcggcaccgcggccaccgcggcgcgggtggtgatcagccagaacggcaggaagatccgcgaggtgaatgtcgcccccggtccgttcgtcatcgacgatctctacgacagcgcctatgccggcgatctggatgtccaggtgttcgaagccgatggcagcgtatcgagcttcagcgtgccgttcgcctcggtcccggagtccatgcgtcccggcctgtcgcgctacagcttcaccctgggccaggcgcgccagtatggcgacggcgacgacctgttcgccgacttcacctaccagcgcggcatgagcaacgccctgaccgccaacctgggactgcgtgtcgccgacgactacctggccatgctgggcggcggcgtcctcgccacccgcttcggcgccttcggcctgaacagcacctattccagcgcacgcgtcgaggatggcgcgcgcaagcagggctggcgcatcgggctcgactacagccggaccttccagcccaccggcactaccctgaccctggccggctaccgctattccaccgaaggctaccgcgaactcggcgacgtgctcggctcgcgcgacgcactgcgccacggggacacctgggattccggcagctacaagcagcgcaaccagttcaacctgctggtgagccaggccctcggcggttacggcaacctctatctttccggctcctccagcgatttctacgacggcaagagccgcgacacccaattgcagttcggctactccaatacctgggggcagttgagctacaacctcgcctggtcgcggcagaccaccacctactaccaggagcagggcgaccaggaccctggcgtcgagctgctccggcgcgaccggcgcagcggccagcgcaacgacaccctgaccctcagcgtctccatgccgctgggttcttccagtcgggcgccgacgctcagcgccatggctacccggcgctccggcgacagccgtggcggcagcctgcaaaccgggctgaacggtacgctgggcgacgagcgtacctggagctacgcgctgtccgccaaccgcgacagcgaggtcgccgacaccacatggaacggcacgttgcagaagcaggcggcgctggccaccgtgaatgccggctatgcccagggcgatcgctaccggcaatacagtggcggcatccgtggcgcgctggtcgctcaccgcgacgggctgacccttggccacagcgtcggcgataccttcgccctggtcgaggccaagggcgccagcggtgccgcgatacgcggcgggcagggcgcgcgcatcgacggcaacggctatgcgctggccccctcgctgtcgccctatcgctacaacccgatctcactcgatcccgttggcatcgatcccgacgccgaactgctggaaaccgagcgcaaggtcgcgccctacgccggtgccagcgtgcgcgtgacgttcaggacgctgaccggccatccgctgctgatccaggcgcggcgcgaggacggcagtgtgctgccgctcggcgccgtggtggtcgacgacggcggggcggccatcggcatggtcgggcagggcggccaggtctatgcgcgcgcggaaaaccagcggggcaggttgctggtgcaatggggaacggcgcgcaaggagcgttgcgagttgccctacgacctggccggtgtgtctcgcgaccaggcgctgatccgcctgcgcggcacctgccgggcagccaccaccgactccaacctggagaacgccagatga

SEQ ID NO: 318858 - DNA, 1362 bp, Pseudomonas aeruginosa
atgaaccgcacgcttcccctgctgcccgcgctggccctcggcgtgttgctggggcttcccgccagtggccaggcgacttgctaccgggtcacctcggtaggcagcgagacgaccacctcgaacacccagatccgcccaggcgaaggtaccgccggcagttggaccggcgcctgcgacacctgcaatggctcgctcggcctgcccagcgtggtcaacgtcagcgacgagagtttccagccctatccgacgctcatcgccagcgcggtggcgccgctgacccagtacggcgccaccggcggctacgaccccgaacgggtgttcttccgctgtagcgccggggacgccgtctacgagatgttttctaccaacggcgacgatctctatagcggctactacaccggcgccgatacggtgggcaacgacatcggcctgcaggatgcctaccggaccgcctggcccaacgtgctgctgcgcctgaccaacgtcgagacgggggaaaccatcacgccgatctggaaggagcgccagctctccgggctggacatagactcgcgcggcttccagctggtcaaggcgaagaacctcgcagcggtacgcgccgagctgtacagcgcgccgctggaggcgatccgctactactcgccgacgatcctctcgcagccctattcctacacccagccggcggcctacatcgccatcaaggggccgggcctgaccgcgccgaccgtcggccaggcgcacgtgggcggcaactggggcggctggtacagcaactggccgggtgccatcgggctgtaccgctacgtgaccctgaaacgctatcccacttgcgcggtgatgacggtcaccccgcacgtgcagttcccgtccatcaccctggccgagatcgatggcggcggcgtgcgcgaggcgcccttcgaactcaccttcaagtgccagagcggcatgaccaacggcaccggggccggcgccacggcgctgggcatccgcgtgtccagcggggccctggcggccagcccggcgctgggcctggtcaacgccagtggcggactgtcctacctgctctccgaccgttacggggagccgggcattgcccgtggggtcggcatccgcatctaccgcgacggcacgccgatgacgctcctggccaacgagaactccgccggcggcagcaacgccgaggccaccggctggtaccccgccatcggtggcgcgacccaggccaacggcggtagcggcggcatcgacctgtaccgcgaaaccttccgcgcgcgcctggagaaactcgcgctcggcagccagcccggcgtcacggcggggcgagtcgaggccacggcgcaggtggttatccgtgtccagtag

SEQ ID NO: 318859 - DNA, 648 bp, Pseudomonas aeruginosa
gtgaccgcggagcgcacccgcctggtgttcgtggagggccagcgcgaggcctcgttgctgcttgtcaaccagaatccctacccggtgctggtgcaggcgtgggtcgatgacggtgccctcgacggcgaaccggataccgcgctggctccgttcctgccgctgccgcccgtattccgcctggagccgggacgccagcgcagcctgcgcctgctggctaccggccaggcccaggcacgggatcgcgaatcgctgtactggctgaacatctacgagatccccccgcaagccaccgccgaggccgctggccggccccggctcacggtcaccctgcgaacccagatgaaggtgctgtaccgcccgcacggcctgcatccgcacgccgaggacgcggccgccgaactgggcttcgcgctgcgcgacgagaccctgcgggtggacaacccgacgccgtacttcgtgtccctggcggggctggcgctggagataggggagacgcgcctggatctgcccggaacgctgctggctccgcgctcgcaacgacgcctcggcctgccgcggcgggtggacggcgggacgcgcggcgaggtggcgttcgactggatcgacgacaacggcgtcagccgccaggaaaggaaagctctacagtga

SEQ ID NO: 318860 - DNA, 858 bp, Pseudomonas aeruginosa
gtgaacagttccccacaggctcgccagcacgagcacccgccggccgttgccgcctccctggccggcgacctgcgcctcgcccggcgtttccaggccgccctggcgcgcggtcgggtgcgcctggactggcaggccgtacggcatgccgggcatccggaatgggagccgctctaccgggaaaccctgctcagggtcacggccgccagcggcgagccgccgttgccgacccaggaactgatcctggcgctggagcggctcggcctggtacgcctgctcgatcgctgcgtgctgggcacggtcctcgaccggctgaacgccgagcctaccttgcgcctggcctgcaacctgtcgcgccagagcgcggcgatggatgcctggtgggaagcggtctgccgatggctggccgcccgtccgcaggtggcacggaggctgacgctggagctgaccgagaccgccgtgggcgagagagtcgcgacccgggagttcatccgacgcctgcgcgaacatggcgtgcgcatcgcgatagacgacttcggcgcggcgcacaacaacctggacttcgttctcgatgcccgtcccgatgtgatcaagatcgattgccggtatacccgcgaagcacgtcgctcggcgaagggcgccgaagtgctgcgccatctgctggccctgtgccgcgaactggcgccctgcgtggtcctggaaggtctcgaggaggacgatgcgttcgcccggctgccgaccggggacgtctatctccagggcaacgcgatcgcgccgccgatgcgggtcgaaccgccgctgtccgtacgccggccgaagagccgggcgcggatcgaggcgctggcgagccgccaggggtga

SEQ ID NO: 318861 - DNA, 525 bp, Pseudomonas aeruginosa
atgaacagagcaatcagccttcccctcaagggagccgcctggctcctgctggtcctggccctgcctttcgccaacgcccaggacatgaacaagaccgcgccacagaccttcgtcagcgaggcctcggcggccggcgtagcggaaatcgaagccggcaagatggcgctggaaaagagcaccgccgccgatgtgaaggtattcgccaagcagatgatcgacgaccacggcaaggtcaacgccgaactgcgcagcctggccgagcgcaagaaactggaggtcgaagacgacgccagcctgaccgacaaggccaaggcgaccctgctcgacctgcgcgacgcctccttcgacccggcctacgccaataaccaggtggcggctcacgaaaaagccgtggaactgttcacccaggccgcggacaacctgaccgacccggaactgcaggcattcgccaagacccatctgccggccctgaagcatcacctggagatggcccgcgcgctggccaaggcgcacccatccaagtaa

SEQ ID NO: 318862 - DNA, 1365 bp, Pseudomonas aeruginosa
atgagtttcagcctgtggttgctggtactgggctgcatcctgctgacgctcggcctggcttcggcctacctgcgcctgctgccggtcagcacctcgttcatctacctgctgttcggcctggccatcggcccggccgggctgcacgcctggcgcagcggcctggcggacatcagcggctggttcgaacacctcagcgaggcggcgttgctgatctcgctgttcatcggcggcctcaagctgcgcctgccgttgcgctcgccggcctggaccgctgcctggctgctggccggaccagtcctgctcggctgtatcctcggccttaccctgggcgcgcatttcctgttcggcctggactgggggctggccttgctggtcgcggcgatcctcgcgcccaccgatccggtgctggccagcgacatccaggtcaaccacgccggcgacgacgaccgcctgcgctacgccgtatccggcgaggcgggactcaacgacggcatcgcctttcccttcgtcatcgccgccctgctgctgatcggtcagggcggcggcctgcccggggagttcgaccgcagcggcctggactggctgctgcgcgacgtgctctgggcgattccgctcggcctgctggtgggctattgcctgggccatggtctcggccgcctggccatccacctgcgggcgcggcacaccgacacctcggtgtcggccaacgacttcctcgccctggcgctgatcgcgctgtcctatgtcggcgccgacgcgctgggcggctggggcttcctcgccagcttcgccgccgggatcggcctgcgccacgccgaggtggcgacgctggggcgcgcctcggcaccggccgaggcgcaggcggccgccgccgacgtgcgcgaggcagggcaggccagcggcgccatcgagtatggcgccgaccgcagcgaacacccgaaggtggcggccggcgcggtgatgctcgacgtgctttccttcggcaacctgctggagcgctcgctggaagtgctgctggtgaccctgctcggcgccatgctctaccagcactgggactggcgcgcgctgccgctggcgctgctgctgttctgcgtgtgccggccggcgatggtctggctgctggtcggccggcggctgatgcacccggcgcagcggcgcctgctcggctggttcggcatccgcggcatcggcagcctgtactacctcagctacgcgctgaaccaggggctgcctacggcgctcgcgcataccgccagcgacctggtgctgagcctcgtcgccctgagcatctgcgtgcacggcctgagcatccagccgctgctgatgcgccacgcgcgcagcgtcagtcgccgcgatcgggaatga

SEQ ID NO: 318863 - DNA, 450 bp, Pseudomonas aeruginosa
atggattccatactgcgagccgccgcgctctacctggtcctgctggtactcttccgcatcgccgggcggcgttcactgaccgacatcaccaccttcgacctgctgctgctgatgatcatcggcgaagccacccagcaggcgctgctgggcgacgacttctcgctggtcaacgcggtactggtgatcatcaccctgatcgtcatcgacgtcggtctgtccctgctcaagctgcgccatccgaagctcgacaccctgatcgagggctccccgacgctcatcgtcgagtacggcaggccattgcacgcacgcctggccgaggcccgcctgcgcgaggaagacattctcctggccgcccgcgagacccagggcctggaacgcatggagcagatccgcttcgccatcctcgagaagaacggcaagatctcgatcattcccgatcgcggcgactga

SEQ ID NO: 318864 - DNA, 525 bp, Pseudomonas aeruginosa
atgcgccctgccccagaagacgccgcagacgatgcgttcgaccagcgcgagtatccgatcccggagcgcctggaaagccagcgccgcgcctggcgtttcgaacgggcgggcctgtgggtcctgctcggggtgatcctcctggcgctgaccggggtgttcgccggcgggcctctgagttcgcggacgctggtcagcgacagcggcaggctgaccctggcctacgagcgtttcgaacgcagcggcgccgccagccgcctgcgcatcgatctgcgcggcgcgccgggcaccgaagttggcgtgcgcctgggcggcggactgctacaggcgcacagcatccagagcctgcaaccgcaaccgctgcgcagtcacagctggcggggtggcctggaactggagggaaggctcgacgaagacggtcgcctgagcctgttcctgacgttgttgccgaaccagctcggcgaagtcgccagtcgactggagttcgccggcgagagcctggccttcgaccagttcatctacccctga

SEQ ID NO: 318865 - DNA, 390 bp, Pseudomonas aeruginosa
atggtgaacggagaaaacaagatcgtcctggtcctcgaagaacacgccgaccagctctggcggatcgaggaattcctcctcgatcgaggctacgcggtgctcagcgcggcgagtcgcgacgaagccctcgaccacctggcctcggacgcggtgatcgacctgttcctgctcagcgagcagctcgaaggtcctctgagcggcagcatgctcatcgaaaccagcctgccggtgcgcccgcggatgcgggtgatcctgctcagcgacagcgctcgcgtcggcatcgacccggcggcaccctatccggtgctgctcaaaccggtgaccctggaggaactggggaaagccatcgacatggtcctgcacagcgcgccggtctgccccggcgtctga

SEQ ID NO: 318866 - DNA, 2523 bp, Pseudomonas aeruginosa
atgcccagcagcaagccgctcgccgagtacgcccgcaagcgcgatttccgccagaccccggagcccagtggccgcaagcctcgcaaggacagcaccgggctgctccgctattgcgtccagaagcacgacgccagccgcctgcactacgacttccgcctggagctggatggcaccctgaagagctgggcggtgcccaaggggccgtgcctcgacccggcggtgaagcggctcgcggtgcaggttgaggaccatccgctggactatgccgatttcgaaggcagcatcccccaggggcactacggcgccggcgatgtcatcgtctgggaccgaggcgcctggacgcctctggacgatccgcgcgagggcctggaaaagggccatctcagcttcgccctggatggcgagaaactctccgggcgttggcacctgatccgcaccaacctgcgcggcaagcagccccagtggttcctggtcaaggccaaggacggcgaggcgcgcagcctggatcgcttcgacgtgctgaaggagcgtcccgacagcgtgctcagcgagcgtacgctgctgccccgccatggcgaagccgccacgcccgcggccaggccggcgcgacgcggcaagagcggggggaagacgccgatgcccgaatggatcgcccccgagctggccagcctggtcgagcagcctccgcgaggggagtgggcctacgaactcaagctggacggctatcggctgatgagccgcatcgaagacggccacgtgcgcctgctgacccgcaacggccatgactggaccgaacgcctgccgcacctggagaaggccttggccgggctcggtctgcagcgcagttggctggacggcgaactggtcgtcctcgacgaggagggtcgaccggacttccaggccctgcagaacgccttcgaggaaggtcgcggcgagaacatcctgtacgtcctcttcgacctgccgtaccacgaaggcgaggatctgcgcgatgtcgccctggaggagcgccgcgcgcgcctggaggcgctgctggaagggcgagacgaagacccgctgcggttctccgcgacgctcgcggaagacccccgcgacctgctggccagcgcctgcaagctcggtctcgaaggcgtgatcggcaagcgtctgggcagcgcctaccgttcgcgccgcagcaacgactggatcaagctgaagtgccagttgcgccaggagttcgtgatcgtcggctataccgagccgaagggctctcgccggcacatcggcgccttgctgctcggcctctacagccctgacgaggagcgccggctgcgctatgccggcaaggtcggcagcggcttcaccgcggccagtctgaagaaggtccgtgagcgcctggaacccctcgcggtccgctccagcccattggcgaaggtgccgccggcgcgcgagaccgggtcggtgcagtgggtgcgcccgcaacagctgtgcgaggtttcctatgcgcagatgacccgtggcgggatcatccgccaggcagtgttccacggcttgcgcgaagacaagccggcgcgcgaggtgaccggcgagcgtcccgccggcccgccgccgctgcgcggcgcgcgcaaggccagcgccggtgcgtcgcgggcggccaccgccggcgtgcgcatcagccatccgcagcggctgatcgacccgtcgatccaggccagcaagctggaactcgccgagttccatgcgcgctacgccgacctgctcctgcgcgacctgcgcgagcgcccggtgtcgctggtgcgcggccccgacggaatcggcggcgaactgttcttccagaagcacgcggcgcgcctgaagatccccggcatcgtccagctcgacccggcgctcgatcccggtcatccgccgctgttgcaaatccgcagcgccgaggcgctggtcggcgcggtgcagatgggcagcatcgaattccatacctggaacgccagcctggccaacctggagcggcccgaccgtttcgtcctcgacctcgacccggacccggcgctgccgtggaagcgcatgctcgaagcgacccagctgagcctgacgttgctcgacgagctgggcctgcgcgccttcctcaagaccagcggcggcaagggcatgcacctgctggtgccgctggagcgccggcatggctgggacgaggtcaaggatttcgcccaggccatctcccagcacttggcgcgcctgatgccggagcgtttctcggcggtttccgggccgcgcaaccgggtcggcaagatcttcgtcgactacctgcgcaacagccgcggcgccagcaccgtggccgcctactcggtgcgcgcccgcgaagggttgccggtgtcggtaccggtgttccgcgaggaactcgactcgctgcagggcgccaaccaatggaacctgcgcagtctgccgcagcgcctcgacgaactcgccggcgacgatccctgggccgactacgccggcacccgccagcgcatcagcgcggccatgcggcgccagctcgggcgcggctga

SEQ ID NO: 318867 - DNA, 216 bp, Pseudomonas aeruginosa
atggataccgcctacctgatcctcgcgctgctggtcctgttgctcctggtggatgcctgggccatcaacagcgtgctccgcagcgacagctccgccagtcgcaagctcggctggtcgctgctgatcctgctcctgcccgtgctcggcctggtcctctggggctggaccggcccccgtggcttgcgcccggtgacctcgccggaacacagcaagtga

SEQ ID NO: 318868 - DNA, 240 bp, Pseudomonas aeruginosa
atgaacagcgaaacctgtgcctgtcccaaatgcacctgccagcccggcgccgatgccgtcgaacgcgacggccagcactattgctgcgcggcctgcgccggcggccacccccagggcgagccgtgtcgcgacgccgattgcccctgtggcggcaccacccggccccaggtggcggaggatcgccagctggacgacgcgttgaaggagacctttcccgccagcgacccgatctcgccctga

SEQ ID NO: 318869 - DNA, 519 bp, Pseudomonas aeruginosa
atgcccgacctgcaactcgcggacgaggcctctcgcctggtgacctacctgcgtagcgccgacctcagcctgatcaccgcggaatcctgtactgccgggcagatcagcgccgaactgtcggcggtggccggcagcggcaaggtgatggaaggcggcttcgtcgtctattcgccggcggccaagcttgccctgctggggctcgacccgaactggctggagcgtttcaacctgaccagcgtggaggtcgccgaggccatggccagggcggccctgcaacgcagtccggcgagcgccgcgctggcggtcacggggttgctcggcagtgaagcgaaggacggcatcccgcccggtaccgtgtgcttcgcctgggccttccggttgcccgccggcctcgccctgttctcgcgccgcgagcgcttccacggcgaccccgcgcggatgcgccgggaagccacccgctgggcgctgcggcgcctgcccgaattccatcaacgcgccttgcgcggcgaacgcgcctga

SEQ ID NO: 318870 - DNA, 861 bp, Pseudomonas aeruginosa
atgagcgaacagcgacagaccctgcctgcgcagcaccaggaccaacgtcccggccacgaaagcgagatgcagccgaagccggagttcgtttccgccgattaccgtccggcggccaagctggagggtaaggtggccctggtcaccggcggcgacagtggtatcggccgcgcggtggcggtggctttcgcccgcgagaaggcggatgtggtgctggtctacctggatgagaacgaagacgcggcgaagacccgcgagatcatcgagtcgctcggccgccagtgcctggcgttcgccggcgacgtcgccgacgccggcttctgccgccaggttgtggacacgctaaggcagaaatgggggcgcctcgacgtgctggtcaacaacgccggcgagcagcatccgcaggcgcgcctggaggacatcagcgaagagcagtgggagaagaccttccgcaccaacatcttcggcatgttccagttgaccaaggcggccctgccgctgatgggcaagggcggggcgatcatcaacaccacctcgatcaccgcctacaagggcaacccccagctgatcgactactcctcgaccaagggcgcgatcacctcgttcacccggtcgctgtcgatgaacctggtcaaccgcggcatccgcgtcaacgccgtggccccgggcccgatctggacgccgctgatcccgtccaccttcagcgccgagaaggtcgcccacttcggcgcggatacgccgatgggccggcccggccagccggaagagctggccgccagctacgtctacctggcctgtaacgactcgtcctacgtcagcggccaggtgctgcacgtcaacggcggtacggtagtcaacggctga

SEQ ID NO: 318871 - DNA, 189 bp, Pseudomonas aeruginosa
atgcaggctttcatggttcatttctcagacgccggacaacccggccggaccgtgctcaccactttcgcgccaaccctcagcaccagcgaggcgcacgttcgcctgcaactctgctatcccctgctgttcccgcagcgtctgagcgcggtacgggtctaccccctgctgccggcggcggcacgcgagtga

SEQ ID NO: 318872 - DNA, 288 bp, Pseudomonas aeruginosa
atgaaacgcgactgggggttgatcagggatctgctggagcatctggaaagccttggcttcggccagcactgggaagcacgcgagctacccggtcattgccgcgaggcggtggcctaccacttgcagttgctcaaccaggcgcaactgctctgcggcagcgtccagcattcctggaccggccaggagcaatgggtggtccaccacctgaccctggccggccacgacctgctcgaccgcctgcgccaggaaagcgcggcggccgccgtgccggtacgcaagagcgcctga

SEQ ID NO: 318873 - DNA, 2439 bp, Pseudomonas aeruginosa
atgcccgacagccaagaccagaccccaagtgcggtccagaccctgaaagccagcatcctcgccaaactgcgctacagcgtcggccgcgacccatccaccgcgtgcccgcacgactggttcgaagcggtggccctggcggtgcgcgaccacatcatcgaccactgggaggaggccaccccgcaaggtgaagcgcccgcgcgcaagcgggtctactacctgtccctggagtttctcatcggtcgcctgttgctggacaacctcggcaacctcgggctgctcgaggaaacccgccaggcccttgccgagctgggcgtcgacctgcagcggatcgttgccctggagccggacgcggcgctcggcaacggcggcctcggacgcctggcggcatgcttcatggaaagcatggccagcctcgacattcccgcgcatggctatggcatccgctacgagcatggcctgttccgccaggtgctgaccgacggctggcagcaggagcagaccgagacctggctggatttcggcaatccctgggagttcgaacgacccgaggtcagctactacatcgacttcggcggcagcgtgcaggtcgacagcgagcacagtggccgagccatctggcggccggacgagcggatccgggcgatcgcctacgacacgccgatcgtcggctggcggcgtgccagcgtcaataccctgcgcctgtggcgcgctcgcgccgaggaagacctgcaactggaccgtttcaacgccggcgaccatatcggcgcggtggtcgacgtggtcaaggcggagagcatctcgcgggtgctgtatccggcagacagcaccgaggccggtcaggaactgcgcctgcgccaggagtacttcttcgtctcagcctcgctgcaggacctgctcgaccgccacctgcgccatcatcacgacctgcgtagcctgccggaacaggtggcgatccagctcaacgacacccacccggcgatcgccgtcgccgagctgatgcggcaactggtggacgtgcaccaactggcctggccggacgcctgggcgctgagcgtggcgaccttgtcctacaccaaccacacgctgctcccggaagccctggaatcctggccggtggcgctgatggagcgcctgttgccgcgccacatgcagatcatctacctgatcaatgccttccatatagacgcgctgcgtgcccaggacatccacgacttcgacctgttgcgttcggtcagcctgatcgaggagggccacggccgacgggtgcgcatgggcaacctggcgttcctcggttcgcaccagatcaacggggtatcggcattgcacaccgagctgatgcgcgaaaccgtgttccatgacctgcatcgcctctatccgcagcgcatcagcaacaagaccaacggcgtgtcgttccgccgctggctgttccaggccaacccggggttgaccgagctgctggtggagaccctcggcgccgacctgctggacaccccggaacggcgcctgccggacctcgaggagcacgtcgaggacgccaggctgcgggcgcgcttcgccgagcagcgccggcagaacaagaccgccctggcgcgcctggtgctggacagcctcggcgtggcgatcgaaccggaagcgctgttcgatgtgcatatcaagcgtatccacgaatacaagcggcagttgctcaacctgctgcacaccgtggcgctgtaccaggagatccgcaacgacccgaccgccgaccgcgtgccgcgggtgaagatcttcgccggcaaggctgccgccagctaccaccaggccaagctgatcatcaagctggccaacgacatcgcccgcaccatcaacgacgaccccaccgtgcgcggcctgctcaagctggtgttcctgcccaactacaacgtcagcctggccgaggcgatcattcccgcggcggacctctccgagcagatttccaccgccgggctcgaggcctccgggaccagcaacatgaagttcgccctcaacggcgcgctgaccatcggcaccctggacggcgccaacgtcgagatgagccagcggatcggcctggaacacatgttcatcttcggcctcagcgcccagcaggtggagcagcgccggcaggccggggagctggagatgggcggggtgatcgcggcctcgccgcggctggaggaagccctggaggcgatccgcagcgggctgttctcggccgacgaccgcagccgctacgaagggctggtggacggcctggtgcacgacgaccgcttcatgctctgcgccgacttcgaggcctactggcatgcgcagtgccgggtcgaggaagtctggcgcgagcccgatcgctggtggcgctcggcgttgctcaacgtggcgcggatcggctggttcagcgccgaccggacgatcagcgaatacgcccgggatatctggaagctatga

SEQ ID NO: 318874 - DNA, 399 bp, Pseudomonas aeruginosa
atggaaaacagtgacgaagtgcgattccagcactatttcatttctctcgtcgaacaggtggcgaaaccgcttttcgtcgactcctgcgaagaggcgcgcagctacggcctggactgcaacgtggacctcgacctcgacgaggacggccatcctcgcctgcgcctggaagtcggcgagccgggaggcgagaaaagccactacagcctgctggcgattcccggcgagcgggtcatccatcgccagtacctggccggggcccaggaatggcacagcctgccggccgagctggcgtcgatcaacccgatggtgctggacagcgagctggcggtattcttccgccgcgccttcgaccttcgcctggagggccccgaacgccgtcacccggccggcttctggtaa

SEQ ID NO: 318875 - DNA, 165 bp, Pseudomonas aeruginosa
atgaaaccctacgagcatccggcctacagcgatcccgtggtaagcaacgaagaacccgatcgcgattgccatgaatggaatttcgaaccgggagacagtgatcaggaaccctaccccgaatatcatggagcgaataccgaagaatgcccaggcggaggcacttaa

SEQ ID NO: 318876 - DNA, 168 bp, Pseudomonas aeruginosa
atggcacagcatcaaggtggtaaaggcaacttcgcggaagacccgaaacgtgcttcggaggccggcaagaagggcggccaggccagcggcggcaacttcaagaacgatccgcagcgggcctccgaggctggcaagaaaggtggccagcgcagccacggcgggaactga

SEQ ID NO: 318877 - DNA, 2130 bp, Pseudomonas aeruginosa
atgagcgagcagaacaacgagcagcgcagccaggcggccggcaccgacaccgtcgaccgtggcaacagcaacgccaagctggaacagctggaggcctatcgcgaggacgccaccggagaggccctgagcaccaataccggcacccgcatcgccgataaccagaacaccctgaaggccggcgagcgcggaccgtcgttgctcgaagacttcatcatgcgcgagaagatcacccacttcgaccacgagcgcattcccgagcgcgtggtccacgctcgtggctcggcggcgcatggctacttcgaggcctacgaggacctcagcgacctgaccaaggccggcttcctcgccgaggcgggcaagcgtaccccggtcttcgtgcgtttctccaccgtgcaggggccgcgcgggtccgcggatacggtgcgtgacgtacgcggcttcgccgtgaagttctataccgacgaaggcaacttcgacctggtcggcaacaacatgccggtgttcttcatccaggatgcgatcaagttccccgacttcgtccatgcggtgaaacccgaaccgcacaacgagattcccaccggagcgtctgcccacgacaccttctgggacttcgtttcgctgaccccggagtcggcgcacatggtcatgtggctgatgtccgaccgcgccattccgatcgcctaccgcaacatgcagggcttcggcgtgcacaccttccgcctggtcaacgcggccggcgagagcgtgctggtcaagttccactggcgaccgaagtccgggacctgctcgctggtctgggacgaggcgcagaagctcgccggcaaggaccccgacttcaaccggcggaccctctgggaggacatcgagaagggcgactatcccgaatgggagctgggcctgcaggtgatcccggagaaccagcaggacagcttcgacttcgacctgctcgaccccaccaagctggtgcccgaggagttggtgccggtaagggtggtggggcggatggtactcaaccgcaaccccgacaatttcttcgccgagaccgaacaggtggcgttccacgtcggccacgtggtccccggaatcgacttcaccaacgacccgctgttgcagggtcggctgttctcctataccgacacccaactgctgcgcctgagcgggccgaacttcaacgaaatcccgatcaaccgcccgctgtgtccgttccacaacaaccagcgcgacgcgccgcaccggcagaccatcaaccgcggccgggcttcctatgaaccgaactcgatcgacggcggctggccgaaggaaaccccgccggcggcgcgcaacggcggcttctccacctaccacgagccggtcagcggcagcaagctgcgcaagcgcgccgactccttcgccgatcatttcagccaggccgcattgttctggcacagcatgagcgaggccgagcaggcgcatatcgtcgccgcctacagcttcgaactgtccaaggtcgagcggcaatcgatccgtgagcgcgaagtcaaccagatactcctcaacatcgatccgcaactggccgccagggtcgcggcgaacgtcggtgtgcagctcgccgcgccggccaacccggcaccgcagccgaagccgtcgccggcgctgagccagatgaacctgctgtccggcgacatccgttcgcgcaaggtggcgatcctgatcgccgacggcgtcgccgagagcgacgtcagcgacctgcgcgacgcgctccgccaggagggcgcggacgccaagctgatcgcgcccagcgcttcgccggtgcaggctgaaaacggcgccgaactgagccctgagggaacctgggacggcctgccgtcggtagccttcgacgcggtcttcgtgcctggcggcgcggccagcagccaggccatcggcgctgacgggcgcggcctgcactacctgctggaagcctacaagcacctgaagccagtggccttcgccggcgatgcccaggcgctggccagccagctttcgttgcctggcgaccccggcgtggtgctcggcgccacggccaccgatgtcttccccggcctgcgccaggcattgatgcagcaccggatctggcagcgcgaggcggcgaccaaggcgatccccgcctga

SEQ ID NO: 318878 - DNA, 135 bp, Pseudomonas aeruginosa
atgaccttgcgttgcctgataggcggttgcgactggtgccggcaaccggcgttgcgactgggtgaggaaaccttcgactgcgagcgctgcctgcgttgcggtgccctgcgctacagcgagatacaacgccgatga

SEQ ID NO: 318879 - DNA, 492 bp, Pseudomonas aeruginosa
atgagcgcctgggagacgttgtggaagatcctcggcgaggagttcgccgatctcgccgacttcgagcagaccgcccgcgccgcgttgcgcctgctgctggcggcggcgctcggcgcggtactcggctacgagcgcgagcagagcggcaaggccgccggcctgcgcacgcacatgctggtaaccctcggcgcggcgctgttcgtcatgccgctgcaattgcagagtggcggggcggacgcgctgagccgggtgatccagggcaccgtcgccggcatcggcttcctctgcgccggcaccatcctcaaggcaggtcgggaaagccgggtcaggggcctgaccaccgcggcgggtctctgggccagcaccgccataggcgtcgcggtcggactcggtcaccagggtaccgcggtgctcgggacggtcctggcgctactggtgctgcatgtcctggcctgcctgaaccgttcgccgccatcttccgatagccattga

SEQ ID NO: 318880 - DNA, 243 bp, Pseudomonas aeruginosa
atgttcaaggacttcgacgcctgtaccgcctggaccgacgcgatgcaggagcgctgccagccggtcggcctgatcctctatcagcccaagcggcgtggcgcggcggtacgcatgctgtgggtagtgaccccgggttgcagttgcctgagcgacgccgagaccgccgccgacaacctgctccagcgcatcaccgacatcgccgccgacggccgcgtgcgttacgcggacggcggcacgctgtaa

SEQ ID NO: 318881 - DNA, 882 bp, Pseudomonas aeruginosa
atggcgcgtgcgatctggaaaggcgcgatcagcttcggcctggtgcatataccggtgagcctgtcggcggcgacctcgtcgcagggcatcgatttcgactggctcgaccagcgcagcatggagccggtcggctacaaacgggtgaacaaggtcaccggcaaggagatcgagcgcgagaacatcgtcaagggcgtggagtacgaaaagggccgctacgtggtgctgagcgaggaagaaatccgcgcggcgcatcccaagtcgacccagaccatcgagatcttcgctttcgtcgatagccaggaaattcccctgcagcacttcgataccccgtactacctggcccccgaccggcgcggaggcaaggtctacgcgctgctccgggagaccctggagcgcaccggcaaggtcgccctggccaacgtcgtcctgcacacccgccagcacctggcgctcctgcggcctctgcaggacgccctggtgctgatcaccctgcgctggccgtcgcaggtgcgcagcctggatggcctggagctggacgaaagcgtcaccgaggcgaaactcgacaagcgcgagctggagatggccaagcgcctggtggaggacatggcttcccactgggagccggacgaatacaaggacagcttcagcgacaagatcatgaagctggtcgaggaaaaggccgccaagggccagctgcacgcggtggaggaagaggaggaggtggccggcaagggcgccgacatcatcgatctcaccgacctgctcaagcgcagcctgcgttcccgcgccggcggcggcaaggacaagggcagcgaaaaggccggggccgacgcgaagggtcgcgccaagtccggtgcctcgcgttcgcggcgcaaggcctga

SEQ ID NO: 318882 - DNA, 1995 bp, Pseudomonas aeruginosa
atgagttcgattgtccgcaacagcgacgatgatccgctggtcatcgccatccagcagccccgtatcgccatcgagtcggtcagccctgtggtggaagagggtgcctatcccgcgaagaccgagagcgaccgcgacctgcgcctggccgcgcgaatcttcgccgatggccatgaggtactcggtgccgaggtggtctggcggcgtgtcggggaaaccgcggagcggcgcctgccgctgctgcccgaaggcaacgatttctggagcgcgcagttgcgcacgccgacctgcggccgcctgtacttccgtatcgaggcctggatcgaccgttttgccggctaccgccgcgaattgcgtgccaagcatggcgcacgcctgccgctggacctggagctgcgcgagggcgacgaactgctgcagcgctgcgccgagcgcggcggtccggagatcgccgccgcctgtgcgccgctggccgaacgcctgcaggcctgccagagcgtcgaggagcgggtggcgctgtggctggcggcgcagaccggcgaactgttgcgtctggtcggcccgcgcgagcacctggtgcgcagccgcgaatacccggtggaggtggagcgaccgctggcgcgcttcgccagttggtacgagctgttccctcgctcggaaagcggcgacccgacacgccacggtaccttcgacgacgtgatccggcgcctgccgcagatcgccgcgatgggcttcgacgttctctatttcccgccgatccaccccatcggccgcacccatcgcaagggccgcaacaattccttgcgtgccgaggccggcgaccccggcagcccgtatgcgatcggcagcgaggagggcggccacgaggcgatccatcccgaactgggcgaccgcgaggatttccgccggctgctcgttgcggtgcgcgagcacggcatggaactggcgctggacttcgccatccagtgctcccccgaccacccctggctgcgcgagcatcccggctggttcgcctggcgtccggacggtagcttgcgctacgcggagaacccgccgaagaagtacgaggacatcgtcaacgtcgacttctacgccgaacaggccctgccgagcctgtgggaagccttgcgcgacgtggtgctgggctgggtcgagcagggcgtgacgctgtttcgcgtcgacaacccgcacaccaagccactgccgttctgggagtggctgatcgccgaggtgcgcggccgccatccgcaggtgatcttcctttccgaggcgttcacccgcccggcgatgatggcgcgcctgggcaaggtcggcttcagccagagctacacctatttcacctggcgcaacgacaagcaggaactggcggagtacttcgccgaactcaaccagccaccctggcgcgactgctaccggccgaacttcttcgtcaacaccccggacatcaatccctggttcctgcaacgctccggccgccccggcttcctcatccgtgccgccctggcgaccatggggtcggggctgtggggcatgtactccggcttcgagctgtgcgaggcggcggccttgccgggcaaggaggagtacctcgactcggagaaataccagttgcgtccgcgcgactaccaggcgccgggcaacatcgtcgccgagatcgcccggctcaaccgcatccgccgggaaaacccggcattgcagacgcacctcgggttccaggcctacaacgcctggaacgaccgcatcctgtatttcggcaagcgcaccgcggacctcgccaacttcgttctggtggcggtctgcctggacccgcacgaagcccaggaggcgcatttcgaactgccactgtgggagttcggcctgcccgacgacgccagcctccagggcgaggacctgatgaacgggcatcgctgggtctggcacggcaaggtccagtggatgcgcatcgaaccctggcacctgccgttcggcatctggcgcgtgcggcgcgtcgacgcataa

SEQ ID NO: 318883 - DNA, 3303 bp, Pseudomonas aeruginosa
atggccagacgcgagaagccggtctttctcaacgacccgcaatggtacaaggacgcggtgatctaccaggtccacgtgaaatccttctacgacgccaacaacgatggcatcggcgacttcgccgggctgatcgagaagctcgactacatcgccgacctcggcgtgaacactctctggctgctgccgttctacccgtcgccacgccgcgacgacggctacgacatcgcccagtaccgtggcgtgcacagcgactacggcagcctcgccgacgcccgccggttcatcgccgaggcccatcgacgcggtctgcgggtgattaccgagctggtgatcaaccacacctccgaccagcatccctggttcatccgcgcccgccacgcgaagaagggatcgcgcgcccgcgactactacgtctggtcggacagcgacgagaaataccagggtacgcggatcatcttcatcgacaccgagcagtccaactggacctgggacccggtagcccaacagtactactggcaccgcttctattcccaccagccggacctgaacttcgacaacccgcaggtcctgcgcgaggtgctcggggtgatgcgctactggctggacatgggcgtcgacggcttgcgcctggacgcgattccctacctgatcgaacgcgacggcaccagcagcgagaacctgccggagacccaccaggtgctcaagcgcatccgcgccgagctggacgcgcactatcccgaccgcatgctgctggccgaggccaaccagtggccggaagacacccggccgtacttcggcggcgaggatggcggcgagggcgacgaatgccacatggccttccacttcccgctgatgccgcgcatgtacatggccatcgcccaggaggatcgctatccgatcaccgacatcctgcgccagaccccggatatcccggccaattgccaatgggcgatcttcctgcgcaaccacgacgagctgaccctggagatggtcaccgacgacgagcgcgactatctctggaaccactatgccgccgaccgccgcgcgcgcctcaacctgggcatccgccggcgcctggcgccgctggtggagcgtgaccggcggcgcatcgagctgctgcacagcctgctgttgtcgatgccgggcacgccgaccctgtactacggcgacgagatcggcatgggcgacaacatctacctcggcgaccgcgacggcgtgcggaccccgatgcagtggtcggtggaccgcaacggcggcttctcccgcgccgacccggcgaagctggtgctgccgccgatcctcgacccgctgtacggctaccagacgatcaacgtcgaggcgcaggcgcgcgacccgcattcgctgctcaactggatgcgccgcctgctcgccgtgcgcagccagcagaaggccttcggccgcggcagcctgaagatgctcgcgccgagcaaccgacggatcctcgcctatctgcgcgaatacgccgagggcgaacggcaggacagcatcctctgcgtggccaacctgtcgcgcgcggcccaggcggtggaactggacctcgccagccatgccggcaaggtgccggtggagatgatcggcggcatgtcgttcccgccgatcggcgagctgacctacctgctgaccctgccgccctacggcttctactggttctacctggccgacgcgacgcagatgccgagctggcacgtggccgccgacgagcgcctgccggaactgccgaccctggtggtcaagcagcgcctcggcgagctgctgcagggcgcatcgcggaacatcctggaaggcgagacgctgccggcctacctgccgaagcgccgctggttcgccggcgagaaaggccagccacggctctgctacatcgttccgctggacgaggcggagccgcgctgtgcgttgtgcgaagtggagatcgacgggctgcgctaccagttgccgttgggcttcgtcgacgccgaccagcgcggcgacagcctgcctcagttgctggccctggcgcgcctgcggcgcggtcgcaaggtcggcctgctgaccgacgccgccagcctgccgctgttcgcccgcaaggtcctcgcgcaactccgcgccgaggcggtgatcgcccacggcgacggcgagatccagttcatcccggcggcgggactggcggaaatggacgacatcgccgacgaagacgtcctgccgttctcggtggagcagtccaacagctcgatccgcttcggcgagcgcatggtcctcaaggtgctgcgcaagatccttccggggctgcacccggaaatcgaggtcggcggctacctgacccgccacggctaccccggcatcgccccgttgctcggcgaggtacggcgggtcggcgcggatggcgagccgcacacgctgatgatcctgcagggctacctgaacaaccagggcgacgcctggaactggaccctggacaacctggagcgagccgtgcgcgacgagatatccgcggccagcgaggcgctcgaagggcaatacgacagcctcgccgaactgcgcggcttcgccgccaacctcggcgcccggctcggcgagatgcacagcgtactggccggcgagtcggacgatccggccttcggcagccgcgagagcgacgaagccagcgtccaggcctgggcgctgcgcatcgccgaacagttgcgcgaagccggcaaacgcctgagcgagccgccacggccgttgcagggcgaggcggcggaacaggcgcggcgcctgctggaacgcctgccggcgctgctcgaacgcctgccgctgctggcccggcaggcagccggcgggctgctgatcagggttcacggcgacctgcacctgggccaggtgctgatggtccagggcgacgcacgcttcatcgacttcgagggcgagccggcgcgcagcctggaagagcgccgccagcgtcacagtccgatgaaggacgtcggcggcatgctgcgctcgttcgactacgcggcggcgatggtcctgcgcaacgcgcagagcaccgatagctcggaacaggccgacagcgcccggcgcaaggtcgccatgcgctatcgcagcgaagcccgcgacgccttcctggccggctatcgggccgccgcggcgggtctcatgcacgcctggcacggtcgcgaaggcgagggggcggcgctggccctggcctgcctggaaaaggccgcctacgaactgctctacgaaaccgactaccgccccgactggctggaagtgcctctcgccggtctggccgaactcaccgaacacctcctgaagggcaagaaccgatga

SEQ ID NO: 318884 - DNA, 2199 bp, Pseudomonas aeruginosa
atgagcgaaccgatgtccgaacgcgaacgctggcaactggagctggacaagctgcagcgcggcctgcagggcgatccattcgccttcctcggcccgcagcgcgaccccggcggcgaaggcggcgtgctgcgcgcctacctgcccggcgcgcagcgcgtcgagctgctcgacgaagacggcgcgacgctcgccgaactggagcagagcgaccccggcagcggcttgttccagcgccacctggagcgcctgccaccgcgctaccgcctgcgcgtgcactggccggacggcgtgcaggaaagcgaagacccctatgccttcgggccgttgctcggcgaactcgacctctacctgttcgccgaaggcaaccaccgccaactggcctcctgcctgggcgcgcaactgacccgtcacgaaggcgtggagggcgtgcgcttcgcagtctgggcgccgaacgccgtgcgcgtctcggtggtcggcgatttcaacggctgggacgggcgccgtcacccgatgcgacgacgctatccatccggcgtctgggaactgttcgtcccgcgcctcggcgagggcgaactgtacaagtacgagttgcagggccacgacggcctcctgccgctgaaggccgaccccctggcgctggcctgcgagacgccgcccggaaccgcttcgaagacctgcgcggcgttgcgccacgagtggcgcgaccaggactggctggcccggcgcgcggagcgccagggctatgcggcaccgctgtcgatctacgaagtccacgccggctcctggcgccaccgcgacggccggccgccgcactggtcggaactggcggaggagctgattccctacgtgcgccagctcggcttcacccatatcgagctgatgccggtgatggaacatcccttcggcggctcctggggctaccagccgctcgggttgttcgcccccaccgcgcgctacggcacgccggaggacttcgccgcgttcgtcgacgcctgccaccaggccggcatcggcgtgatcctcgactgggtgccggcgcattttcccaccgacgcccacggcctgggccgtttcgacggcacggcgctgtacgagtacgaacatcccttcgaaggcttccaccaggactgggatacctacatctacaaccttggccgcagcgaggtgcacggcttcatgctggcctcggcgctgcactggctgcgcacctaccacgtcgacggcctgcgggtggatgcggtggcctcgatgctctatcgcgactattcgcgcaaggaaggcgaatggctgccgaaccgccatggcggccgggagaacctggaggccatcgacttcctccatcacctcaaccaggtggtcgccagcgaaacccccggcgcgctggtgatcgccgaggaatccaccgcctggcccggcgtcagccgtccggtggcggagggcggcctgggcttcagccataagtggaacatgggctggatgcacgacagcctggcgtacatcggcgaagacccgctgcaccggcgctatcaccaccaccagttgaccttcggcctgctctacgccttctccgagcatttcatcctgccgatctcccacgacgaggtggtacatggcaagcactcgctactggacaagatgcccggcgaccgctggcagaagttcgccaacctgcgcctgtacctgagcttcatgtggtcgcacccgggcaagaagctgctgttcatgggatgcgagttcggccagtggcgcgagtggaaccacgacggcgaactggactggtacctgctgcgctatccggagcatcagggcgtacaggacctggtggcggccctcaaccggctgtaccgcgaactccccgcactgcatgcgcgcgacggcgaggcgctcggcttcgaatggctgatcggcgacgaccaggcgaacagtgtctacgcctggctgcgccacgcggccggcgagccatcgctgctggcggtacacaatttcaccccggtgccgcgccagggctatcggatcggcgtaccgcaaggcggcgactgggacgtgctgctcaatagcgacgcccaggcgttcgccggttccggcgcaggcagccagggccgcgtctccagcgagtcgtgcggcgcccatggccaggcgcagtcgctggtgctcgacctgccgccgctgggcacgctgctgctgcgtccggccggctga

SEQ ID NO: 318885 - DNA, 996 bp, Pseudomonas aeruginosa
atgaacggcagcggtcacgaagccacctcgacgccgccgcgccgctctcactggcgctggctgcgcaggctgctgaccctggcgttcttcgtgctggtcccggtgctgctgttcctgctggtgaagaatctcgactggcaggaagtccgccacgccctcggcgagtatcgccccgcgaccctgctcctcgggctgctgctggcggccgccggctatacggtgttcagcagcttcgacctgctcagccgctactacatcggccactcgctgcccaagcggcgggtcttcaccgtggcgttcgtgtgcaatgcgttcaacctcaacctgagttcctgggtcggcgccgtggcgctgcgctatcgcctgtacagtcggctcggcctggacatcgccgatatcacccggatcctcaccttcagcctggtgaccaactggttcggctacctgctgctcgccggcatcctgttcagctgcggcctgccggccttgccgccgggctggaagctcggcagcgacggcctgcgcctgatcggcgccctgctcctggcgctggccgcaggctacctgctggcctgccgtttcgcccgacgccgcgcctggggctggcgcgagcatcggctgaccctgccgtcctggcggctggcggccctgcaaggcctgctcggagcgagcaactggtcgctgatggcgctcctgctgtacagcctgctgccgcacagcgtggattacccgagcgtcctggcgatcctcctgatcagcagcatcgccggggtcatcacccatatcccggccgggctcggggtgctcgaagcggtgttcatcgccctgctccagggacgcctgtcccagggcgtgctgctggccacgttgatcggctaccgggtgctgtatttcctcctacccctggcgctggcctgcgtggtctacctgctgttggagcgccgggcaatccgcctgcgccgcaaacagcgccgcctgcgccagggccaggcctga

SEQ ID NO: 318886 - DNA, 1206 bp, Pseudomonas aeruginosa
atgaacttcccctggcgcgacggcaaccgcgtagaactgctgatcaacggcgaagagtactttccgcgcctgttccagtgcatcgccgaggcgcgccgggagatcctcctggaaaccttcatcatcttcgaggacgaggtcggccggcagttgcaggaagccctcagcgccgccgccgagcgcggtgtcgaggtgcaggtcacggtggacggctacggcaccgcctcgctcagcccggactacctggccaggctcaccgccgccggggttcgcgtgcacctgttcgacccgcgcccgcgcctgctcggcatgcgtaccaacctgtttcgccggttgcaccgcaagctggtggtgatcgatcgccagcaggccttcgtcggcggcatcaactacggcgaggaccacctggtgcgtcgcggcaacatggccaagcaggactacgcggtgcgcgtcgagggcccggtggtgcgcgatatccgccaggcctgcctggcgctgctcgaaccggacgccgactacccgccgttgcggccgtcgggcgccgggcagccggcgcgggtgcgcctggtgatccgcgacaacgaccagtccagcgacgacatcgagcgcgagtacctgcaggcgatccgccaggcgcggcgacgcctgctgatcgccaacgcctatttcttccccggctaccgcctgcttcgcgagctgcgcgatgcggcgcgccgcggcgtgcgcgtcgacctggtactacagggcatgccggacatgccgctggtgcgcctgtgcagccggctgctctacgactacctgctgcgcgagggcgtgcgtatccacgaatactgccagcgtccgctgcacggcaaggtcgcggtgatcgacgacgactggtcgaccatcggttcgagcaatctcgatcccctcagcctgtcgctgaacctggaggccaacctggtgatccgcgacgtcgccttcaacggccagctctaccagcacctgcgcgagctggcgcgccgccactgccggcgcatcagccgccgccacgcgaggcgcggctactggtggcgagcgccgctgattttcctcggcttccacttttccaggcactttccggctatcgccggttgggtacccgcccatctgccacgcctgaaatcgctggagccgcgtccgtcgcggcgctggcaggaacgccagggccagcggggcaacccatga

SEQ ID NO: 318887 - DNA, 738 bp, Pseudomonas aeruginosa
atgatcctgccgcgcctgcaggtgctgacggtgaacacccacaagggtttcaacccgttcaatcggcgcttcatcctgccggagttgcgcgaagcggtgcgcagcgtcggtgccgacctggtgttcctccaggaggtcctcggctcccatagcctgcacgccgcgcgcctgccatcctggccgccggcgccgcaatacgagtatctggccgacagcatgtggccgcagttcgcctacgggcgcaacgcggtgtatcccgaaggccaccatggcaatgccgtgctctccaagcatccgatcctcgcccaccgcaacctcgacgtctcggtggcgggcaacgaggagcgcggcctgttgcatgcggtgatcgacatcggccgtccgctgcacgcggtctgcgtgcacctgggattgcgcgaggcgcagcgccagcgccagttgcaactgctctgcgaactggtggcaggcctgccggagcgcgagccggtggtggtcgccggcgacttcaacgactggcgccagcgcgctgaccaactgctcgccggttgcggcctccgcgaagtcttcgtcggcgcccagggccggccggcgcgcagcttcccggcgcgctggccggtgctgccgctggaccgcatttacctgcgcaatgcccgcgggcgccagccgcgcatcctctcgcggcggccctggtcgcacctgtccgaccacctgccgctggcggtggaggtggagccatga

SEQ ID NO: 318888 - DNA, 939 bp, Pseudomonas aeruginosa
atgagcgcaccggcacgcctgcgcatcggcatttccggctggcgctacgccccctggagaggtgacttctatcccgaggggctgcgccagaaggacgaactgcgcttcgcctcgcgggcggtgaacagcatcgagatcaacggcaccttctacgccctgcagacgcccgagcgcttccgcggctgggccgaggacacccccgaggacttcgttttcagcgtcaaggccccgcgttacatcacccacgtgcggcgcctgcgcgagatcgacgagccgctggcgaacttcttcgcctccggccccctcgccctgcgccagcgcctcggcccgttcctctggcagttcccgccgagcatgcgcttcgaccgcgagctgttcgccgatttcctcgcccgcctgccgcgcgacggcgccgccgcgcagaagctcgcccggcacagcgccgcgcgcctgcaccgcgagggctacctcgacggcgatccggcgcagcgcctgcggcatgccgtggaaatccgccatgagagcttcgtcgacccgacgttcatcgagttgctgcgcgaataccgggttgccctggtggtggccgataccgccggcaagtggccgctgctcggcgacgtctgcgccgacttcctctacctgcgcctgcatggcgacaaggaactgtaccgcagcggctactcggaagcggccctgggccagtggcaggcacggatccgcgcctgggccggcggcggccaggccgacgacctgcgccgggccagccaggacgcaccggcgaaggcgacggcgcgcgacctgtactgctacttcgacaacgacgtcaaggtgcgcgcaccctacgacgcccggcgcctcctgcagctgctggaactcgacggcggcctgcgcacggtgcccggacagttgcccgatgacctgcgggagagtgccgcatga

SEQ ID NO: 318889 - DNA, 1248 bp, Pseudomonas aeruginosa
atgaaagccgtggtattccatgacatcggcgacatccgcctggaagacgtggcggagccgcgcctgcaggagcccaccgacgccatcgtgcggctgaccgcctcggcgatctgcggcaccgacctgcacttcgtccgtggcagcgtcggcggcatgcgtccgggaaccatcctcggccatgagggcgtgggcatcgtcgaggcgctcggcgacgaagtgcgcaaccttcaggtcggcgaccgggtggtgattccctcgaccatcgcctgcggcaattgcgtgtattgccgagccggctactacgcccagtgcgacgtcgccaaccccggcggcagccaggccggcaccgcgttcttcggcggcccccgggccaacggcggcttccatgggctgcaagccgagaaagcgcggattccctatgccaacatcggcctgatccgcctgcccagcagcatcagcgacgaccaggcgatactcctgtcggacatcttccccaccggttacttcggcgccgaactggccggtatcgcccccggcaacaccgtcgccgtgttcggctgcggtccggtgggccagttcgccatcgccagcgcgttgctcctcggcgccgccagggtgttcgccatcgaccgccacccggaccgcctgcacatggcccgccagcaaggcgccgaagtgatcgacttcgagcgcgaggatccggtccaggccctgcgctggctgaccgccgggatcggcgtggaccgcgccatcgacgccgtcggcgtggacgccgagcacagccatggcaccgccaccccggcgccgcaccaggagggcaccagctggagtcccggcaacgcccccgcacaggccctggagtgggcggtgcagggcctggccaaggccggcaccctgtcgatcatcggcgtctacgccgaagactcgcggcagtttcccatcggcctggcgatgaaccgcaacctgaccatccgcatgggcaactgccaccaccgcaagtacattccgctgctgctcgaacatgtgctcagcggacgcatcgacccggcgaagatcctcacccaggtgaagccgatcggcgacgccatcgaggccttcgaagccttcgaccgccgcgagaccggctggatcaaggtcgaactggtgccgcagaagcgccaggtcgagggcagcgaggaacgcctcgacgaacgcgcggtggacgaactggcgcgccggccgacgccggaaagcggcgcccgggggtga

SEQ ID NO: 318890 - DNA, 417 bp, Pseudomonas aeruginosa
atgaagatcagcgacatcatgacccgcaacgtccaggtcgccgacccgcagcagagcatccgcgaggcggccgccaccatggcgaggatcgacagcggcgccctgctggtcggcgaaggcgaccgcctggtcgggatgatcaccgatcgcgacatcgccatccgcgcggtggccggcggcctgtccggggataccccgctgggccgcatcatgagcggcgacatccactattgcttcgaagacgaagacgtccagcacgtggcccgcaacatggccgacatccagatgcgccgcctgccggtgctcaaccgcgagaagcggctggtcggcgtggtttccctgggcaacatcgccagctgccgcgaccaggcctccagcgccaccgtcctgcagggcgtcgcccagacccactactga

SEQ ID NO: 318891 - DNA, 2151 bp, Pseudomonas aeruginosa
atgagcagaaagcgtagccccgctccttcgcggatcagcgaagggcaccccttcccccttggcgccacctgggacggcctcggcgtcaatttcgcgctgttctcggcccacgcgaccaaggtcgagctgtgcctgttcgacgcgcgcggggaaaaggagatcgagcgcatcgaattgcccgagtacaccgacgagatctggcacggctacctgcccgacgcccacccggggcagatctacggctaccgggtgcacggtccctacgagccggatgccggccaccgcttcaatcccaacaaattgctcctcgatccctacgccaagcagttggtcggccgcctgcgctggtccgaggcgctgttcggctacaccatcggctcggccgacgccgacctcagcttcgacgagcgcgacagcgcgcccttcgtgcccaagtcgaaggtcatcgatccggccttcacctgggccgagcgcccgccggtacgcgtcccctgggaccgcacggtgatctacgaagcccacctgcgcggcctcagcatgcgccatccacaggtcccggaggcggttcgcgggaccttcgccgggctgatgaacgccgacctgctggcgcacatccgccggctcggggtgaccagcgtcgagctgctgccgatccacggcttcgtcgacgacaagcacctgctggaaaacggcatgagcaactactggggctacaacagcatcgccttcttcgccccgcacccggcctacctcgccagcggccaggtcaacgagttcaaggagatggtcgcgcacctccacgacgccggactggagctgatcctcgacgtggtctacaaccacaccgcggaaggcaacgagctgggtccgaccctgtgcatgcgcggcatcgacaacgcctcgtactaccgcctgatgcccgaccagcgccgctactacatcaacgattccggcaccggcaacaccctcgacctcagccacccctgcgtgttgcagatggtcaccgactcgctgcgctactgggccacggagatgcgcgtggacggcttccgcttcgacctggcgaccatcctcggccgccatccggacggtttcgacgagcgccacggcttcctcgtcgcctgccgccaggacccggtgctgagcaagtgcaagctgatcgccgaaccctgggattgcggccccggcggctaccaggtaggcggcttcccgcccggctgggcggaatggaacgaccgtttccgcgattgcgtgcgcgcctactggcgcggcgacgacggcatgctgccggaactggcgcgacgcctaaccgcctccggcgatctctacgaccagcgtggacggcggccctacgcgtcggtgaacttcgtcaccgcccacgacggtttcaccctgcgcgacgtggtttcctacgatcacaagcacaacgaggccaacggcgagaacaacgccgacggcagcgaccacaacctgtcctggaaccacggctgcgagggccccaccgacgacccggagatccgcgccctgcgcctgcgccagatgcgcaacctgctgtccaccctgctgctgtcccagggcaccccgatgctggtcgccggcgacgagttcagccgcacccagcagggcaacaacaatgtctattgccaggacaacgaactgggctggatcgactggcggctggacgacgagggccgttcgctgctggccttcacccagcgcctgctggccctgcgccaacgctatccgatcctgcgcagggggcgcttcctggtcggcgagtacaacgaggcgctgggtgtcaaggacgtcacctggctggcgcccggcggcgaggagatgaccgaggaacactggcacgacgagcacgcccgctgtctcggcgtgctcctcgatggccgcgcgcaacccaccgggatcctgcgcagcggtgaggatgccaccctgctgctgatcctcaatgcctaccacgacgcggtgtccttccgtcttcccgaggtggccgagggcagcggctggacctgcctgctggatacccaacggccggaggacccgctcggcgaacgctacccgttcgccagcgagttcctggtcggcggccgcagtttcctgctattcgagctacaaccgccgggcgccggagcggaaggatga

SEQ ID NO: 318892 - DNA, 306 bp, Pseudomonas aeruginosa
atgagcgccgacgaaaaacgcatacgagagttcgcctaccagatctgggaatccgagggctgccccgacggccaggccgaacgccactgggccatggcccggcaactggccgaagcggaagccgccgcggcggcaccgaagaagacccgcggtcgggccaaggccgccaaggaaaccccggccctgctgcaagcgccggccgccaagccgcgcaagccgagggccgcgtccccggcgcggcccgccagcgaaaaaccggcggcggccaagccgcgcagccgccgcaagcccgaagcgggcgaatga

SEQ ID NO: 318893 - DNA, 2781 bp, Pseudomonas aeruginosa
atgattgagccccgcgctaccctgcgcctgcaattccacgccggcttcaccctcgacgatgccctgccctggctggactatttcgccgacctgggcatcagccatctctacgcctcgccgctgttccgcgcgcggcccggctccagccacggctacgacgtggtcgacccgacccggatcaatccggaactgggcggcgagccggcgctgctgcgcctgatccaggggctgcggcaacgcggcatgggcctgctcatggacatagtgccgaaccacatgggcatcggcggcggcgccaatccctggtggcaggacgtgctcgaatgggggcgcgagagtccctacgcgagtttcttcgacatccagtgggaatcccacgacgccgcgttgcgcggccaggtgctgctgccgttcctgcgcagcgactacggcgaggtcctggctgccggggagatcggcctgagcctggaccgcgaggccggccgcctgctggcgagccacggcgagcagcgcttccccctctggccgggcagctacccggagctgctggaagacagcggcgagccgcgcctgtcagccctggccggcggtttccgcgagtgccggcaggaccgcgaggccttgcgcgagatgcagcgtcaactggcggctgcgctcgccgagagcgctccgcgcgcagccctccagcgcacgctgggcgaactccaggaacgccacgaggaggctcgccaacgcctgcaccgcctgctcgaggcgcagcactaccgcctggccagttggcgcaccgcggcggacgacatcaactggcgccgtttcttcgacatcagcgaactggtcggcctgcgggtcgagcgcggcgaggtgttcgaggccgtgcacggcaaggtcttccagttgctcgaggacggtctgctcgatggcctgcgcatcgatcacgtcgacggcctggccgatccgcgcggctattgccgacgcctgcgccgccgcagcgagcggatccgcgcccatcgcggcggcgcgccgatgctgctgtacgttgagaagatcctcggtggcgaggagcgcctgcccgaggattggctgtgcgacggcaccaccggctacgacttcatgaaccaggtcagcctgttgcagcacgatccgcgcggcgaacgaccgttgcgcgaactctggcagcgggtcagcggacgcccggaggcgtttctcgacgaggtctaccaggctcgccaactggtcctggcgggaagcctcgccggtgacctggagaacctcgcccagggtcttttgcgggtggcgcgggccgacctggccagccgcgacctgaccctgggcggtatccgccgcgcgctgttccagttgctcgcgcgctttccggtctaccgtacctacgccggggcctgcggtcgctcggtgcaggatcgcgaggtgttccgctatgccgcagaggcggcccgcgaggatctcgacgaagccgaccgggcggtcctcgaccatctcgaacgctggctcggcgggcagccgctgcgcgagctgccgcccggtccgctgcggcgcctgcgcggcgagttgctggcgcgcttccagcagttgagttcgccgaccgcagccaaggccgtggaggataccgcctgctatcgctcggcggccctgctctcgcgcaacgacgtcggcttcgacccgcagcgcttcgccgcttccgccgaggaattccatgccgcctgcgaagccaggcgcctggccagcccgcgcgccctgctggccaccgccagccatgaccacaagcgcggcgaggacgcccgcgcccgtcttgcggcgctcagtgaactggcgccctggttcgcgcgtaacgtcgagcactggcaaagcctggccacgccgttgcgccgcgacctcgccgaggggccggcgccgagtcccggcgacgagctgatcctgttccaggccctgctcggcagttggccgctcgacgcgccttgcgacggcgccgccctggaccaagcgttcctcgcgcggatgcgcgaatggcaatgcaaggccttgcgcgaagccaagctgcgcacgcgctggaccgcgcccgacgaagactacgagcgcgcctgcgccgactatctggaacagctcctgcgcgcgccactggcccaggccctgcgccagtcgctgggcaacgcggcggcgcgactgatgccggccggggccctgaatggcctcgcccaatgcctgctgcgcctgacctgcccgggtatccccgatctctaccaggggcgcgaggactgggacttcagcctggtcgacccggacaaccggaggccggtggacttcgcccggcacgccgccgccctggccgcgccgacgcccttcccggaactgctggagcactggcgcgacggtcgcatcaagcagaccctgatcgcccgcgtgctggggctgcggcggatgcagccgggcctgttccgcgacggcgactacctgcccctggaggtcagcggcgagtatgccgagcgggtcctggccttcgcccggcgcagtcgtcacggttgcctgctggtggtggtcccgcgcctggcctgcgccctgctcggccacgccacgcagccgcaggtgccggccgaggcctggggcgacacctgcctcctgctgccgccgagtctctccgaatgcacctacagcggcctgttttccaccatgccgctgcccagcgacgggcacctgagcctgtccgaagtgctcgccgactttcccgtcaacctgctttaccgcctcgcccaggaggacaccccatga

SEQ ID NO: 318894 - DNA, 2055 bp, Pseudomonas aeruginosa
atgagtgacgcacgcctggccgaactggccgccgccgtgggcctgcaactcgactggcaggacgccaacggacggccgcagcgggtcgacccggaggtccagcgcggcctgctggaagcactcggctatccggcgcagagtccgcaacagatcgaacagagcctggccgcgctggcccggctgcgcgaggacagcgccaacctcggactgctggtcggcgaatgcggccagccgctggagcaagcgctcggccccgccggcaccccgggcgagctggtctacgaggacggcacgcggatcgccctgcgcctggacgccgaaggccgcctgccggcgcaggcccgcagtggctatgcgcagctgtcgctggagcagcgggaatgggcggtggcgatggcgccgccgagctgtccgtccctggccagcctcgccccgggtcgctcgcgtcgctggggtctggccgcccaggtctatgccctgcgccgccccggcgacggcggcctgggcgacagcgccgccctcgaggacctgctgcgcagcgccgcgcggcatggcgccgacgcgctggcgatcagcccgctgcacgccctggccgaggccaacggacatgcctacagcccctactcgccgtccagccggctgttcttcaatgtcctgcacgccgcgccggcgaccattctcggcgcggcggcggtggaacaggcgatccgtcgcgccggcctggccgcggagatggcccgcctggagagcctggagctgatcgactggacagcggcggcggacctgcgcatgcgcctgctgcgccaactccaccgcgacttcaccgagcgcgccagtcccttgcgccacgacctcgccgaattccgccgcgaagccggcgaggccctgctgcaccactgccgcttcgagaccctgcaggcgcacctgggcgccggccccgactggagacgctggccggagccgctgcgccgccccggcgagccggcggtggccgcgttctgcgccgatcacgccgaggaagtggacttccgtgccttcggccagtggctgacccaacgttgcctgcaacatgcccagcgccaggcgcgcgaggccgggatggccatcggcctggtcgccgacctggcggtgggcgccgatggcggcggcagccaggcctggtcgcggcaggaagagctgctcgccgaagtgaatgtcggcgcgccgccggacatcctcaaccagtccggacaggactggggcgtttccgcgttcaatcccgaaggcctgcgccgccacggctaccgggcattccgcgagatgctgcgggccaacctggcctggcccggagggctacgcatcgaccatgtgatgggcctgcaacgtctctggctgatcccgcgcggccagccgccccacgccggcgcctacctgcgctacccgcaacgcgagctgctgcgcctgctggcgctggaggccagtcgcgcctcggcgctggtcatcggcgaggacctcggcaccgtgcccgaaggcctgcgcgaggaactggcacgccgccaagtgctgggtacccgcgtgccgctcttcgagcggcgcggcgaacgcttcgtgcccccggcgcaatggccggcggacgccatggccaccaccagcacccacgacctgccgagcctgtccggctggtggcggggccgggacatccactggcgcggccgcgccggacaccgcagcgccgaggaatgcgcggccgacctggaactgcgcgccgaggagcgccgggccctggccgccagcctcgaaccgccggtcgatcccgaccccgccgccgaagtaccgctggacgcctgcatcggctatgtcggggcaacccccgcgccgttggtgctactgcccctggaggacgccctgggcagcctggagcagccgaacctgcccggccccggcgacgcccacccgaactggcggcggcgctggccggaaaacgccgcgcagatgctcggaacgccgcaggtcgaccggcgcctgcgcctgctcgaacgcagccgccgggatgccgaggaggccgcccatgattga

SEQ ID NO: 318895 - DNA, 1752 bp, Pseudomonas aeruginosa
atggcgatccggcgccgcttcggcgcccagttccaaggcaacggccggacctgcttcggcctctgggctccggacgcccgtgaggtccgggtcgagaccgccgacggccgcgactggccgctggaaggcagcgacagcggctggttcgaggcgaccctgccctgtccgcccggcacccgctaccgttaccgcatcgatggtcgtcccggggtgccggacccggcctcgcagttccagcccgacggcgtgcatggacacagccaggtgctggaccatggcgcctacgcctggcgcgtcgacgagtggcgcgggcggccctggcacgaagcggtgatctacgagctgcacgtcggcctgttcggctcctacgccgaggtcgagcacttccttccgcgcctggtggaactgggcgtgaccgccgtggagctgatgccgctgggcgagtttcccggtcgccgcaactggggctacgacggcgtgctgccgttcgccccggcgtcggcctacggcacgcccgagcaactcaagcatctgatcgacagcgctcacggcatgggcctgatggtcttcgtcgacgtgatctacaaccacttcggcccggacggcaactacctcgcgcagtacgccgccgcgttcttccgcgacgaccggcagacgccctggggccaggccatcgatttccgtcgcggcgaagtccgcgagttcttctatgagaacgccctgatgtggttgctcgactatcgcgtcgacggcctgcgcttcgatgccgtgcacgcgattcccgatagcgcgttcctcgtcgagatggcccgccgcctgcgcggcgccgccggccccgagcgccatgtgcacctggtcctggagaacgacgacaaccgcgccagcctgctgcgccagggctacgacgcacagtggaacgacgatggccaccatgcgctgcacgtcctgctcaccggcgagaacgacggctactaccaggactaccccgagccgctgcgctgcctggcgcgctgcctggccgaaggcttcgtctaccagggcgaagccaaccgccacggccggccgcgcggcgaaccgagtgccgacctggcgccggacgccttcgtgctgtttctgcaaaaccacgaccaggtcggcaaccgcgccttcggcgagcgtctcagcgtcctcgccgaaccccaggcgttgcgcctggcgatagcgctgcaactgctcgcgccgatgattccgctgctgttcatgggcgaggaatgcgccgcgcgcgaaccgttcctgtatttcaccgatcaccagggcgaactggcggacgcggtccgcgagggacgacgcaaggagttcggcgagttcggccgcttcggcgagggcgccaccctggcttcgctccccgacccaaacgcggtggagaccttcgagcgctcgcgtcccggcctggccgattgcgacccggcctggcgcggcttctaccggcaactgctggaaatccgtcatgaacacctgatcccgcgcctgcgcggcgcccgttcgctgggcgttaccaccatcgccggcgccgcgctgtcggcgcgctggcgactcggtgacggcagtgactggcgaatcgacttcaacccttctccgctcgaagcggaagtcgagccgccggcggccgccacctgggtgctgttcctcgacaacctcgcctgtgccgagtatcgccgcggccgcctaagtccccgcagcatcgcggtcagcctggagcccgcccatgagtga

SEQ ID NO: 318896 - DNA, 1605 bp, Pseudomonas aeruginosa
atgccacggcgcgacggagtccgaccgaccaacgccaaggacaacgtacgaccggaggatgacatgggacattctgttgcaggcgtttgcctggaagaacccgcggtactgaccgcttttccgtcgctgctgcacccgcaggacccgccgcaacagagggatcggatactcttcgttaccgccgagctcagcgatttcgtcaaggtcggcggactcggcgacttttccgccgcgctgccgagggtcctcaagcgcgagcattcggtgcgagtcctgctgcccggctatcgccaggtgctggagcgctgccgcgacttgcggatcatcggcagcctgcccggccgggcggcgatcccgccctgcgagatcggcctggtgaccctcgacgacggcctggaagtcatgctggtgctctgcccgctgctctacgagcgcgagggtacgccgtacatggacgaccagggcaacgactggccggacaaccacctgcgcttcgcccgcctgtgcctggccgccgccgagatcgccggcggacgcggcgcccagggctggcaaccgggcctggtgcacgccaacgactggccgtcggcgctgacgccggcctacatggcctggaacggcgtgcgcacgccgagcctgtttaccatccacaacctcgcctaccagggcctctgcgacctgcaatgcagcgccgaactgggcctccccgacgaagcgctgagccacgaaagcatggagttccacgggcgcctgtcgttcctcaaggccggcatcgcccatgcccaccacatcaccacggtgagcgagacctacgcccaggaaatcactaccccggaatacggctgcggcctgcacggcatcctcaagtacaaggtcgagaagcgtcagctcagcggcatcgtcaacggtatcgacgatagctggcagccgcactgcgatccgcacctggtggcctgcttcagcgcccgccaatgggccggcaagcgcgccaacacgcgctacgtggaggagcgtttcggcctggagccgggcaaggggccgctgttcgcggtggtctcgcgcctggtgcagcagaaaggcatcgacctgaccctggagatcagcgatgccctgctccaggccggcggccgtctggtcagcatcggccgtggcgagccgaacctggagaaggccatgctcgaactcgcccggcgtcatcccggccaggtcggcgtgcacatcggtttcgacgagaccgaggcccgccgtatctacgccggcagcgacttcctgctcatgccctcgcgttatgagccctgcgggctcagtcagctctatgcgcaatgcttcggctcgctgccgatcgcgcgctgcaccggcggcctcgccgataccatcgtcgacggggtcaccggcttcctgttccgtgaggaaaccgcgcagagctacctcgatgcggtgatgcgcgcgatcaacgtctaccactgtccctcgctgctcaacgccatgcgctgcaaggcgatggccgcgccgatgttctggagcgactcggtggagccttacaaccgcctgtaccggcgcctgttgaggaataccgctccggccctgcgcggggtacgccagtga

SEQ ID NO: 318897 - DNA, 366 bp, Pseudomonas aeruginosa
atgctagataccgatgaaaacgtggttgagtacctggaagagcatttcaaggatgtgcgcgtcagttgcgaacctcgccctgacggcgcgttgctggtgaccttgcgtaataaccagggcaagcgcctgatgagccgggcgatctccggccaggagcagagcagcccgctgttgctgaaccaggtgctggaacgcatccgccgggacctgatcatcgaccaggggccgttgcagacgcgcgacagcgactatttccgcaagcgcatcgacctgctcacgttccgcgacagcgacaaccagcatctcactcatcgcaaggtcctggtcgccggcggcaagctgcgtaccatgagcctggctcgctga

SEQ ID NO: 318898 - DNA, 1098 bp, Pseudomonas aeruginosa
atgagcgcagaccctcggcagagactggtggtggcccatagtgtcgatcccgcggccgccgaacacgaagtgcagggcaacctggccctggcgcgctggctggcggaagtccagaagctggagttcggcggccgctacgaacccgaattgcaccagcgaggccccctctacctggtcccgacccgcaccctggtcggcagggagaccgccgtgcgcctgggcgtgaacagtgacgaagatctgctcggcggtttcgtcgagcacgcgttcatcgccggcaaggccatcgtccatccgctgccgcgcggcggcgtggcgccggaaggctggaacccgctgttcgcggagaaggtccgcgacgtcgtgctcaacggcgtcagcgtcttcagcctggccgacgcacaccgcgccggcgctcgcatgctcgccgaaggaccggtgcgggccaagctggcggaggcctgtggcggcctcggccagtacgtggcgcacgacctcgacgaactggacgcttggctcggcgggctggaggagcgtcagttggcgcagggcctggtactggaagccaacctggagagcatcgtcacccacagcgtcggccagctccgggtcaacggtttcctgctgagctaccacggtcaccagcaccagacccgcaacgcgcgcggcgaactggtctatgccggctccgacctgctggtggcgcgcggtggctacgccgagctgctggccctggacctggcccgcgaggtgcgccaggccatcgagtacgcgcggatcttcgacaccgccgcggcgatcttcttccccggctgcttcgcctcgcggcgcaactacgacattgcccagggccgggatggcaacggtcgggagcgcttcggcgtgctcgagcagtcctggcgggtcggcggcgcgagcagcgccgagatcgccgcgctggaagccttccgcgccgatccggggctgcccgcggtgcgcgccgcgtcgttcgagatccacgaagacaagcgcctgccggacaacagccgggtgatctaccgcggtcccgacgaacacggcgacttcctgctcaagtatgcgatgacgggggaggcatga

SEQ ID NO: 318899 - DNA, 777 bp, Pseudomonas aeruginosa
atgacggcgaacagcgaacgcatccgcatcggggtcggcgacgaccggatcgaaggcaccttcctcagcccccgggcgaaggttcccggcgtgctcttcgtgcacggctggggcggcagccagcagcgcgacctgaagcgcgcccagggcatcgccgggctcggctgcgtgtgcctgaccttcgacctgcgcggccacggcgcggaaagcgggcgccaggcgctggtgacgcgcgaggacaacctgcaggacctgctcgccgcctacgaccggctggtggcccacccggccatcgacagcgaggcgatcgcggtggtcggcaccagctatggcggctacctggcggcgatcctcagccagttgcgcgcggtgcgctggctggccttgcgggtgccggcgatctaccgcgacgaggattggctgacgcccaagctgctgctcgaccgcgaggatctcagcgaataccgcagcagcctgatcccggccgccagcaaccgagccctgcaggcctgcgcgggattccgcggcgatgtgctgctggtggagtcggagttcgacagctatgtgccgcactcgaccatcatgagtttccgcgccgccttccagcagacccattcgctgacccaccggatcatcgaccacgccgaccatgcgctcagcagcgaggcggcgcaggacgcctatacctcgatcctggtggactggatcaccgagatggtggtcggcgaacgtctcagcatcaccccggcctacgccaccatccatccggctttctga

SEQ ID NO: 318900 - DNA, 453 bp, Pseudomonas aeruginosa
atgaaccagaccaacctcgacgacaccctcgacgtactcaacgacctgctgcaaaccagcaaggatggcgaggccggtttccacgcctgcgccgaggacctgcgcgacccgcagttgaaggcggcgatgctggagcagagccgcgactgcgccgcggccgccgacgagctggagcggatcgtcctggaactgggtggcaaacccaaggacagcaccagtttcgccggtgacctgcatcggcgctgggtcgacctgaagtcactggtcaccggcaaggacgaagaggcggtgctcaacgaatgcgagcgcggcgaggatgtcgccaagcaccgctaccaggcggcgctggaaaaatcgctgccggcggagatccaccaggtgatcgagcgccaataccagggcgtactccgtcaccacgaccgggtccgagccctgcgcgacgcccgcgcctga

SEQ ID NO: 318901 - DNA, 210 bp, Pseudomonas aeruginosa
atgagccagtccctggctttcctgctcatcggcctggccacgctggtgggtttctacgacctgtgggccttcgtcagcgtgttccgcagcgatcgcagcgtgaattcgaaagccctgtggtcgttgctgatcgcggtgctgccggtgctcggcgtgctgatctgggcggtcgccggcccgcgtgcggcgaccgcccgtcctcgcgactga

SEQ ID NO: 318902 - DNA, 471 bp, Pseudomonas aeruginosa
atgaacgccatcgaattgctggtccatgaccacgagaccgtgaagaaactgctcaacgaactcagcgagaccaccgaacgggcgctgaagaagcgcagcgagctgctgggcaggctggagctggaactggtgctgcacaccgccatcgaggaagacatcttctatccggcgatcagggaaagcggcggcaaggaagagctgaaaatgtactacgaggccaaggaggaacaccgcacggtggattccctggtccttcccgacctcaagcgcacccgcccggataccgtgcagttcgccggccgggtcaaggtgctcaaggaactcctcgaacaccacatcgaggaggaagagggcgaactattcccacgcgcccggcaattgctcgacgccgccgccctcaagcaactcggccaggccatgcagcagcacaagaaagagctgaaagcgcgcctggaaaaacgggcggcctga

SEQ ID NO: 318903 - DNA, 1077 bp, Pseudomonas aeruginosa
atgcgcgaagaagaccgcgccttgctcgaggaactcctgctggcacgtggccccggtggccaggaagacgaggtcagggccatctgccagcgggaactcgagggctgttgcgacgaggtcggcagcgatgccgccggcaacctggtcgcgcgcatcagcccgccgcacctgccgcgcgagcaggcgcggcgggccgcggtgcggctgctcgcgcacctcgacgagatcgccatgatcgtcaagcgcgtcgaggccgacggtaccctgcgcgtagtggcgctcggcggcgcccagccggtgagcttcggcgtctgtccggtacagatcctggccggcgaggcggtactcgacggcgtgctgtcctacggcagcatgcatgctaccggcgagtcgccgcagggctccgacgtgctctcgggcgcggtgcactggcgcgacgtacacgtggtcacccggcgcagcgccgaggagctggcgaacctgggcgtgcgaccgggtacccgcgtggtgctcaaccgtctgtggcggcgcccgttgtacttccaggattgcgtcgccgcgcacttcctcgacgaccgcgcaccgctgctcgcagtactcggcgtggctcgcgagatcgcccggcgccgcgatgagttgcacggcgacctctacctggtgctcaccaccatggaggaggagagtaacgccggcgcgctgttcgccgcgcgccgactgccgggcgacatcagcatcgcggtggaagtcggcccaacggtagccgaatacggcacccggctgtgccgcgacccgatcgtcaacagcggcgactccaagggttattacagccgccatgtcaccgaccgcctgttgcgcgccgccgaacgctgccagtaccagccgcaggcggcgctgctggtggacttcgcctcggacgccagcgcgctgctgagccacggcgaggccgcgcaggtcggctgcatcggcattccgaccgagaacacccacggtttcgagatcgtcctggaagagggcatcgaggcttgccggcggacgctggtcgagttcctcgtgcaaccgccggacgacgaagcctga

SEQ ID NO: 318904 - DNA, 351 bp, Pseudomonas aeruginosa
atgaacgaatacctgccgacttcgacggccaatggcctgccgcacaacctgcagcgcggcgagcgactcgcttccatcggcgccggactggtcctggccggcttcggcctggcccgcggtggcttgcccggcgcctgcaaggcggtcgccggcggcctgctggtcagccgcgggttgagtgggcattgccatgtcaagggcctgctcaatgaaccgcgggaagagttgcagttgctgcgcgaagaggtgcagcacctgacccgccgcctgcagcgcctgcaggagcgccagcgcgacgactcgcggcaggacgctgcgctggacgccgaactgccgccgaacctgccgtga

SEQ ID NO: 318905 - DNA, 222 bp, Pseudomonas aeruginosa
atggccagccatctgttcctgatcagctacatcctcgacgaccagccgatgacctgcgaattgcacagcgaggcggataccctcagccgcgaggaggcccgccgccacttggaggcactgcatcgaccgcacgacgccgaggcgatcagcgatatccaggtcagcaaggtggagcgtacccatgaaccgggcaccacgccgggacactaccagcagccctga

SEQ ID NO: 318906 - DNA, 264 bp, Pseudomonas aeruginosa
atgaacctttcctacctgtacctgaagaagatcctcgaggaggaactgcgcgaccacgactgccagtgccaactgaaccccgacttcacggtgaccatcagttgccgcgtcgacggcccccacggcgcgctctacatcgtgcccaacagcgacttcctgaagagcagcagcttcagcgacctcagcgccttcatcctcaacctgcgcgaggaaatcaggcgcttcggcgagttcgaggcggaactccagaccggcaccggctga

SEQ ID NO: 318907 - DNA, 348 bp, Pseudomonas aeruginosa
atgtccggacccgataccctcagccaggccttcggcaccctgctgctggccctggccttcagcgccttcatcgttttcgttcgcggctaccgcccgggcggggtcagcggcgcctggtacgacctggtgctcgccttcgtcgcggtatggctggcgttctggcccgaagccggcgtactcgcacgctcgccgagcctggccaatgccctggggttggtcttgcaggtcggcgctaccctgctcggctgcctgcttggctacggggtggcaaggggattgcggcgggcgatgcgggaaacccggcaaaaaagatcggcttcttcgccaacgagccggcgaggttcctag

SEQ ID NO: 318908 - DNA, 591 bp, Pseudomonas aeruginosa
atgcgcaatctggaaaccgcaaccctgaagctggggatattccatccccacgacagcctgagccaggcgctgatcgccgccgccttgcagcggcagatcgaagtcagcgccttgcaagccgacctcaacagcctgcaggcgcgccccgggctgcgctgcaagccagccagcctggcgtcgtcgatcgaggtcagccaggcggcggccggtctcgacctgctgttcgcgccgttgtccgactacgccgccgaagccttgccgccgatctgcgccgcgctgatcgatggcgccctgcgcgccgaggtaccgcgcctgttcctgcttggccattggcaatggctggtggcgccgcgcgatgccggcgaggagcaattgggtgccgggctcgagcgcagcctcacggtcagcggcctggactggacgctggtggaggtcccgagcctgcccgccggcctgcgcatcgacgatttcagccgcgccggcgacgtcgcggaagtggaggccgccagggtgttcgcctgcgccgaagcgctgctcgacgaagtccgtctcggcctgcacaagcgccagtgcctgcgcctggcgccctga

SEQ ID NO: 318909 - DNA, 1953 bp, Pseudomonas aeruginosa
atgaaaaccacaagaaaaccgaaagtccccttgaaccaggccacgcgcaaccgcctgctcgacgaagcggtcgacgactacgcgatccacaccctggacagcgctggccgtatcgccagctggagcgccggcgcggcgcgcctgttcggccacgacgcgagcgagatcctcggccgcgactacgcctgctttcatacccgcaaggaccgcgacgccggcgttccgcaacaggcgctgcgccaggcggatgccgagggccgcttcgagaccgagggttggcgggtgcgcagcaacggcaagcgcttctgggcgcaggtggtgatcgacgccatccgcgacagccagggccagttgctcggcttcgcccagctgatccacgacctcagcgaagggcgagcggccaaggaggcgctgcggcgcagccaggagcagttccgcctgctggtgcagagcgttaccgactacgccatctacatgctcgaccaccgcgggcggatcaccaactggaacctcggcgcccagcggatcaagggctacctgccggaagaggtgatcggccggcacttctcctgcttctacacccccgaagaccgcgaggccggcgagccggcccgcggcctggccgccgccgaacgcgaagggcgtttcgagaaggaaggctggcgggtgcgcaaggacggcagtcgcttctgggccaacgtggtgatcgatccgatccgcgacagcgatggccggctgatcggcttcgccaaggtaacccgtgacatcacccaccggatcgaagccgaacgcgaactggaacgggcccgccaggagctgttccaggcccagaagatggagtccctggggcacctcaccggcggcgtggcccacgacttcaacaacctgctgacggtgatcatcggcagcctcgggctgctgaagaaacgcctgcccggcgaccagcgcaccgccgacctcttgcagaacgccctggaggccgcccagcgcggcgccaacctgacccagcggatgctttccttcgcccgcaagcaacgtctcgatccgcagccctgcgcgatccccgacctgttgcgcgggatgaccgacctgctgatccattccctgggaccgagcgtatcgatcgagacgcgctttcccctggatctcgacctcggcctgaccgacgccaaccagctcgaactgtccatcatcaaccttgccaccaacgcccgcgacgccatgcccaacggcgggcgcatcgtcttttccgcgagcaaccagcgggtgccggcggacaatccccatcgcctcgcaccgggcaactatatctgcctgagcatcagcgacaccggcagcggcatggacgaggaaaccctgcgccgtgcggtggaacccttctacaccaccaagggaattgggcgtggcaccgggctgggcctgtcgatcgtcgacggcctcgccgagcagctcggcggccggctcaccctggagagccagccgggcgtcggcaccaccgcgaacatctggatacccgccgtcccgcgaaccccggaaagcgcccgtacgggcaatggcgcgacgccgcaggcgcccagcgaaagcgagcgggtgcgcttgtcctgtcgagtactggtggtggacgacgacccgctggtgttgaacaacaccgcggcgatgctggaggacctcggttgctcggtactcaaggccgactccggcagcctggccctggagattctcacggcgacgccggagctggacatcctcctgaccgaccaggcgatgccacggatgaacggcagccagttggtggagcgggtcatggcccagggccggccgctgaaaatggccctggccaccggcttcgcggaaaagatcgaaggcgcggcggcacagttgcccaagctggccaagccgttcggccaggaagagttgtacctgttcctgaccggcacgctgaaggccggctga

SEQ ID NO: 318910 - DNA, 609 bp, Pseudomonas aeruginosa
atgacccgcgaaatggctcggctactgatcagtccctccaatgcctggcctcgtctgcgccaggactacgaccatcaccctttcgccttcctcgttccgctgttgctattgccgctgctgccggcggcctgcctgttcatcggcactacccaggtcggctggtcgctgccgggcaacgacagcgtgcaacacctctccagcggcagcgccctgctgctggcgacgatgtgttacctgggcttcgtcgccggcgtggtgatcatgggcttcttcgtacgctgggtgctgttccgcacgccgtcgcgccccagcgtaccgggcagcctgaccttcaccacggcgatcgccgtgcccttgatgctcgccgggatcgtcgccctggtgccttggcggatcctcctgctgctggccgcggcggctgcctgcgcctactcggtacgcctgctgttcaccggcctgccgctgttcatgcgcatgcaggagcggcagacattgttctacgccttctgcatcctcggcgtcggcttcctgaccctgctgaccaccgccttcatcttcatcgagttctgggggcaaagcctggccggcagcggcgagtacctgcgctga

SEQ ID NO: 318911 - DNA, 222 bp, Pseudomonas aeruginosa
atgaccacctacgaaatccagcacatgcgcggctggcggcgtttcgcccgcaccgtgcgcgccgccagccgggccgaggcggaacgcctgtgcctgccctgggagtgggtggatgacgaggtcctcgcggtgattccggccgaggccgaggtggccgagcgctggcagcgcctgaacgaggatctggtggaaggcctggagcgcctcaggcgggacgagtga

SEQ ID NO: 318912 - DNA, 951 bp, Pseudomonas aeruginosa
atgcccagcctgcatgatccgcgcctggacgtcctggtcagcctcggcaactggttgcgaggccaggactaccgtttcgtcaccgtcaccccggctacccatgagcgcgtcaacgcccgcccggaaaaccgcatggcccgggacctggccggcatcttcggctggagccgggcattcgccggggaaagcctgccggccgactggctgacccttcttgccggcgccgacctgatccgccgcgaggcggacggctggcgcagccaggtgcgcgtctccagcctcggcgagcaactgttcgtccattcggccttccctaccctggccgccgacgcggtgttcttcggccccgacacctaccgcttcgaccggctgatccgcagccacctggcatcgtccgatccggcacgcatccgccgtgcggcggatatcggctgcggcgccggccccggcgcgatccgcatcgccatggcctgcccggacgccgaagtacacgggctggatatcaatccggcggcgctcgacctggcgcgggtcaacgcggcgctggcgggggtcggtaacctgaccctggcgcgtagcgacctgctgagccaggcgcccggtcgcttcgacctgatcgtggccaacccgccctatctcctggatgcctcggagcgcgcctaccggcatggtggcgggatgctcggcgccgggctctcgctggcaatcgtcgatgccgccctcgagcgcctggaagccggcggcagcctgctgttgtataccggggtggcgatggtcgaaggcggcgatccgttcctcgcccgcatccgcgaacgcctggcgtctcgggagtgggactgggactaccaggaactggacccggacgtgttcgccgaagagttggacagccccgcctaccgcgaagccgagcggatcgccgtggtcggcctgcgggtcactcgtcccgcctga

SEQ ID NO: 318913 - DNA, 1377 bp, Pseudomonas aeruginosa
atgagcctgtcttcgcccctccctgcctccagtgcaagcccttcgcccagggtccgcgacctgtaccacgccctgctcgacgagccccgcgagcacctcgaagccgccggcgagttcctcgaccagcaattgagcctggccgccacccatgacgacgacctgccggaggaccccgccgattggccggcctggctcgacgccggggcccggcgcaccgccgaggcgcatgccgaatacctccgggcacgtcggcgcggcgaagggcgacgctacttccaggttccctcccaggcgatgcacttcattcgcagcgtggccccgaccaagctggtcgacggcgcctggctctatgggctgttgccgcatcatggcgaggaacgcctgcggccgctgctggagaccttcctcgaagaactcggcgacggcgtcccggcacgcaaccacgtcctgctctaccggcgcctgctggccagcatcggcagcgaggaagtcgaaggcctcagcgacctccactacctgcagggcacccagcaactcgccctcggccacctcgccgcggactacctgcccgaagtgatcggctacaacctcggctacgagcaaccgccgctgcacctgttgatcaccactcaggagctgcgcgagctgggcttcgactcctactacttccagttgcacgtgaccatcgacaacgccgccagcgggcatgcgcgcaaggccctgcgcgcgctctacgacaacctgccgcagcttggcgggcgcgcggccttcctcgaacgggtgaggaacggctaccgcctgaacgaggtcggcctgagcactacgcaggtaatcgacggcttcgatctcgaggaagaattgctggccatgttcgagcgcaagcgcccctacgccgccggtatgcattcggatcgttgccggatcggcgggcgcacggtgaaccagtggctggcggtgcccgggcggttcccggcgtttctcgcctgcctggaggaagagggctggatccggcgccatgccgatccgcgcggtagccgcttctggaacctgatcgagggcgaccgggcggcaatgttcggagtcttcactccctacgagcagcagttgctgtacgactggatcgctggcgactggcaagcacccgctccggcggacagggacccgcttgcgccgctggcggagccggcgacggcgggcggagacgtggacgccgagcaggtcgcgctgcggcgcgagctgctgcggctatcccccgagcagggcgtcgcacgccttctcgaactgatggccccgcacctccaccacgggcccgccggtctccttgccacgcggatgttcagccagcgctggagggccgcccatgcccagcctgcatga

SEQ ID NO: 318914 - DNA, 1134 bp, Pseudomonas aeruginosa
atgacccacgacctggccgccagcggccttcgcttcggcatcgaggaagaattcttcctgctcgatgcctccgacctggacatcgtccgctccgcacccgccggattcgtcgcggcctgccgcgacacgctcggcgagcatttcgccgaggagatgttcgaatgccaggtcgaggtggccagcccggtgttctccaccctggccgaggcagcgcgcttccacggtcaggcccggcaacgcctggcgcatctggccatggaattcggcctgcgctcgctctgcgtcggcacccaccccttcgccgactggcggcgggcgcgaagcaacccggcggcgcacttcgcccgcctgttcgaggaccaggggcgggtggcccggcgcagcctggtctgcggcctgcacgtgcatgtggagataccgccgagccacgaccgcatggccgtgctccagcgcgtgttgccgtggctgccgctgctgctggcgttgagcgcatcctcgccgttccgcggcggccggcgcagcggcctggcgagctatcgacgggcgctgtgcggcgagtggccgaggatgaacattcctcctgccttgcccgacgaggacgcctatcgccgccacctggcgctgctgcgcgagaccggctgcatccgcgaggatggccaggtctggtggatgatccggccgtcatcccatgtgccgaccctggagctgcgtatctgcgacgcctgcccgcgcctggccgacgcgctgagcctggccgggctgttcagggcgctggtgggcgaagcgctgggcgcggagccgcgtgcgttgcaggtcgcgcgcgacgcctgcctggaggaaaactactggcaggcgctgcgttacggttgcgccggccgctatctcgtcgaaggccgctgcgtaggtgccggggactggctggaaatggcctggcgacagtgccggccgcaggcccgccagggcaacgaatgggcctaccagcatgcctgcgggttactcgaagagacctccgccgcccgccagttgcggcgttaccggaagttgcgcgaagcgggccaggagcgccatccggcactgcgccggctggtggaggagctgctggaggaaaatctccagccggccttggccggctag

SEQ ID NO: 318915 - DNA, 270 bp, Pseudomonas aeruginosa
atgactacgccccgcatgattgccaacagtttccgaaattacctggctggctacgactgcctggtttccatcagcgatacccatgaagtcaccttgcaattcagcagccatgtcaatccgcaagaaaacatcaccattccaggaatcgccctcgatctcctggccagtgacgaggcggtacgccggatgagcgaagtccttcacgacgagttcgccctgctcctcgccggtgcccgccgtacgccgcggatcgggcgcgcctgttcctga

SEQ ID NO: 318916 - DNA, 285 bp, Pseudomonas aeruginosa
atgaacccaagggtgatcggggcgtgctgcgggcgatcggacccgcaggcgcccctgctcaagaccctgactttcgccatactgcacttcagcatcgccttcggcgtggcctacacgctgaccggctcggtgctgaccggcggcctgatcgcgctgatcgaacccagttgcaacaccgtggcgttctatttccacgagcgtgtctggcagcgcttcggcgcccggccgcgccgggagagcggacacggccacggcaatctggtgccgtcggaacgccgcgactga

SEQ ID NO: 318917 - DNA, 510 bp, Pseudomonas aeruginosa
atgacgagcaaacaggaaaacctgctggactggctgcgcgatgcccacgccatggagcaacaggccgagcagatgctgaaagcgcaagccgcgcggctggaacactatccgcaactgaagacgcggatcgaacagcacatcgaggaaacccatggccagcagcgtctgctcgaggagtgtctgaagcgcctggacagcagtccgtcgacgctgaaggacatcggcgccaagctgatggccttcggccaggcggtggctggcatgacagtcagcgacgaagtggtcaagggcgccatgagcggctatgtgttcgaaaacatggagatcgccgcctacaccgtgctgatcgccgccgcccgcgaggtcggcgacgccgaaacccttgccgcgctggaacgcatcctgccccaggaacaagccatggcggactggttgcgcgaccatctgccggaactcacccaggccttccttgcccgcgactctcagccggacaccgaggccaagcgatga

SEQ ID NO: 318918 - DNA, 885 bp, Pseudomonas aeruginosa
atgttcgtacatgacaagcgactgcagtacaccgtcagggtcgccgcgcccgatcctggcctggccaacctgctgctggagcagttcggcgggccgcagggcgagctggccgccgccgtgcgctatttcacccagggcctcggcgagtgcgatcccggtcgcaaggacctgctgatggacatcgccaccgaggaactcagccacctggaaatcatcggttcgatcgtcggcatgctcaacaagggcgccaaggggcgtctggccgaagcggtggaggaggaggccgagctgtaccgttcgttgaccggaggcggcaacgactcgcatatcacctcgctgctttacggcggcgggcccgccctggtgaactccggtggcgtaccctggagcgcggcctacatcgataccatcggcgagccgaccgcggacctgcgttccaacatcgccgccgaggcgcgtgcgaagatcgtttacgaacgactgatcaacctcaccgacgatcccggcatcaaggatgcgctgaccttcctcatgacccgcgagctggcgcaccagctttccttcgaaaaggccctgcactcgatccagccgaacttcccgcaaggcaagctgcaagggatgccggagttcgcccggcgttacctgaacatgtcgcgcggcgagggcgacacgcgcggttcctggaacgagggtgatggctgggaatacgtggaggcgccacagccggccctggatggaggcgacggcacggccagcgtgaacctgtccgagactgagcaggaggtgttgcagcgaatggcagaccgcacccgctccgaccccatgaccgatccgctgacaggtgcggacctgggcgctggcgcggctgccgacaaagcgccttga

SEQ ID NO: 318919 - DNA, 171 bp, Pseudomonas aeruginosa
atgaccgccaagcgcgaaacacccgagacagaaaacaccccgctgagccccgcctcgccgacgctacgtcccgagcggggcaagcgcgaccaggcgagcgaggcgcaaccggaattcgccccggacgatcccgacgtagcgggccccggcgaagcccgtcgtcccgcctga

SEQ ID NO: 318920 - DNA, 426 bp, Pseudomonas aeruginosa
atgagtttttcccgtttcgcccaacgcctgtccaactgggccggccgcccgccaaccttcgtcgttgccctcggattgatcctgttgtgggcgatcagcgggccgctcttcgacttcaacgatacctggcaactggtgatcaatacctcgaccaccattgtcaccttcctcatggtcttcctcatccagaacacccagaaccgcgataccgacgcgctgcatatcaagatcgacgaactgttgcgcagcacccgacgtgcccacaatgcgctgctcggtctggacgacctggacgccgatacccttcgcgaactgcgtcagcgctaccagcacatgggcgagcaggacggcgagacgccggaaagcgtcgccgccgaggaagagcgccagtgcggatgcggcgaggagcgacggcgcgacgactga

SEQ ID NO: 318921 - DNA, 1167 bp, Pseudomonas aeruginosa
atgcgcgccctcaccttccacggcagccacgatgtccgtatcgatcgggttgccgaaccgcgcctgcaggaacccgacgacctgctgcttcgcgtgaccgccaccgccatctgcggctccgacctacatctctaccggggcaagatcccgatggtcgagcagggcgacatcctcggccacgagttcatgggcgtcgtcgaggaagtcggctcggccgtgaccgcggtgcgtccgggcgaccgggtggtggtgcccttcgtcatcgcctgcggcgagtgcttcttctgccgcctgaacctgcacgccgcctgcgagaccaccaacccggggcgcggcgcgatcctcaacaagaagcagattccgccgggcgcggcgctctatggctacagccacctgtacggcggcgtgccgggtggccaggccgaatacgttcgggtgcccaaggccaacagcgggcctttcgtgattcccgacgtaatggaagacgaacgcgtgctgttcctcagcgacatcctccccaccggctaccaggcggtgcgcaatgccggcgtccgccagggcagtagcgtggcgatctacggcgccggcccggtcggcctgatggccgccgcctgcgcgcggatgttgggcgccgagcggatcttcatcgtcgaccaccatccctaccggctggacttcgccgcgcgcacctacggtgcgattcccatcgacttcgaccaggaggacgatcccgccgcggcgatcatcgagcgcaccgacgggcaccgcggcgtcgacgcggtgatcgacgcggtgggcttcgaggccaagggcagcgtcaccgaaaccgtgctcaccgcgctcaagctcgaagccagcagcggcaaggcactacgccagtgcatcgcggctgtccggcggggtggcacagtgagcgtgccgggcgtgtatgccggcttcatccatggcttcctgttcggcgatgccttcgacaagggcttgaccttcaagatgggccagacccatgtacaggcactgctgccggccttgctcgaacacatcggcaacggcgacctgcatcccgaggcgatcatcagccaccgcctgcgtctggacgacgcaccggagggctacgccctgttcgacgaaaaacgcgaggattgccgcaaggtcgtcctgcgcccatga

SEQ ID NO: 318922 - DNA, 555 bp, Pseudomonas aeruginosa
atgtccaagcagcacatcatccatttcaccgggccgatcaattcgtccacctgcggcaatctgatcaacacttgcgccaaggtcctgcaacaggaggccgaggagttgcggatcaacatcgccaccatgggcggggaatgcagctacggctttaccctgtacaacttcctgcgcgcgctgccggtgccgatacatacccacaacctgggtaccgtcgagtcgatgggcaacatcctgttcctcgccggcgagcgacgcagcgccagtgcccacagcaagttcctgttccatcctttccactggaccctgcatggcgcggtggaccatgcgcggatggcggaatatgcgatgagcctcgactacgacctggagctttacgcccggatcgtcgccgagaacacccgtgatgcgccggaacgcctggacatcccgcgctacctgatggcctatccgcgcatccttggtccggaagacgccctggcttgcggactgatccatacggtggacgattcgcctatacccgctgccgcctgccagtggagtatccattcttag

SEQ ID NO: 318923 - DNA, 345 bp, Pseudomonas aeruginosa
atgaccgacaaacgacaaggcatgagcaccagcgaagccgggcagaaaggcggcgcagctacctccaggagccacggcaaggagttctaccaggagatcggccacaagggtggccaggccagcggcggcaacttcgccaatgacccgcagcgcgccgccgaagccgggcgcaagggtggccagcagagcggaggcaatttcgccaatgacccggaaagagccgccgaggcgggccgcaagggcggccagcagagcggcgggaacttcgccaacgatcgggaaaaggcctccgaggcaggacgcaagggtggccagcacagccacggcggcggacgctcgtcctga

SEQ ID NO: 318924 - DNA, 1137 bp, Pseudomonas aeruginosa
atgcgtatcgacggtcatcgtcaggtggtttctaacgcaacggcacagcccggaccgctactgcgccctgcggatatgcaggcacgggctctacaggacctgttcgatgcgcagggggtgggggttcccgtcgaacatgccttgcgcatgcaggcggtggccaggcagacgaataccgtctttggcattcgcccggttgaaagaatcgtcaccacgctgatcgaagagggtttcccgaccaagggcttctcggtgaaggggaaaagctcgaactggggtccgcaggcggggttcatctgtgtcgaccagcatctcagcaagcgggaagaccgcgacacggcggaaatacgcaagctgaacctggctgtggcgaagggaatggatggcggagcctatacccagaccgacctgcggatctctcggcaacgccttgcggagctggtgcggaatttcggcctggtggcagacggtgtcgggccggttcgcctcctgaccgcgcagggccccagcggcaaacgctatgagttcgaggcccgccaggagccggacggtctctacaggatcagccgcctggggcggtcggaagcggtgcaggtactggccagcccggcttgcgggctggcgatgaccgccgattatgacctcttcctggtagcgccctcgatcgaggcgcatggcagtggtggtctcgatgcaagaaggaataccgcggtcagatacacccccctcggtgcaaaggatcccctgagcgaggacggattctatggcagggaggatatggccaggggaaacatcactccgcgcacgcggcaactggtggacgccctcaatgactgcctgggccggggggagcacagggagatgtttcaccacagcgacgatgcgggcaacccaggctcccatatgggtgacaacttcccggccaccttctaccttccccgggccatggagcatcgggtcggagaagagtccgttcgcttcgacgaggtctgcgtggtggcggatcggaagagcttttccttgctggtcgagtgcatcaagggcaacggctatcacttcaccgcccatcccgactggaacgtgccgctgcggcccagcttccaggaggcgctcgactttttccaacgtaaggtctga

SEQ ID NO: 318925 - DNA, 336 bp, Pseudomonas aeruginosa
atgcgccaagccgatatcggcgccttgctggtcaacgagggcgagcgcctgaccggcgtggtcaccgaccgcgacctggcggtgcgcggcctcgccgatggactcggagccgaccgcccggtgcgcgaggtgatgagcggtgaactgcgctactgcttcgaggacgaggaagtggaccatgtggcgaagaacatggcgcaactggagaagcgccgcttgccggtaatggatcgcaacaagcgcctggtaggcatcgtctcgctggccaacatcgcgacctgcaacgccgacaagctcagcgccaacctcttgcgcggcgtggcccgcgcgcactga

SEQ ID NO: 318926 - DNA, 267 bp, Pseudomonas aeruginosa
atgctgcaatccttccagccgccctggtggaaacgcgcggtgatctaccaggtctacccgcgttcgttcaccgacagcgacggcgacctgcccggcctggtcgcgcgcctggaccacctgcgccgccttggcggcgacgccctctggccgtcaccggtgtatcgctcgcccgaccccggcgctgccgccgcagatcgccaccacccgtcgttccgtcatgtccgactcagtgcgcgcgggccacgccgcgcaagaggttggcgctga

SEQ ID NO: 318927 - DNA, 315 bp, Pseudomonas aeruginosa
atgcaccttcttgaacgtcaacacgatatccagcccctctcgcgggcagacatgaccatccacctcaatggccagcccgtcgcggcggctgccggtgagaccgtgctcaacgtgctcaatgccgtgggcctgcgccggctcgcgcgcaacgaccatggccaggccagcggcgccttctgcggcatgggcgtatgccactgctgcctggtcgccatcgacggccggcccaagcgccgcgcctgccagaccgtcgtccggccgggcatgcgggtggaaaccgaaagcaaccgcttcgaccaggaggaacggccatga

SEQ ID NO: 318928 - DNA, 1395 bp, Pseudomonas aeruginosa
atgaacctgcgcccggtgatcgtcggcggcggctcggccggcatggccgcagccatcgagctggccaggcgcggggtcccctgcgtcctcttcgacgaggcctcgcgtcccggcggggtggtctatcgcggccccttgcgggccggcgtcgatccggcctacctcggcgcgcgctacacccggatgctggaaaaactgcggcgcgatttctccgcctgcgccgggcacatcgacctgcgcctgaacagccgcgtggtcggtggcgacggccagcgcctgatggtcctcgacgaggcggaacggctgcacgaggtggagtattcgcacctgctcctggccaccggctgccatgagcgcagcgtgccgtttcccggctggaccctgcccggggtgatgctcctcggcggcctgcaattgcagatcaagagcggcgtggtgaagcccctgggcgataccctgatcgccggcagcggcccgctgctgccactggtggcctgccagctgcatgcggccggggtacgtgtcgccggggtctacgaggcctgcgcgttcggccgcatggccagggaaagcctggcgctgctgaacaagccgcaactgttcctcgacggcctgagcatgctcggctatctcaagctcaacggcattccgctgcactatggctggggcgtggtggaggccagcggcgagggggaactgacggaagtgacggtagcgccctacgacgaagagtggcggcccgacctggaaaacgcgcgaccggtgaaggccagcaccctggcggtcggctatggcttcatcccgcgcacccagctcagccagcagttgggtctggagcacggcttcagcgacgacggatacctgcgcgcggaatgcaacgtctggcagcagagcagccaaccgcacatccacctggccggcgacatggcgggtatccgcggcggcgaggcggcgatgatcggcgggcgcatcgcggccttgtcgatcctcctgcaacgcgaggccatcgcgcccgccgaggccatcgaacgccgagaatcccatctcgcccgcctggaggcgatcaagcgcttccgcgccggagtcgagcgctacacccagcgcggcgcccgccaggtcgaactggcgcgggccgatacggtgatctgccgctgcgaacaggtcacccgtggcgacatcgagcgcgcgctcgaacagggcgtgcaggacatcgccgggctgaagatgcgcacccgcgccggcatgggcgactgccaggggcggatgtgcatcggctactgcagcgatcgcctgcgccgcgccaccggacgccacgacgtcggctggctgcggccgcgtttcccgatcgatccgatcccgttttccgcattccagaacctcggtacggaagcctga

SEQ ID NO: 318929 - DNA, 1254 bp, Pseudomonas aeruginosa
atgaacagaacctatgacatcgtgattgccggcggcggcgtgatcggcgcgtcctgcgcctaccaactgtccaggcgcggcaacctgcgcatcgccgtggtcgacgacaagcgcccgggcaacgccacccgcgcctcggccggcggcctctgggccatcggcgaatcggtgggactgggctgcggggtgatcttcttccgcatgatgtcctcccgcaaccggcgcgaggcccagggcgcggcggtggcggtggacgcgagcacgccgcacatcctgccgccggcgttcttcgacctcgccctgcaatccaacgcgctgtacccggaactgcaccgagaactgatcgaacgccacgggatggacttcaagttcgagcgcaccgggctgaaatacgtgatccaggacgacgaggatcgccagtacgccgagcacatcgtggcgcagatcccgcatctggccgagcaggtgcgctggctggaccgcgaggaactgcgtcgtgccgagccggcggtcagccacgcggcccacggcgcgctggaattcctctgcgaccaccaggtcagcccgttccgcctggccgacgcctacctggaggcggcgcgccagaacggcgtcgagctgttgccgggaaccaacgtcaccggcgtgctgcgccagggccggcggatcagcggggtgcgcacggacaatgccggggtgctgcattgccggaccctgatcaacgccgccggcgcctgggccgcggaactcagcgaaatggccaccggccggcgcatcccggtgaagccggtgaagggccagatcgtcctcaccgagcgcatgccacgactgctgaacggttgcctgaccaccagcgactgctacatggcgcagaaggacaatggcgagatcctgatcggcagcaccaccgaggacaagggcttcgacgtcagcaacaccttcccggaaatcgccggcctggtgcagggcgcggtgcgttgcgtgccggagctgcaacaggtcaacctcaagcgcacctgggccggcctgcgcccgggctcgccggacgaactgccgattctcggtccggtggctgaagtggagggctacctgaatgcctgcgggcatttccgcaccggcatcctcacgtcggcgatcaccggggtgctgctcgaccggctggtccacgaagagacgctgccgctggacatcgcgccgttcctcgccgcgcgcttccagccggagcctgccgccgtggcggtcgcggcctgctag

SEQ ID NO: 318930 - DNA, 585 bp, Pseudomonas aeruginosa
atgaaaaccagctacgacgacacccgccagcatctgctcgataccggataccggatcatggcggtcaaaggcttctccggagtcggcctcaacgaaatcctgcagaccgcgggcgttcccaagggctcgttctaccattacttcaaatccaaggaacagttcggccaggccctgctggaggactacttccgcgtctacctggcggacatggaccaacgcttctccgcgccagggctgaatgcccgcgaacgactgatgagctactggcagaagtggctggacaacgcctgcccgccctacgacgagcagcgctgcctggtggtcaagctcagcgccgaggtcgcggacctttcggaaagcatgcgcatcaccctgcgcgacggctccgacgggatcatcgaacgcctggtcggctgcctcgggcagggccgcgacgacggctccctcgcgccctgcgatgcccggcacatggccagcgcgctgtaccagttgtggctcggcgcgagcctgctgagcaagctgcaccgcagcccgggaccgctggagacagccatgcagaccacccgcagcctgctggaaatctga

SEQ ID NO: 318931 - DNA, 1038 bp, Pseudomonas aeruginosa
atgtcccaatccacgcaggtcaaccgccgcatcgtcctcgcctcgcgcccccacggcgccccgacccgggataacttccgcatcgagcaggttccgcttcctgagcccggcgcgggccaggtgctgctgcgcaccgtctacctgtcgctcgatccctacatgcgcggacggatgagcgacgcgccgtcctacgcgccgccggtggagctcggcgcggtcatggtcggcggcacggtcagccgggtggaagcctcgaaccatcccgggttcaaggtcggcgactgggtactctcggccaacggctggcaggactacgcgctttccgacggcagcggcctggcgcgcctgggcgagtcgccggagcatccgtcctacgccctgggcctgctcggcatgcccggcttcaccgcctacatgggcctgctcgacatcggcaagccccaggccggcgagaccctggtggtggccgccgccaccgggccggtcggcgccaccgtcggacagatcggcaagctcaagggctgccgggtggtcggcgtcgccggcggtgcggaaaaatgccgccacgccgtgcaggtgctcggcttcgatgcctgcctcgaccaccatgccgcggacttcgccgaacgactggccgaggcctgcccggacggcatcgacatctattacgagaacgtcggcggcaaggtcttcgacgccgtcttcccgctgctcaacgccaaggcccggatcccggtctgcggcatcgtcgcccactacaacgacaccgagctgccacccgggccggaccgcttgccggcgctgatgggcacgatcctgcgcaagcgcatcaaggtgcagggcttcatcatcttcgacgactacggccatcgctacgatgaattccagcgcgacatgtcgaagtggttcgccgacggcctcatccagtaccgcgaagagcgggtcgacggcctggagaatgcccccgaggccttcttcggcctgctccagggacgcaatttcggcaagctggtggtgcgcgtcggagccgacgcatga

SEQ ID NO: 318932 - DNA, 345 bp, Pseudomonas aeruginosa
atgaaccaggcggtccgtgtggtagcgctgttgcaggcgcgcgagggcagggcggcggaggtcgagcggctgctgctggcctgcgtgcagccgtcgcgggccgaggacggctgcctgtcctatgtcctgcaccggagcctcgacgaggccgggcgcttcgtcttcgtcgagcgctgggccgaccgcgacgccatcgagcggcaccgacggatgccgcactacagggcgatggccgatgccgtcgccgatctcctggcggaccgccaggtgttcctcctcgaggaactgccagcggccagcctgtctccggtagatccggaacctacaagaccccacgaggagtga

SEQ ID NO: 318933 - DNA, 876 bp, Pseudomonas aeruginosa
atgaaagtcggatttctgggcctgggcggcatgggcgccgccatggccacccgcctggtgcaggcggggctcgaagtgacggtgtggaaccgttccgcggcggcctgcgagcccctggtggcactgggcgctgccagggcggaggaggtcggcgagctgttcggcctcgacgtggtcatcagcatgctggcggacgaccaggcgattcgcggcgtgctgctcgacagcggcgcgctcgaacgggcgaggccgggtctcatccacctgagcatgtcgaccctgtcgctcgattgcgtcgaggcgctcgaccaggcgcaccagcgccagggcatcgcgttcgtcgccgcgccggtgttcggccgcaccgacgtggccgaggccggcaagctgaacatcgtcgtcggcggtccggaggaagccatcgagcaagtcaaggcgctgctggaaattatgggacagaagacatggtttttcggaaaagacccgcgcggggcaatggcggtgaagatctctggtaacttcatgatcgccagcgccatcgaaagcatgggcgaaagcgtcgccctggtgaagcgcctgggcgtcgagcccggccggttcatggaactcatgtcctcgacgcttttcgatgcgcctgtctatcgcaactacggcccgcagatcgtcgagcagcgttttaccccggccaggttccgcctggtcctcgggttgaaggatgtcgacctggcgctgtccgccggcaagcgccacaacgtgccgctgccgctggccagcctgttgcacgacgtgttgctcgaagccatcgcccatggcgacggggagtcggactggacggcgctggcgaaggtagcgttgtcgagatcgggacaaatctga

SEQ ID NO: 318934 - DNA, 1596 bp, Pseudomonas aeruginosa
atgtccgagcgtggaacggctgcagaaggccggatcaactggcgacgcatcctgccgatactgctcaccaccaccctggtgggcggtgtctgtgggatcttcgtcatcaacgaactggatcgccagcacgacggcgcgcacctgcgctcgtacaccgagagggcgctggagcgggcactggagatttccttcgcggcggaccagatgctccgcgagatgaacgccggcagcgcgccggcctgcagcgaccaggacctggaaatgctgcgttccatcgtgctcgagtcgcgcttcatgagcgacgttggcaggatcagcggcgaccgggtcatgtgcacgggcgtccggggccggctgcgcgcgccctggggattgtccgcgcccgaccgggtagatgccgccggcacccgcttctggacagagggcatgcccctgccgttgcaggcgctgcccaccggactggtcagtcgcggcaacgccgtcgtattcattgccccgcacgcctatttcgatgtcgaccacccggacccgggcatctcggcggcggccgtcagcagtggcggcgactacatctaccaccgtttcgcctgggacgacgaccagcccctcgaggcgctcggccggcccggctggccgcgcttcatcggcgcccggcagataagcctgtgcgacccgacgcaggacatctgcgtggtctcccttctccgcgaacgcggcctgcttggcaccgagcccggacgcgcggccatggccgcggcgatcggcggcgggctgttgttcggcgtcatgctgctgctcagctacctgttcggcttcctcaacgacgaaaaactgccggccaggctgctgcgcgcgttgaagcgcgaggccctggaggtgcactaccagcccatcgtgcgcctggccagcggccgctgcgccggggtcgaggccctggcgcgctggaccgatagcagcctggggcgggtttccccggatgtcttcatcggcgccctggaggagagcggcgacatcgaactgctgacccgtttcgtcttccgccgcgccctgaagcagctcgggccgttgctgagggagcagcggagcttctacgtcagcgtcaacgtcaccggcaaggacatcgccgaccccggtttcatcgatttcgccatgcgccagatggccagggaaagcgtgcgcccggaacaggtcgcgctggaactgaccgagcgcaccaccgaggcccagggctgcctgctggccgggatgaaccgcctgcgcgaactcggcctgaagatctacgtggacgatttcggcaccggtcattcgaacctggtctacctggccaacctgccggtagacgcgatcaagatcgacaaggtcttcactcagtccatcggcgacagcagcgccgtcgaactgatcttcgacaagctctgctcgatggccgagcacctggagatcggcgtggtcgtcgaagggatcgagacacaggcccaggccgaccacgtgctgcgccgctcgcccgaggccctcggccagggctggcatttcggcaaggcactgccgctggaggccttcctcgactactaccggaaccagccggcgggccgctag

SEQ ID NO: 318935 - DNA, 885 bp, Pseudomonas aeruginosa
atgcacgcattccccctcaccctggacaaccgactcgccgaagccctgccgctatggcgcaacctggcccgcaccgaccgggcgccgcgaaggaacatcgacctcgccgactggaaagccgactggcgcgaactgatcgccgcgctcgacaggttttcccggagccacggctatcgccagccgttcgccgcgcaagggcacgcagccctggaaaacgcctgggcctggggccaggccgcggaaaacgccagtacgctgctgctcaaggccatcgaccggggcctggccggcgccgaactgcgctccatctacctggagaccgccgcgctgtggctggactacagccggctgctcggcgccgcccgcgacagcctgcgcgagcagggcgaggtcgacttcgagacggcgccggccctggcgccgcgcacaggccagtatccgttcgcgctgcaactgctcgccatgggcgtgctgctcgacgcccaggagctcatcccggcgctggtcgaggaggtcctgcagttcgataccgaccgcctgctcgactatctcggcgcggccgccctcggcctgacttccgccagcgaggaaaccttccatccacggccgttcgggcagttgcgggcgttcttcgaagaggcggacggcagcgacgcccaggcgctggcgccttacctgcaaagccagtaccgggagttcttccagctttcccccaaggcgcagaagaagacccgccgcctgaccggcccctacgcctggggctggtgggccatggaggtgtcggcgctgggcgtgctctacggctgggacgatggcgtcctgcgcgcctcgccgcattacctcggcgacctggtcgactacgcgcgggcgcgcggcgacgcctga

SEQ ID NO: 318936 - DNA, 678 bp, Pseudomonas aeruginosa
atggatttctcggtcatctcggacaacctgtcctacctgctgctcggcgcctacccggacggcccgctcggcggagcggcgctgaccctgctgctggcgtcgctctccggactggcttcggcggtgctcggcctggtcctcggcgtggccctcgcggtgctgcccggcaagccgcgcctgctgctggtggcgctgctcggcttcttccgcgcgatcccggtgctgatgctgatcttctggacctacttcctgctgccgatcgtcttccatgtcgacgtaccggcgctggccaccgtggtctgcgcgctgtcgctgatcggcggcgcctacctcgcccactcggtgtacgccggcatccacagcctccccgccgggcagtgggcggccgcccgcgcgctcggactgcggccgtggcaggtattgcgcctggtgatcctgccgcaggcgctgccggtgatgctgccatccttcctcaaccagtgggtgtcgctgatcaaggacacttccctggcctacgtgatcggcgtcggcgagctgtccttcgtcgccacccaggtgagcaaccgggtgatggtccacccgacggagatcttcctgttcgtcgccctgctctacttcctgctctgcaccagcctcgacctggccgccgcgttcctcgcccgccgccggcgggcctga

SEQ ID NO: 318937 - DNA, 717 bp, Pseudomonas aeruginosa
atgttcggcgaacttctcgccccgcagtacctgcgctggttgctcgacggcttcctgctgaccctcggtcttgccctgctcagttgcctgctcgccaccctgatcggcgcccccctggccatcgcccggctgtcgcgccggcgcctgctgtcctggccggcgcgcgcctacctggcgctgttccgcaataccccgctgctggtgcagctgttcttctggtacttcggcgttcccgcgctgctgccggaggcgctggtgagctggctgaacacgccgcacgagacgcccttgctcgactggccgtccttcgagttcctcgccggtgcctgggggctgaccctctatacctcggctttcgtcgccgaggagttccgcgccggcatcgcctcggtacgccccgagcagcgcgccgccggcctcgccctggggctgacccagcgccaggtatggcgcgtggtggtgctgccgcaggccctgcgcacggctctgccgccgctgctcgggcagtacatgaatgcgctgaagaactcctcgctggcgatggccatcggcctggccgagctgtcctacgcttcgcgccaggtggaaaccgagaccttcaagaccttccaggccttcggtatcgccacccttctctacatcggcgccatcgccctgatcgaagctttcggccaggcgttgcagcagacccgccgctaccgccagggaggtgcctga

SEQ ID NO: 318938 - DNA, 807 bp, Pseudomonas aeruginosa
atgaagaaactccccgccatcaccgccctcgccctcgccctgatctccggcctggcccaggccgaccgcctggaggacatccgcaaggccggcgtattgcgcgtcgcgtccttcgacagcaacccgccgttcggcttcgtcgacgccaagagcaagcagatcgaaggcctcgacgtcgactatgccaaggccctggccgacaagctgggcgtccggctgcaagtgctgccgaccaacccggccaaccgcatcccgctgctgacggcgaacaaggtcgacctggtcctggccaacttcaccatcaccccggagcgtgcgcagcaggtggacttcagcatcccctacttctcctccggccagcagttcatcgtcaagaaaggcaccctgacctcgccggaagtcctcaacaagtggcgggtcggcgtggacaagggcacggtcaacgaaggcgtgctgcgcgagaagttccccggcgccaaggtcatcgcctacgacgacacgcccttcgctttcaccgccctgcgcaacggccaggtccaggccatcacccaggacggtccgaagctgatcggcctgctggccaacgtgcccgaccgcgacaagtacgaagtgccgcccttcaccatttccaacgacctgatcggcgtcggtattcccaagggcgagaaggccctgaccgagttcgtcgacaagagcctgcgcgagctggagcaggacggccaggcgcagaagatctacgacacctggttcggtccgcagaccaagaccccgctggcgcgcctgtacaagatcggcgacaagagctga

SEQ ID NO: 318939 - DNA, 477 bp, Pseudomonas aeruginosa
atgccctcgatcaagcccttcggtctcgccctgctcgtcctcggtctcagcgcctgcgcctccctcggtcagtcggggaatcgcgacaacgaggtcaaggtcgccgcgcagaagctcatcggccagcccgccggcaaggccttcgaactgttcggcaagcccgaccagggcctcggcccttcgtcctacggtagcggcggcttctacgcctggaaccgcgtgcggacccacatggggccggacaaggtcttcatacagaccggcaccgagtacgtcggccagcgcgagacctgggtcggcgtcggtggccagggggtcgccggcatggcgccggtgagtagcgaggcggtctatcgcaagaccggctactacgagaacgagaccatcctcgactatttctgcagcatcaccctgtacaccgacagccgggacatcatcaccaacgccagcgtgatcgactgccgggacagccgctga

SEQ ID NO: 318940 - DNA, 948 bp, Pseudomonas aeruginosa
atgtcccggattcccgacgccagcatcatccacagccgcctgcgcctgcgccagttgcgcctgatgctggccctggaggaactcggctcgctgcgccgcgccgccgacgagatcggcatgacccagccggcggcgaccaagatgctccacgaggccgaagacctgctcggcgtcgagttgttcgagcgtttgccgcgcggcatgcgcgcgacgcctttcggcgagacgctgatctattactcgcggatgatcttcgccgagctgtccgggatgcgcgaggaactggtcgcgctggagtccggcaacctcggccgggtcaccgtcggagcgatcccggcgctggcctcgagcctgctgacgcgcaccatcgccaccctgaagcagagtcatccacggctgtcgatgagcatccaggtggacaccagcgacgtgctggtccaggccctgcaacaggaccagctggacgtggtgctcggacgcatccccagcggcgcgcgcaccgacgacctggtgttcgacagcctcggcgaggaagaactctgcgtggtggtcggcgcgcagaacccgttgtcgcaggcacgcaagctggactggggcgagttgcaggagctgacctgggtgttgcagcagcaccccagcccgatgcgcgggatcgtcaaccaggccttccacaatgcgcgcatcgacctgccgagcagtatcgtcgagaccacctcgatcatgaccctgctctccctgctgcaacagaccgacatgatcggcatcactccacgctcggtgatcgaggactacccgggcaagcacctgctggcgatcctgccgatccagctggagccgcgcctgccgccctacggcctgatcacccgacgcaaccgggtccactcctcggccatgcagaccttcatggccagcgtacatgccgaacaggcgcggcacctggcgaagtga

SEQ ID NO: 318941 - DNA, 1521 bp, Pseudomonas aeruginosa
atgagcgaattcgattccctgatgcagggcatgagcctggtcctcagcgcccatcacctcggcctgatggtgatcggcgtgctgctcggcatcctggtcggcgtgctgccgggcctcggtgcgccgaacggggtggcgctgctgctgccgctgaccttcagcatgtcgccggtgtcggcgatcatcctgctttcctgcatgtactggggcgcgttgttcggcggctcgatcacctcgatcctgttcaacatccccggcgagccgtcgtcggtggccaccaccttcgacggttacccgatggcgcgcaacggccaggccggcgaagcgctgaccgccgccttcacctcggcgctcctcggggcgctggtcggcgtgctgctgctgaccttcctgtccacccatatcgctcgcttcgccctggcgttcagctcgcccgagttcttcgccgtctacctgctggcgttctgcaccttcatcggcatgagccgcaacccgccattgaagaccctggtggcgatgaccatcggtttcgccatggccgccgtgggcatggataccgtgtccggcgacctgcgcctgaccttcgaccagccctggctgctttccgggctgagtttcgaggtggcggtgatcggcctgttcggcatcggcgagatcctctgcacggtggaggaaggcctggtgtttcgcggcgagcgcgcacgcatcacgccgatggtgatcctgcgtacctgggccaggctgccgcgctactggctgacctggctgcgcagcgcgctggtcggctgctggatgggcgtcactccgggcggccccaccgccgcctcgttcatgagctacagcctggcgcggcgcttctcgaagaaccgcgagaacttcggcaacggcgaggtggaaggcgtgatcgctccggagacagccgaccatagcgccggcaccagcgccctgctgccgatgctgacgctcggcatccccggctcggcgaccgccgcggtgatgctcggtggcctgatgatctgggggctgcatcccgggccgacgctgttcgtcgaacagcacgacttcgtctggggcctgatcgccagcatgtacctgggcaacgtggtcagcctgatcgtggtactggcgaccgtgccgctgttcgcctcgatcctgcggattccgttcgccatcgtcgcaccgatcatcgtcatggtctgcgccatcggcgcctactcggtgcacaacgccatgctcgacgtggtcctgatgctgctgttcggcgcgctcggctacctgttcaagaaactcggctaccccatcgccccgctggtgctcgccgcggtgctcggcgacaaggccgaggacgcgttccgccagtcgatgctgttctccgacgggcaactctcggtgttctggtccaacccgctggtggccagcctgaccggcgcggcgctggcgatgctgctctggccgttgctggcgcggtgcgccggggcgctgttccggcgtggccggcggagtctccggcatgccgcctga

SEQ ID NO: 318942 - DNA, 531 bp, Pseudomonas aeruginosa
atgtccagctcatccgatgcgccgctggtcgccacccgctgggtggagatcggcctggcgctgttcaccgccgcgctcggcgcgatcgtcatgtacggcagccaggatatcggcatcggctggggcgacagcggccccgaggccggctatttccccttctacatcggcctgctgctgagcgccgccagcctcggcaacctgctcttggccctgtgccgctggcgggcgctgggtacctcgttcgtcgcccgcacggcctttcgccgggtgcttgcggtgttcctgccgatcgccgcctacgtggcggccatgccgttcgccgggatctacctcgcctccgcgttgttcatcgcctggttcatgtggcgcgaccgtagccgcgacaaaccctacggcgtgccgctgatcgtcacgctgtcctgcggcgcggcgctggccagctacctggtcttcgccgtctggttcaaggtgccgctggatgccggaatactggtcgacctcgcggccttcgtcgggagcgccaggccatga

SEQ ID NO: 318943 - DNA, 1014 bp, Pseudomonas aeruginosa
atgcgtaccgcatatgcgcgctccgtcccctccttcctggccgcttgcgccctgctctgctgcaccaccctgcccgccctggcggctgcctggaaacccgaagagaacctggagatcgtcgtcgccggcggtcccggtggcggcaccgaccaactcgcccgcctggtccagtcggcgatcagccagaacaagctgctcgacgtcaacactgtggtgctgaacaagggcggcggcaacggcgccgaagccttcctcgacctgaagctggccaagggcaacgcgcacaagctggtgatcggcaccaacaatgtctacctgctgccgctggtggcccggctgggctaccaatggaccgacctgacgccggtggcggcggtggccgaggacgacttcatcctctggacctaccaggcggcgccgtgggcggacgccgcggcgttcctcgccgatctgaagaaggacgcgacaggcatgcgcttcggcggcagccagtcgaaggacgtcgaccagactctaagcctgctgctcggcaagcaggtcggcggcaagctgacctacatccccttcaagagcggcagcgaggcgtccatccagttggccggcaggcacatcgccgccaacctcaacaacccggcggaaagcctcagccagtggcgcggcggccaggtccggccgctctgcgtgttcagccacgagcgcatgatctacaccgccaaggtcgctgccgagcagtcctgggcggacatccccacctgccacgagcagggcctgggcatcgaccagtaccgcttcccgcgcaccgtgttcctgcccggcggagtcagcgacgagcagcgcgccttctacgtcgagttgatgcgcaaggtcagccagaccgccgagttcagggactatgtcgaacgctcggcgctggcgccgaccttcctcgctggcgaggacctggtgagctacatcgagaaggaccgccagcgcgtcatcccgctgttccaggaagccggctggcttcgccagtaa

SEQ ID NO: 318944 - DNA, 1326 bp, Pseudomonas aeruginosa
atggctcaggcacagaccgccgtgctccaggctgatcctgcccaggacaaggccactgccgcaaaacccagcaacgtccgctggcgcatcttcgccatcgtcttcgccctgacggtgatcaacctggtcgaccgggtctcgctgtccatcgccatgcccaccatcgccggtgaattccagctcacgccgagcatgcaggggctgatcttcagcagcttcttctgggcctacgcgctgttgcagattcccggcggctggctgatcgaccgctacggcccgcgccgggtgatcggctggtccaccggcctctggggagccttccagaccctcgcggccttcgccagcggcggcctgtcgctgatgttcgcccgggtcgccctgggcgcggcggaagcgccgctgttcccctccggcggcaagctcaactcgctgtggctgggctccagcgaacgcagccgcggcgccgtgctgatggactgcggagggccgctgggcgtcgctctcggcggactggtcatcgcctacctgatcgccgtgctcggctcctggcgcagcgccttcttcatcgccggcatcgccaccctggccatggcctggctggcctggcactacctgcgcgacgacccggccgagcatcccggggtcaacgccgccgagctggaccggatcaacgccgaccgcaccaccccgctcgccgaagcggactgccaggccggcggaagactgggcatcgccggccgctccctggtcggtatcgtcctcggccgcgccagttgggccatggtgttcttcggcctgctgacctggggtcctagctacctggcgcaggcgcgcggcttcgatatcaagggtatcggcgccgcgaccttcgtcatcttcctctgcggagccgtcggttccctggtcggcggcttcctctgcgacctgctgatccgcaagggcgtgcgccgcagcctggcggccaagggcctgctgacggtctcgggcctcgcggcgctggtcgccttcctgctgttgccgagcctggaagatgcctatgccgccgtgaccctgctggcgctgaccgccttcttcctgatgtggggcagcctgtactggagctttccggccttgctcgccgctccggcccgggtcggcctggtcggcggggtgatgaacatggccggcagcctcggcggcatcgccgtgccgatcctggtcgggctgctgctgcaacacctgggcggatatgccgcggtgctgggcttcttcgccctctgctcggcagccttcatcgccggcaccctgctgatttccctggacaagaccgaggcaaagcatggctga

SEQ ID NO: 318945 - DNA, 960 bp, Pseudomonas aeruginosa
atggctgagctgtacgacgggccgatcgtcgacgcccatcatcatttctgggacccgcaggcgaactaccacccctggctcgcggaggacgccaagattccgttccgctacggcgactacagcgcgatcaagcgccgctacctgccggcggactacttcggcgacgtcggcgcacaccgggtggtcgagacggtctacgtggaaaccgagtgggacccgcgcgatccgctcggcgaaacccgcttcgtgcatcacctcgccgaacgccatggcgcgccccacgcagtggtggcgcaggcctggctggacgcgccggacgccgccgaggtgctggcggcgcaggcgggcttcgcacgggtccgcagcgtccgccacaagcccggcggtccgcaacgcccgcaacaggtcggcgagctgcgcagcctgatgagcgacgagcgctggcgtcgcggctatgccgagctggcccggcacggcctgcacttcgacctgcagacaccctggtggaacctcgccgaggccgcatgcctggcgcgcgacttccccgatacgctgatcgtgctcaaccacgccggcctgccgtccgatcgcagcgaggaggggctggccgcctggcaacgggccatggcgcgcttcgccgaatgccccaacgtggcgttgaagatctccggcattggccaggccggccggcgctggagcgtcgaggacaacgcctggatcgtccgcgaaagcatcgccctgttcggcgtcgagcgggcgatgttcgccagcaacttcccggtggacagcctgtgcggctcgttcgacgacatctatggcggtttcaaacgcatcgtcgccgacctgccgtacgccgaccaggaacggcttttccatagcaacgcgcggcgcatctaccgcaccgtacccgacaccgtgcgcctgcagcaggcgtcgcccgacccgaggacttccccatga

SEQ ID NO: 318946 - DNA, 1014 bp, Pseudomonas aeruginosa
atgaacgctccatccctaccgcgactggccatggtcctgggcgatccggccggcatcggcccggaactgatcgcccgcctgctggccgacaccgaggtgcgcgagaaggcgcacatcgtgctgatcgccgacgaagcggaaatgcgccgcggcatgcgcatcgccggctgcgaattcccctaccggcgcatcgacgcgctggagaccctggatttcgccgacgccacgccactgctgcatccctggctcagccagggcggggacgagttcccacgcagcgaagcgagcgccgtcggtggccgctacagcctggagaccctcgcgctggccctcgaactgacccgcagcggcaggaccgacgcgatcctcttcggcccgctgaacaagacctcgctgcacatggccggcatggaccacagcgacgagttgcactggttcgccgagcgcctggggttcggcggcccgttctgcgagttcaacgtcctcgacgacctctggacctcgcgggtgacctcccacgtagccctggccgaggtgccgggcctgctcagccaggagcgggtaggggaggcgatccgcctgatcgacgacgcgctgcgccgcagcggcctggcgcggccgcgcatcggcgtctgcggactgaacccgcacaacggcgacaacggcagcttcggccgcgaggagctggacatcatcgctccggcggtgcagaaggcgcgcgaacaggggatcgccgccgacggcccgtatcccgccgacaccattttcctcaaggtgcagggtgacgcccgtgccttcgacgcggtggtgaccatgtaccacgaccaagggcagatcgcgatcaagctgatgggcttctcccgcggcgtgaccgtccagggcggcctgccgatccccatcgctacgccggcccacggtaccgccttcgatatcgccgggcagggaagggccgacgtcggcgccacccgccaggcgttcgagatcgcctgccggatgggcaggcgcaaagcctga

SEQ ID NO: 318947 - DNA, 1251 bp, Pseudomonas aeruginosa
atgacccgttccgctccgaacctgctgaaatccgcctcgctcgccccggtcctgctggccggcctgccgtcgctcgccggcgccgagggctttatcgaagacgccagcgtcagcctcggcctgcgcaatctctatttcaatcgcgacttccgccagcccggcgcggcgcagtcgaaacaggaggagtgggcccaaggctttctcctacaggcgaagtccggctatacccagggcaccctgggcctcggcgtcgagctgatcggccagctcggcctgaagctcgacagcagccctgatcgtgctggctccgggctgctgccacgccacgccgacggacgcgcagcggacgactacgcgcgactgggcgtggcgccgaagctgaagctgtcgaataccgagctgaagctcggcgaactgctgccggaactgccaatcctcctgcgcaacgacggccgcctgctgccacagaccttccagggcggcatgctgacctccagggaaatcgccggcctgaccctgcacggcgggcagatgcgttcgctcagccagcgcaactccagcgaccaccaggacctctcggtggatgggcgcggcggggcgttctccgaccgtttcgactacctgggcgcggagtaccgcttcaatgccgagcgcagccaggtcgggctgtggcaggcgcgactgcaagacatctaccggcaggactactacagcttgagccacaagcagagcttcggcggctggcgcctgggcgccagcgtcgggctcttcgacacgcgcgacgaaggtgccgcgaagctcggtgaactggagaatcgcgcgctgaccggtttcttcagcgcgacccgcggcggccacagcctcggcgcaggctaccagcgcatgtacggcgacgacgggatgctctacatcgccggcaccagcaccccgttggtcaacgacatccaggtgcgcaacttcaccagcgccggcgagcgctcctggcaactgcgctacgactacgacttcgtcgccctgggcattcccgggctgaccgccatggcccgctacgccagcggcgcccatgcccggacgaaggcgatggacgacggccgcgcctgggaacgcgacgtggacgtcgcctacgtgatccagagcggcccgctgaagaacctcggcctgcgttggcgcaacgccatgctgcggtccaaccatgccgccgatgtcgacgagaaccgcctgatcctctcgtattccctgccgctgctctga

SEQ ID NO: 318948 - DNA, 1323 bp, Pseudomonas aeruginosa
atgagcgccatgaacgaccacgccaggctgctgtcctcggcgatcgccaccagccgcctgcggctcctgcctttcctggtcctgatgtatgtactggctttcatcgaccgggccaacgtcggctacgcgcgggccttcctgcaagccgacaccggcctcggcgatgccgccttcgcgttcggcgcaagcatcttcttcatcggctacgcctgcttcgaggtgcccagcaacctgatgctgcaccgcctcggcgccagggtctggctgtgcaggatcatggtcacctggggcctggtctcggcggcgatgatgttcgccgacgatgccatgactttctatgtcctgcgcttcctgctgggcgtcgccgaggcgggcttcttccccggcatcatcctctacctcacctactggttcccgcagcgcagccgtgcccaggcgctcggcctgttctatttcggcctgccgctggcgctggtgctgggcggtccgctgtccggctggctgctggagttccacggcatcttcggcctggccaactggcagtggctgttcgtcaccgagggcctgctggcctcgctggtcggcattgccgcctacttctacctggtcgaccgcccgcgcgatgccggctggctgagcgacgagcagaagcgggcgctggaaggcgagctggccgaagaagacacccgcaaacaggcacgcggcccgcacggcttcctcagcgccctgcgcagcggccaggtgctgaagttctgcctggtctacttcaccatccagatgagcgtgtacggcgtggtgttctacctgccgacccgcatcgccagcttcctcgacggccaggtcggcctgaacgtcggcctgatcaccgcgattccctgggtctgcgccctggtggtaacgcgcctggtgacccgccaggccgaccgcagcggccagcatcgccagctcgcggtggccatgctgggcatggccgcagccggtatcgccgcctcggcgctggccggcaacctgggcctggcggtgatcgccttctgcttcgccgcgtccggcttcgtctcggtgcagccgctgttctggacccttcccaccggctacctgagcggtgcagccgcggccagcggcatcgccctgatcaactccctgggcaacctcggcggcttcgtcgcgccgaacctcaagaccctcatggaaagccagttcgccgacccgcgcgccggcatgttcgccctggccgccgtcggcctgctcggcgcctgcctgctggcccggctgaagacctccggatcgtcgtccgtcccgctgcgagcgcggcaggccggctga

SEQ ID NO: 318949 - DNA, 996 bp, Pseudomonas aeruginosa
atgcggctgattcaattcgaggaccgggcagggcagcgccgggtcggcgtcgtcgaaggcgccgggatacaggtgctgcgcggcgtgcgcagcacgcgcgaactggggctggcggcgattcgcgcgggcagcggcctgcacgacgaggtgctgcgccgaggcagcgagccaggcccggactatgccgggttgctggaggagggaagggtgctgccgccgctggatcatgacgacccggcccattgcctggtcagcggcaccggcctgacccacctgggcagcgccgcgacgcgcgaccgcatgcaccagcagaaccagggcgacgagaccgcgctgaccgacaccatgcgcatcttcaggtggggcctggagggcggcaagccaccggcgggccaggtcggcgcgcagcccgaatggttctacaagggcgacggcggcatcgtcgtgcgccccggcgcggacttcccgctaccggccttcgccgaggacgccggcgaggaaccggagctggtcgggctctacctgatcggcgatgaccgccggccttaccggctcggctacgccctgggcaacgagttctccgaccacctgatggagcgccgcaactacctgtacctggcgcattccaagctacgcgcctgctgctacgggccggagctgcgggtcggcgaactgccgcgccacctgcagggcgagagccggatcctgcgcgacggcgaagtgctctggcagcaggcgttcctttccggcgaggacaacatgtgccacagcctggagaacctcgagtaccaccatttcaagtacgcgcagttcctccgtccgggcgacgtccacgtgcattacttcggtaccgccacgctgtccttcgccgacgggatcaaggctgctccgggggatgtcttcgagatctccatggccgagttcggcgcgccgctgcgcaatggcatcgccgccgtcgagaccgcactgacgccggggcgggtggtagcgctctga

SEQ ID NO: 318950 - DNA, 1584 bp, Pseudomonas aeruginosa
atgacagccatcctcggacacaacttcatcggcggcgcccgcagcgcggccggcacgctcttcctgcaaagcctcgacgccgccagcggtgaggcgctgccgtaccgcttcgtgcaagccaccccggaagaagtggacgccgccgccgaagccgccgccagcgcctacccgcactaccggcaactgccggccagccgccgcgcggaattcctcgataccatcgccgccgaactcgacgcgctggacgacgatttcgccgccatcgtctgccgtgaaaccgcgctaccggccacgcgcatccagggagaacgcagccgcaccagcggccagctgcgcctgttcgccgaagtcctgcggcgcggcgacttccatggcgcgcgcatcgaccgcgcccggcccgaacgcaagccgctgccacgcgtcgacctgcgccagtgccgaatcggcctcggcccggtggcggtgttcggcgcgagcaacttccccctggcgttctccaccgccggcggcgataccgccgcggccctggccgccggctgcccggtggtgttcaaggcgcacagcggacacatggccaccgccgaacgggtcgctgcggcgatcctccgcgcggccgagcgcaccggcatgccggcgggcgtgttcaacatgatctacggcggcggagtaggggagcggctggtacgccaccccgcgatccaggcggtcggcttcaccggttcgctgaagggcggccgcgccctctgcgacatggcggccgcccgggcgcagccgatcccggtgttcgccgagatgagcagcatcaacccggtggtgctgctgccggcggcgctgaagaagcgcggcgaggccgtggccgacgaactgagtgcctcggtggtgctcggctgcggccagttctgtaccaatcccgggctggtcatcggcatccgctctgcgcaattctcggcgttcctcgaacgcttcgccgcccgcatggacgaccagccggcgcagaccatgctcaacgccggcacgctggccagctatgaaaaaggcctggcggcgctgcacgcccacccgcgcgtccgccatctcgccggccaaccgcaggagggccgccaggcccggccgcaactgttccaggcggacgtcagcctgctgctggagggcgacgagttgctgcaggaagaagtcttcggcccggccagcgtggtcgtcgaggtcgccgaccacgccgaactgaaacgcgcgctgcatgggctgcacgggcagctcaccgcgaccctgatcgccgaagcggaagacctggcgtccttcgccgacctggtaccgctcctggaacagaaggcaggacgcctgctgctcaacggctacccgaccggcgtagaagtctgcgacgcgatggtccacggcggcccgtacccggccacttcggacgcccgcggcacctcggtgggcaccctggccatcgaccgtttcctgcgcccggtgtgctaccagaactacccggacgcgtggctgccggaagcgctgaaggatggcaacccattggggattgcgcggttggtggacggggttgggacgcgggcggcgattgactga

SEQ ID NO: 318951 - DNA, 621 bp, Pseudomonas aeruginosa
atgcgtgcgatcgatgccggcattctggtctgcggcgagtgccatcagttgaatcgcgccgacgggaacgagcatccgcgttgcagtcgctgcggcgcgaagctgcatcctcggcggccgaacagcattgcccgtacctgggcgttgctgatctcggcgatgattctctacgttcccgccaacctgttgccgatcatgaccgtcaacatgctcggcaagggctccccggcgaccatcatgggcggggtcgtgaccctgatccaggccgacatgtttcccatcgccctggtggtgttcgtcgccagtatcgtcgtccccaccttcaagctggtcggcatcgccctgctgctctattcggtgcagcggcaccagccgatgtcggcccgccagcgaatcatgatgtaccgcttcatcgaatgggtcgggcgctggtcgatgctcgatatcttcgtcatcgccatcctcgtggcgctggtcaatttcggcaacctggcgagcatcgaggccaatctcggcgccgccgccttcgccagcgtggtggtgctcaccatgctcgccgccgtgacgttcgacccccggctgatctgggacaacaccaatctggacgacgagaatgagtga

SEQ ID NO: 318952 - DNA, 1023 bp, Pseudomonas aeruginosa
atgcatcacggtatctccccgccccaggacgccgacctgttcggcctgatctacggtttccgtttccgccccggcgaagcggggcgggaaatcgactcggctaccgccctcgcctgcctgcggcaggctcgcgaggaggcgccggacgagttcctctggctgcacctgaacctcgcccatgccgcctgcgagcgctggatgaagaagcatctggaactgccggattatttcttcgaaagcctgcgcgaggggtcgcgctcgacgcgcatcgaacacgtcgactcggcgctgctggcagtggtcaacgacgtggtcttcaacttcggcctggtctcttcggacgtcgccaccctgtgggtctgcgcccgtggccggctgctggtcagtgcacgagcgcaaccgctgcgctcggtggacaagctgcgctcttcggtgaagcacggcgaacctttccgttcgcccctgcagttgctgatccacctgttgcgcgaccagggcgacgtgctgacccagatcgtccgcgaaaccagcgtcgcagtggaccgcatcgaggaccagctactggccctgcgcctctccgccaaccgcgccgacctcggcgccatgcggcgcgtgctggtacgcctgcaacgcctgctggcgctggagcccggttcgctgctgcgcctgctcaaccgaccgccggaatggctacaggatgccgacctgcgtgagttgcgcgaagccaccgaggagttctccctggtgatcagcgacctgaccgccctgggcgaacggatcaagctgctgcaggaagagatcgcggccaagctcaacgaacagaacaaccgcatcctcttcaccctgaccatggtcacggtgctggccctgccgatcaacatcgtcgccggcttcttcggcatgaacgtcggcgggattcccttcgccgacgatcctgaaggcttctggatcatgctcgtgctggtcgccagcttcaccttcctcgccggccgctgggccttccgcaagcgcggcgactattga

SEQ ID NO: 318953 - DNA, 792 bp, Pseudomonas aeruginosa
atgagcctttcccccgccgatctcaagcaactccaggccgccaagaacctgctggagaaccctggactcaccgcgcaactcaccagcctgctgggcacgccgatcgaatacggcctgaagaagctgccacggaaggtcaacgagaagctcggttcggtgatcgagggagcgctgctgaaagtcgcccgctcggccaccgccactctccaggaaaacgccagcggtcaaccggcgaaccgcctgcataccctcggcgccgccgtttccggtggcgtcggcggcttcttcgggccgctggcgatgctggtcgaggtgccggtcaccaccggcatcatcttccgttccatcgccgacatcgcgcgcagcgagggcgagtcgatcagggacatggacaccctgatggcctgtatcgaagtcttcgccctcggcggcaaatccgcctcggacgacgcgtcggagtccggctactacgcggtgcgtacggcgctggcccagcaggtcaaggcggccgccgacttcctcggcaaggacgccggcagcaagaaggccgcgcccatgctcctggccctggtgcgcaaggtcgccgagcgcctgggcgtgcagtattcggaaaagctcgcggcgcagatcgtgcccatcgtcggcgccctcggcggcgcggcgatcaacacggtgttcatgaaccatttccaggccatggcgcgcggtcacttcgtcgtccgccgcctggaacgccactacggcaaggatgtggttcgcgacgcctacgccctgctgccccggcgcggctga

SEQ ID NO: 318954 - DNA, 1257 bp, Pseudomonas aeruginosa
atgcagcacaaaagatcccgcgcgatggcgagttcgcgctcgccgttcctcttcgtcttgctggcgctcgccgtgggcggtacggccaatgcccatgacgatggcctgccggccttccgctattcggcggagttactcggccagttgcaactgcccagcgtggccctgccgctgaatgacgacctgttcctttacggtcgcgacgccgaggcgttcgacctcgaggcctacctggccttgaacgcgccggcgctgcgcgacaagagcgaatacctggagcactggagcggctactacagcatcaacccgaaagtgttgttgaccctgatggccatgcagtccgggccgttgggggcgccggacgagcgcgccttggcggcgccgctggggcggctgtcggcgaaacgcggcttcgatgcccaggtacgcgacgtgttgcagcagttgtcgcggcgctactacggtttcgaggaataccagttgcgccaggcggctgcgcgcaaggccgtcggcgaggacggcctgaacgcggcatcggccgcgctgctcggtctgttgcgagagggggcgaaggcctccgccgtgcaaggcggcaatccgctcggcgcctacgcgcagaccttccagcgcctgttcggcaccccggccgccgaactcctgcagccgcgcaaccgcgtggcccggcaaatccaggcgaaggccgcgctggcgccgccatccaacctgatgcaattgccctggcgccagggctattcctggcagcccaacggagcgcattcgaacaccggctcgggctatccgtactcgtccttcgatgcgtcctacgactggccgcgctggggcagtgcgacctacagcgtggtcgccgcccacgccggtacggtacgggtgctgtcgcgctgccaggtacgggtgacccaccccagcggctgggcgaccaactactaccatatggaccagatccaggtgagcaacggccagcaggtcagcgccgacaccaagctcggcgtctatgccggcaacatcaacaccgcgctctgcgagggtggcagctccaccggaccgcacctgcatttctcgctgctctacaacggcgccttcgtttccctgcagggagccagcttcggtccgtaccggatcaacgtcggcaccagcaactacgacaacgactgtcgccgctactatttctacaaccagagcgccggcaccacccattgcgctttccgtccgttgtacaaccccggcctggcgctctga

SEQ ID NO: 318955 - DNA, 426 bp, Pseudomonas aeruginosa
atggctacacgacggaaaacaacaccccaggaaatcgatgatatccaggaccgcatgggttcgatgcgcgagctcgatttcgacgagcgccgccaggcgcgcaaggcgcggatcggcgacgagcggcccgaggccgaggtggaggccgagttttcctcgcggcgggtacgcgaggcgggccacgctggcgggcagccggacgaggacgatggttaccaggataacgtcggcatggacgatctggcgccggaaaccctgatcgacgaaagcggcgcccgctcgccggccgagcgcggcggcgaatcgcccgcggacaagcgcctgagggtcgtgcatggcaacgagatcggagccggccacggcctcgacgaggccgagctggcgcgtcgtgatccgctcgacggttcctccgacgaggaacgctga

SEQ ID NO: 318956 - DNA, 240 bp, Pseudomonas aeruginosa
atggacgacatcgagaccagagtgaggaaactggtagccgcccggttcggcgtggaggagtgcgacatccggctggacagcgacttccgtaacgacttcggtgccgagtcgctcgaggtggtcgagctggtcatggccctggaagcggagttcggcgtcgagatcgccgatgacgatgcggaacggatcgagaccgtgcgccaggccatcgactatctcgaggaagccgtgccgacctga

SEQ ID NO: 318957 - DNA, 2331 bp, Pseudomonas aeruginosa
atgccacgttgtagtacccgttccgcccagcgcctgtctccgctgttcctggtcctgtcgctggccgtcctcggcctggcgccgccggtccatccggcacctgccgagactgccgccgcgcaagaggaagagcagtggacgatcaacatgaaggatgccgagatcggcgacttcatcgagcaggtatcgagcatcagcggccagaccttcgtcgtcgatccgcgggtgaaggggcgggtcacggtggtatcccaggcgcggctcagcctgacggaggtctaccagctgttcctttcggtgctcgccacccatggctacgcggtgctgccgcagggcgaccaggcgcgtatcgtgccgaacatggaggcacgccaggacgccgcgcagaagaccgtccgcgatgggccgggcagcctggagacgcgggtggtccaggcgcagcagacctcggtggcggaactgatcccgatgatccggccgctggtcccggcccatggccatctggccgccgtaccgtcggccaacgcgctgatcgtcagcgaccgccgctccaacatcgagcgcatcgaggcgatcgtgcgcagcctcgaccgggccggcgaacatgactacagcatctacgacatgcgccatgcctgggtcgcggaaatcgccgaggtgctcgatcgcagcgtcaccccggccgccgggaagagcgccgccaccgtccaggtccttgccgacagccgcagcaaccgcctggtcctgctcggtccgccgcaggcgcgagcgcgcttgctgcggctggcgcagtcgctcgacgtcccctcgtcgcggtcggcgaacagccgggtgatccgcctgcgccatggcgacgccaagacccttgccgccaccctcggggagatcggcgaatcgctgcacggcgagcggggccaggatggccggggaagcggcaagcgcggcctgctggtgcgcgccgacgaatcgctgaatgccctggtgatcctcgccgacccggaggatgtcggcctgctcgaggacatcgtccgccagctcgacgtgccgcgcgcacaactgctggtggaggcggcgatcgtcgagctgtccggcgagatcggcgacgccctcggggtgcaatgggcgctgcgtagcgggcatgtcgccggcggcgctggcttcgccgacagcgggttgtccatcggcaccctgctgggcgcgttgcaggccggcaagccgccggcagagctgcccgacggtgcgatagtcggcctcggcagtcgcgatttcggcgcactggtcaccgcgctgagccgcaatagccgcagcaacctgctgtcgacgccgagcctgctgaccctggacaaccagaaggcggaaatcctggtcggccagaacgtgccgttccagaccggcagctacaccaccagcgccagcggttcgagcaatccgttcaccactgtcgagcgcaaggatatcggggtgaccctcaaggtcacgccgcacatcggcgaggaccgcatgctgcgcctggagatcgagcaggaaatatcctccatcgcgccaaccgccaccctggcggcgaaggcggtggacctggtgaccaacaagcgctcgatcaagagcaccgtactggctgacgacggccaggtcatcgtcctcggcggactgatccaggacgacctgctgcgcagcgattcgcgggtaccgctgctgggcgacatccccggcgtcggccggctgttccgctcgtcccgcgagacccgggtgaagcgcaacctgatggtcttcctgcgcccgagcatcgtccgcgatgccgccggcctggagcgcatcagccatggccgttaccgttccatccagttgctgcgcggtgccgccggcgaaccggcgcgcccgctgttcgaggatgccggcgccatcgacctgcgtcccgccgcccaggtcgcaccggcacctattggctcgccgcgcagctatccggctccagccccggtgctgatggagaagccgcgcctggcggacccggcgtccctgggcgacggtcgcggcggcgaggtgctggaggttcgccagggcacgcacgcgccgcagccgccgtcaccccagcgctacgccgtgcgattggtcgagggcagcagcgaagccttcatgcgcgcgctgatcgagcggcatccgggcctgtcgttgcgtttgcgccgcgaactgcgcgatggccaggagctgttcgcggtggagcggggcgactacctcgacccggagcaggcacgccgggccctggcggaactgcccgaaagcctgccgcgagggaaggcgcgggtgattgcgcatacgccgggaagcgccctgtga

SEQ ID NO: 318958 - DNA, 528 bp, Pseudomonas aeruginosa
atgcagcgcgcccgtttgccggaatccgcctgctgcatgtcgcgtcaccttccatcgcctttcgttttcctgcgcagcctggctgggcatgcgcccgctgtgctttgcgtgctgctgctggcgttgctcagcgccagcctggccagccagacgcgctcgctgcgccgcgagctggcggaactgcccgccgcagtggccccggcgccgccagccaacccttcagcggccccgcgcgcggcgttagccggcttgttcggtggcgctccgtcgccgcgcggcgcgacggcgggcgagcgtctgcaattgcgcctgctggcctgcttcctggcgcgtcgcgaggaccgctcggcggcgctgatcgcggtggccgggcgctcgcagcgcttcctgccgggcgccgaagtgcgccccggcaccgtgctgctggcggttcatcgcgaccatgtggtgctgcgcgaccagggttatgaagaacgtctgtatttccccaaagccgaaggggcagaaaccacccatgccacgttgtag

SEQ ID NO: 318959 - DNA, 210 bp, Pseudomonas aeruginosa
atggcttccgctcccgacgctcttccccaggccctttcctccgacgacgctccggcccaggccgcgccgagcgacgccagcgcgttgctgaaggccgccctggcgaagaagaaccaggcccagctctatccgcagcggaagatccacgacaagggccagcgtcccggcatggcgccgcgcggtacccgtcgttcgatgggcaagcgctga

SEQ ID NO: 318960 - DNA, 2277 bp, Pseudomonas aeruginosa
atgactgagcagggcggcgaggcgctgtaccaggtggcggtgcgcgcgctttgcgagttcagcgccaagcgcggcgacctcgacctgcgcttcaccccgtcgcccagcgccctggaaggcatcgccggacataccctggtgacctcccggcgccccgctcactaccagcgcgaagtggcgctggacggacgctaccgtcacttgcaggtgcgcggccgggcggatgggtacgatccgcaggcgaactgcctggaggaaatcaagacccaccgcggcgacctcgccctgcaaccggccaaccaccggcacctgcactgggcccaggccagggtctacggctggctgctctgcgccgaacggaagctggaggaagtcgaactggcgctggtctacctggaggtcggcagccagaaggagacccgcttcgtcgagcgggtgcgggccgacgagctgcggctgttcttcgagagccagtgccaggcgtttctcgcctgggccgagcaggaactggcgcaccgccagcggcgcgaccgcgaactggccgcgttacgctttccccacgccgaattccgccacggccagcggcaactggcggaggcggtgtacaaggccgcctccgccggttgttgcctgatggcccaggcgccgaccgggatcggcaagaccatcggcacgctgttcccgcaactcaaggcgatgcccgggcagcgcctggaccggctgttcttcctggccgccaagaccccgggccgggccctcgcgctgcatgccctgcgtagcctggaaggggagaccggcggactgccggtgcgggtgctggaactggtggcgcgggacaaggcctgcgagcacccggacaaggcctgccacggcgagtcctgtcccctggcccagggcttctacgaacgcctgccggcggcccgcgccgccgccgtggaggcgcgctggctggaccaggcgcggttgcgcgaggtggcgctggcgcaccgggtctgtccctactacctgggccaggaactggcgcgctggtgcgacctggcggtgggcgactacaactactacttcgatctcggcgccatgctccatggcctggcccaggtcaaccagtggcgggtggcggtactggtggacgaggcgcacaacctggtggagcgcggccggcggatgtattccgccgaactcgaccagggcgatttcctcggtgtgcgcaaaaccgccccggaggccctgaggaaaccgctggagcgcatccagcgtgcctggaacgaactgggcaagacccaggcggacgactaccaggcctacgacgagcctccgcagaagctgctcctggccttgcagaacgcggtggcggcgatcaacgacctgctcgccgagcaaccgcaggcgctggagccggcgttgcaggagttctacttcgcgatcctgcagttcggccgtctcgccgagctgttcggcgagcattcgctgttcgacatcgagaagcgcccaggccgcaacggccgcagcctggcccggctgtgcctgcgcaacgtggtgccggcggcgtttctcgccgagcgcttcgccgccagccgctccaccgtgctgttctccgctaccctcgggccgcgcgactattacgccgacctgctcggcctgccggcgggcacgccctggctggaagtggactcgccattcagcgccgagcaactggaggtgcacatacagcgtcgggtttccacgcgctatgcgcagcgccaggcatccctggcgcccatcgcagcgattctcggcgagcagtttcgccagcggccgggcaactacctggccttcttcagcagcttcgattacttgcagcaggcgctggacgtcttccgccaggcatacccgtgggtgccgtgctggagccagacgccacggatggacgaggcggagcgccgggtcttcctcgagcgcttcgtcgcgggcggcgagggcatcggcttcgccgtgctcggcggtgccttcggcgaaggcatcgacctgcctggcgagcgcctgatcggcgccttcatcgccaccctcgggttgccccaggtgaatccggtgaacgagcagatccgcctgcgcatgcagcgcctgttcggtgacggctatgactacacctacctgtatccgggactgcagaaggtggtccaggccgccgggagggtgatccgcagccgcagcgatcgcggcgtggtgcacctgatcgacgaccgtttcgcccaggccaaggtgcgccggttgctgccgggctggtggcaactgcgttga

SEQ ID NO: 318961 - DNA, 1680 bp, Pseudomonas aeruginosa
atgcatgaacagtaccaggctccgcttcccgtgaattccccagcgcttcccgaacccttctactacctgcacaacttccgcgcggtgctcgcctggatcggcgaacgctatgccgatctgctcgacgatcaggaacgtgccttcatcgccgcgttcgccgagctgcccgaggccagccaggccctgctggtgcgcatggtgatgcgcaagggcacgctgttccgcgaaggcaagctggcctatgccgagatcggcgacacgcgcgccgccgtgcaaccgctgttggcattgggctgggtggacgcgcagccgaccctggaactggcgcaactgttcggcttgctgaggaaggacgaattgtcgcagctgttcagggaccatctcgggcgcgcgaacctgcgcaaggatgcgctgctggaacggctccagccgttgttccccgaggcgcggcggctccccgagtggcaggccgacttcgccgaaccggtctacgagttgcgctgcatggcgctctgcgaccggttgcggttgatgtatttcggcaacctgtggcaggactggtcggagtttgtccttgccgacctgggtatctatcgttacgaaagcgtcgagttttccgccgactcccgcggctttcgcctgcgcgccgacgtcgacgcctatctccacctgttcgactgccgccagcgcttcgacctcggcgagccgctggaggaactgctcgccggcctgccgggcgaaccctacgccaatccctggctggaagggcggcgggtcaagctgctgttccagttcgcccagcactgcgaaaagcagcgggatttcgacctggcccagcggctctatcgccaatccagccaccccggcgcgcgcctgcgggcgattcgcagcctggaacgcggcgagcgcttcgccgaagcccatgcattggcgcgggaggccagctgtgcgccggaaagcgacgccgaacgccagggcctggcccgattgctgccgcgcctgcaaggcaagctcggcctgccgcgacaggcgcgggcggcggctcctgaaatcgaccgcctggacctgtgcctggcgtacccgagcgaaccctgtagcgtcgagtgggcggtccgcgagcacctggaagagcccgattgcgcggtgcactacgtcgagaacggcctgatcaattcgctgttcggactgctctgctgggaggcgatcttcgccgccattcccggggcgttcttccatcccttccacagcgcgccggcggacctgcacagcgccgacttccgccagcgccgcgccgccctgttcgaggcctgcctgggacggctggaggacggcagctaccgcgacgcgatccgctgtcgctaccgcgacaagttcggcctgcagtcgcccttcgtctactgggaactgcttggcgaggaactgctcgaacaggcgctcgattgcctaccggcggcccacctgcgcgcctggttcgaacgcctgctggaggatatcccgggcaaccgcgccggcctgccggacctgatccagttctggccggcgcagcggcgctaccggatggtcgaggtcaagggaccgggcgaccgcctgcaggacaaccagttgcgctggctgcaattctgccgcgagcgggagatgccggtggcggtctgctacgtgcgctggcatttcgatgactga

SEQ ID NO: 318962 - DNA, 651 bp, Pseudomonas aeruginosa
atgaagaagatccgccaacgcaacctgcaactgatcctcgacgccgcctgcgaagtcttcgccgactgcggcttcagcgccgcccggctcagcgacgtcgccgagcgcgccggcgtggcgaaggccaacgtgctctattactaccgctccaaggcgcaactctacgaggcggtgctggacagcatcgtcgagcccctgctggaagcctcccggccattcgccggcgaccagccgcccgccgaggcgctacgcgcctacgtcgacaacaagatgcgcatcggcgccgagcggccgcacgcggccagggtcttctcctgcgagatcatgcgcggcgcgccgcgcatgccggcgccgctgctggaacgcctcgacgcccaggcggaacgcaacgccgagcgcatccgccagtggatcgacgaaggcctgctggcgccgctggatccgtaccacctgctgctcaacctgtgggcgatgaccgagtcctatgcccttggcggctggcaactggcgcgcctcaccggccaggccgggctggacgcaagcgactaccggcaggcggcggaaaacatcgtccgcctggtctgcgccggctgcctggcactccccggcgaggccgcgccgcgtcggcgtttccgcgcgctggccggctga

SEQ ID NO: 318963 - DNA, 756 bp, Pseudomonas aeruginosa
atgaccacccgcctgccccagctattgctcgccctcctcgccagcgccgtatccctggccgccagcgccgacgaggtgcaggtcgccgtcgcggccaacttcaccgcgccgatccaggccatcgccaaggaattcgagaaagacaccgggcacaggctggtcgccgcctacggcgccaccggccagttctatacgcagatcaagaacggcgcgccgttccaggttttcctctccgccgacgacagcactccggcgaaactggagcaggaaggggagatcgtgcccggctcgcgcttcacctatgccatcggcaccctggcactctggtcgcccaaggccggctacgtcgacgccaagggcgaggtgctgaagagcggcagcttcaggcacctgtccatcgccaacccgaagaccgcgccctacggcctcgccgccacccaggcgatggacaagctcggcctcgccgccacgctcgggccgaagctggtggaaggccagaacatcagccaggcctaccagttcgtttccagcggcaacgccgaactgggcttcgtcgccctgtcgcagatctacaaggatggtaaagtcgcaaccggctcggcctggatcgttcccgccgagctgcacgacccgatccgccaggacgcggtcatcctcaacaagggcaaggacaacgccgccgccaaggccctggtcgactacctgaagggcgccaaggccgccgcgctgatcaagtcctacggctacgaactctaa

SEQ ID NO: 318964 - DNA, 687 bp, Pseudomonas aeruginosa
atggcgttgccactcgacagtacggacctggcggccatctggctgaccatcgagctggcttcgctcaccaccctcctcctgctgctgatcggcacgcccatcgcctggtggctggcgcgcacccgctcctggctgaaggggccgatcggcgcggtggtggccctgccgctggtgctgccgccgacggtgatcggcttctacctgctggtcagcatgggtcccaacggtttcatcggccagctcacccagagcctcggtctcggcaccctgcccttcaccttcgccggcctggtggtcggctcggtgttctactcgctgcccttcgtcgtgcaaccgttgcagaacgccttcgaggcgatcggcgagaaaccgctggaggctgccgcgaccctgcgcgcgagccccgtcgaccgtttcttcagcgtggtcctgccgctggcccggccgggtttcgtcaccgccgcgatcctcggcttcgcccataccgtcggcgagttcggcgtggtgctgatgatcggcggcaacatcccggagaaaacccgcgtggtctcggtgcagatattcgatcacgtcgaagccatggaatacgcccaggcccactggctggccggcggcatggtggcgttctccttcgtcgtcctcctcgccctctattcgggccggcgccgccggccgggctgggcctga

SEQ ID NO: 318965 - DNA, 1086 bp, Pseudomonas aeruginosa
atggacggcctgcgcctgcgcttccgccgcgcctaccccggcttcgaactggacatcgacctggctcttcccggtcgtggcgtgaccgctctgttcggccattcaggctccggcaagagcacttgcctgcgctgtatcgccggcctggaaaaggccgccgagggcgaggtgacgatcaacggcgagacctggcaggacagccgccgcaacctcttcgtcgcgccccaccggcgtgccctcggctacgtgttccaggatgccaacctgttccgccacctgacggtgcggcgcaacctggccttcggtctcaagcgcatcgccgccgccgaacgccgcgtcgagctggaacaggcctgcgccctgctgggcatcgagcacctgctggaacgcatgccggaacgcctctccggcggcgagcagcaacgcgtcggcatcgcccgggccctcctcaccagcccgcgcctgctgctgatggacgagcctctggcatccctcgacctgaagcgcaagggcgagatcctgccctatctcgagcgcctgcacgaggaactggacatcccggtgctctatgtcagccactcgccagacgaagtggcgcgcctggccgatcacctggtgctgctggagaacggcaaggtccgcgccagcgggccgatcggcgaaaccctggcgcgagtcgacctgccgctggcgctggacgacgatgccggggtggtgatcgagggcacggtcagcgaccacgacccggcctacggcctgctgaccctggtcctgcccggcagtgcgctgcaaatgcgcgtcgcccacgccccgctggcccccggcaagcgcctgcgcttcaaggtacaggcgcgcgacgtcagcctgaacctgcgcgacgacgcccagagcagcatcctcaaccgcctgccggtacgggtcctggaattggtcgataccgacaccgcggcccacgtcctggtgcgcctggatgccggcggcaatccgctgctggcgcggatcacccgttactcgcgggaccagttgcaactacgacccggccagctgttgtgggcgcagatcaagtcggtggcggtgctcgcctga

SEQ ID NO: 318966 - DNA, 828 bp, Pseudomonas aeruginosa
atgcccggccaccgcattaccctcaccggagaaaagcagacgctcctgatcaccctctacgccaaggcgctggatagccgcctggacgattccatcctccatgaccgtttcgccgaggaggcggtgcggcagatcgacttcgacttctccagggtcgccctcggcaagggcaacgaacgggccctggccatgcgctcgcattacttcgaccaggcctgccgcgacttcctcggccgccatcccgaggggcaggtgctcaacctcggttgcggcctggacagccgtatctaccgggtcgacccgccggccgagctgccttggttcgacctcgactacccggaggtcatggacctgcgcgagcgactctacccgccgcgcgccggcgcctatcgggcgctgcgccactcggtggacgacgacggctggctgcaaggggtgccgcgcgagcggcccgccctggtcctggccgaggggctgatgccttacctgcgggagtcccaggtgcgacgcctggtggaacgcctggtcgaccacctgggtagcggcgagctgctgttcgacggctacggccgcctcggcatcatgctgctgcgcctgtatccgccgctgcgcgagaccggggcgcaggtgcattggagcatcgacgacccgcgcgaactcgagcggtggcatccggccctgcgtttcatcgaggaggtcaccgactatgacccgcaggacgtcgccaagctgccgcagtcgtcgcggctgatgctgccgatctacaacggcttcgccttcctgcggcggatgggccggctgatccgctaccgttggcccagggtctag

SEQ ID NO: 318967 - DNA, 888 bp, Pseudomonas aeruginosa
atgaaagccaactccgatgaactgcaaagcttcgtcagtgtagtcgacagcggttccatcagcgccgccgcggaacagatgggactgaccgcctcggccgtcagccggaccctctcgcgcctcgagcacaagctcggcaccaccctgctcaaccgcaccacccggcgcatggagctgaccgaggaaggccgctacttcctcgaccaggcacggcagatcctgcagcagatggaggcgctcgaggaacgcctggccctgcgccggcagagccccgccgggcgcctgcggatcaacgccgcctcgcccttcatgctgcacgcggtggtgccgcacatcggcgagttccgccggctgtacccggacatccagctcgaactcaacaccaacgacctgatcatcgacctgttggagcaacgcaccgacgtggcgatccgcatcggtgcgctcagcgactccaccctgcacgcgcggccgctgggcgccagccgcctgcacatcctcgccagcccggagtacctggcccgccacggcacgccggcgagcatcgaggggctgcgagggcacaccctgctcggcttcacccagcccgagcatctcaaccgctggccggtggtgcacgccgacggcgatcgcctggagatccagccggatatctctgcctccagcggcgagacgctccgccaactggccctgagccaccagggcatcgcctgcctggccagcttcatgaccgaccgcgatatccaggatgggcgcctggtgccgctgttcgccgaacagatgagcgaataccggcaaccgatccacgccgtctactatcgcaactcgcaactggcgctgcgcatccagtgcttcctcgacttcatccagcagcgcctgggcgcctga

SEQ ID NO: 318968 - DNA, 828 bp, Pseudomonas aeruginosa
gtgaacgaatccctcgatttctcgccctacctcgagcgctgggcgttgcaacccgacggcgagcccttcgccacccacagcagccgcctgctgccggtgcgccatcgcggcgcagcggcgatgctgaagatatccagtgccgaagaagagcgtttcggccacgtactgctcaactggtgggacggccagggcgcggccagggtgctggcctacgaccaccaggcgctgctgatggagcgtgccaccggcgggcgctcgctgctggaaatggtcaggcgcggcgacgacgacgaggctacgcgtatcctctgccaggccatcgaacgcatccatgccccgcgcccgggtccgttgccggagctgaccccgctggagcgctggttcgactcgctgtatgccgccgagcgccgctacggcgggctctacgtcgactgcgcgaatgccgcccgctacctgctggagaccgctcgcgaacagcgcccgctgcatggcgacatccaccacggcaatgtgctcgacttcggcgagcgcggctggcaagtcatcgaccccaagcggctctacggcgagcgcggctacgactacgccaacctgttcaccaatcccgacgcgaagaccgcccaggcgcccggccgtttcgagcgccagctggagatcgtaatcgccgccagcggcctgcagcgccgccgcctgctgcaatggatcctggcctggaccggactctcggcggcctggttcgacgaggacggcagtcgcgaggagaccgaagccgagctggccatcgcccgcctggccctggcaaacctcgctcgaacgcctgcgcaatga

SEQ ID NO: 318969 - DNA, 924 bp, Pseudomonas aeruginosa
atggccggagccagcctcctcaccctcctcgacgatattgccgcggtgctcgacgacgtctcgctgatgaccaaggtcgccgcgaagaagaccgccggtgtcctcggcgacgacctggccctcaacgcccagcaggtcaccggggtcaacgccgaccgcgaactgccggtggtctgggcggtagccaagggctcgctgcggaacaaggcgatcctcgttcccgccgcgctgttgatcagcgccttcgcgccctgggcggtgatcccgctgctgatgctcggtggcgcctacctgtgcttcgaaggcttcgagaagatcgcccacaaatacctgccccatgacgacgagcacgccgacgaggcagcgctggcggccaatgtcgacgtggccgccctggaaaagcagaagatcggcggcgcgatccgtaccgacttcatcctctccgcggaaatcatcgccatcaccctgggtaccgtcgccgagtccagcttcaccacccaggtactggtgctggtcggcatcgccctggtgatgaccatcggcgtctacggcctggtcgccggcatcgtcaagctggacgacgccggcctctacctgtccaggcgcgacagcggctttgcccaaggcctcggcggcgccatcctgcgcaccgcgccatacctgatgaaaggcctgtcggtggtcggcatggcggcgatgttcatggtcggcggcggcatcctcacccacggtatcccggtggtccaccacgccatcgaacaggccgcgcagagcgtcgccggcatcgccacgctgggcccgctgctggcggcgatcaccccgaccctgctgaacttcctgttcggcatcgtcgccggcgcggtggtcctggcggtggtgctgctggtcaagcgcctgctgccgaagaagaaaaagactggctga

SEQ ID NO: 318970 - DNA, 1443 bp, Pseudomonas aeruginosa
atgaacgatacggatagcagaaaagatccggacggctacaactacgacgtcgtccgccagttcaccttgatgaccctggtctggggcatcctcggcatgggcctgggggtgttcatcgccgcccaactggtctggccggcgctcaacctcgacctgccctggaccagcttcggccgcatccgcccgatccacaccagcctggtgatcttcgccttcggcggcagcgcgttgttcgccacctccttctacgtggtgcagcgcaccagcggcgtgcggctgatctccgatgccctggcgcgcttcgtgttctggggctggcaggcggcgatcgtggggatgatcgtcagctacccgctgggctataccacctccaaggaatacgccgagatggaatggccgctggcgctgtggatggcgatcgtctgggtggtctatgcctacctgttcttcggcaccatcgcccgtcgcaaggtgaagcacatctacgtcggcaactggttctacggcgccttcatcatcgtcaccgcgatggtccatatggtgaaccacgcattgctgccggtgagcctgggcaagtcctactcggcctattccggcgccaccgacgcgatgatccagtggtggtacgggcacagcgtggtcggcttcatcctctcggtcggcttcctcggcatgatgtactacttcgtgcccaagcaggccgggcgaccgatctactcctatcgcctgtccatcgtgcatttctgggcgatcatctcgatctacatctgggccggcccgcaccacctgcactacaccgcgctaccggactgggcgcagtcgctcggcatggtgatgtcgctgatcctcctggcaccgagctggggcggcatgatcaacggcatgatgaccctctccggggcctggcataagttgcgcgacgacccgatcctgcgcttcctggtggtgtccctggcgttctacggcatgtccaccttcgaaggcccgatgatggcgatcaagacggtcaactcgctgtcccactacaccgactggaccatcggccatgtccacgccggcgccctcggctgggtggcgatgatctccatcggcacgctctaccacatgatcccgaaactctggggccgcgagcggatgcacagcgtcggcctgatcaacgcgcacttctggctggccaccatcggcaccgtgctgtacatcgcctcgatgtgggtcaacggcatcacccagggcctgatgtggcgggcggtcaacgaggacggcacgctcacctactcgttcgtcgaggcgctggtggccagccatccgggctacgtggtgcgcctgctcggcggcgccaccttcgccagcggcatgctgctgatggcctacaacacctggcggaccctgcgcagcgcgcaggaccagcggcagccggtcctggcggccggccagggggcctga

SEQ ID NO: 318971 - DNA, 222 bp, Pseudomonas aeruginosa
atgctgttgtccctgctgtgcctctccaccctggcgctcggcctcgccctcagcctcgccggcagtacccgcgaggaacgcgaacaggccgccctgctgccgttcgccgacgatcccgaggccgcccgccgggtcgcccgggataccggcaagatctgccggcaggtggtccgccccctcgaggaatcccgcgaggccgccggcccgccgttcctcgcctga

SEQ ID NO: 318972 - DNA, 1005 bp, Pseudomonas aeruginosa
atgaacgactcccccagcaccgccgtacgcacctggctgaaaggcttccgccccctgaccctgaacgctcgaccgcgcgactgcctgcgcgccggactcggtgcctgcatcggcgcgctcgccgcggtattcgcctgccaggcgttgttcggcagcgaactggcgctgcgcctggcagcgccgctcggcgcatccgccgtactgttcgccctgcgctgcctgcatccgccgagctgcgcgctggccctgagcgtggccctcaacccgtccctgagcgaactcggcatcgacgtggtctggccgatcctgctctccaccctggtgctgatcggctgcgcgctgctctacaacaacctgatgcgctctccctacccgcgcccctaccagccgccgcgggccaatctccatggcacccgcgacctggcgccgagcgcgcgaacggacttctccgcccgggacctggaccaggcgctgcaagacttcggcgaatacgtcgacatcacccgcgacgacctcgagcgactgatccaccacaccgagcgctacgccttgcgccggcgcatgggcgagctgaccgcggcacggatcatgtcccgcgacgtgcagaccgccagcaccgagaccttcatcgacgacgcctggaagcagttgcaggaccaccgcctgaaggccctgccggtgctcgacgagcatcggcggctggccggcatcgtcacccagagcgacctgctcaagcacttccgccccgacggcagcccgttcaagcgcctgcgcttcctgcgcgggaccaagctgaagacgatcatgaccaccccggtggtctgcgtacaggccgacacccacgccgtcgagctggtctcgctgctatccgacgaaggcctgcactgcctgccggtgctcaacgaagccggctacctggtcggcatcgtcagccagaccgacctgatcgccgcgctctaccgcaactggctgcagcacctgggccaggccgatcagatcacgtag

SEQ ID NO: 318973 - DNA, 864 bp, Pseudomonas aeruginosa
atggatatcgacctcgcccgtaccttcctggagatcgcccgcagcggtagcttcgtcgctgccgcggaacgcctgcacctgacccagaccgccgtcaccgcgcgcatccagaacctcgaagggcaactcggctgccggctgttcgtgcgcaaccgcgcgggcgcgcgcctgaccgccgacggcgagcacttcctcggctacgccagccaactggtgcagacctgggatgcggcgcgacgcgacctgccgctgccggacggcttccgcaacctgctcaacctcggcggcgaggtcagcctgtgcaatccgctgctgctgaactggatgcggcgcctgcgcgaggcgattcccggccacgccgtgcgggtcgagatcggccagggtgccgacctgctcaagcaactggagcagggcgcgctggacgccgcgctggtctaccagccggaatactggccggggctgcaggtcgagcagttgctggaggaaaagctggtgatggtgcgttccgtgctatccgcggagccttatctgtatgtcgactggggcccggatttccgcagccagcacgatgccgcgctgccggaccgggccaaggccgcgctagcctgcaacctcggtccgctggccctgcagtacatcatgcagaacggcggcagcggttatttccgtacccgggtggtgagcagctacctggatggcggcaccctgcaacgggtcgagcaggcgccggagttcgcctacccgacctacctggtgtactcccgcgagcgcctgtcgccgaccctgcgccatgcgttccagttgctgcgcgaagtggtccgcgaggacagcgactggtcgcagcgctgggactacgtgatctga

SEQ ID NO: 318974 - DNA, 276 bp, Pseudomonas aeruginosa
atgaacgctacgctccgtttcaacgaggctttgctgatcaccgggcgcgccttccagccataccagtgcgttgcctggtccgagctaggcagtgacggcggcctgagcctgtccgtagtcgatcgcaccggcacccgcctgctgggccgtgcgcgcattccgagctccgcctactccgatccggagcagcttgccggcctgctgcaacaggcacgcgaagaactcagccacaacggctacaacctgcaggactggagtatgcccagccaaggctga

SEQ ID NO: 318975 - DNA, 1206 bp, Pseudomonas aeruginosa
atgcttgcacgcgacagcctggtacaggctggtctgccggataatccgtatgcgcgccagttgcgcaacggttttcgttggttgcggttcgaaaaggagctggaaaacgagtttcgcgagtttctcagttggaactcgctgatgcagcggcgtgctgccatcggggtggcgttcctgatctggacgctgttcatcgtggccgactggttgatggtggacatccgcctgcaccccagcctgttcgagcaactgctgggcgtgcgcctgggaatgatcggcctgctgctggtggtctggccggcggccttcctgcccagcctgcgcaaggtcggcgatgccatcgcgccctactgcctgctgctgatcaacctggcggtgctggcctgcgacgtgctgttcgagtggcatggggtgccgcgcttcacccagttgggtgcgaccctgggcatcctcgcggtgttcttcccgctcggcctggcgttctgggcctgcgtgcgcctggcgttgctgtgcctggccctgaacctggcggtattcctgctcttcggcggtgaagagaacctgcgtaccaacctgctgaatacgctctacaacggcctggtggtgctgatctgttcgttcgccctgtacctgcaggactacgcccagcgcgagcagttcctcggccggcggctgctgggcatgatggccgaacaggacagcctcaccggcctggtcaaccgacgctactacgagctgctcgcccagcgggccctggagcagggcgcccgcgaagaaaagggagtggcgctgatcctggtggatgtcgacgacttcaaggcctacaacgaccactacgggcatccggccggcgatgccgccctgcgccagcttggcgtcgtgctccggcagggcgcgcggcggccgttggatatcgccgcgcgcctgggcggggaggagttcgccgtgttgctctacgacagcgaggagggcaacaccctggccatcgccgagcgcctgcggcaggcggtggaggcgctgggcatcgagcacctgggctccagcgccggcccctgcctgaccatcagcctgggggtggcctattcgacctcaggcatgggcctggacgcgctctatcgcgaggccgatcgcgcgctctacgaggccaaggatgcagggcgcaacgcggtgcgcgtggcgttccggcagcacgaccgcctcgaatag

SEQ ID NO: 318976 - DNA, 1005 bp, Pseudomonas aeruginosa
atgcccgaaccgcgcctgattgcctgcctgatctatcccgacgtgatgagcctggacgtgaccggaccgctgcaggtattcgcctcggccaacgtcgaacgccagcgccagggcctgccgcctttctaccggatacaggtgctcggcgagcgtagcgaagcggtgcccagttccgcgggcatccgcatctgcgccgacctcgcctggcgcgactgtccgccggaaagcctggacaccctgttggtgcccggcggcctcggtgtcgaggcgcagacccgcaacgccgacctgctcgcctggctgaaagccgccgaaccgcgcatacggcggctcggctcggtgtgttcgggagcgctgatcctggccgccgccggggttctcgacgggcgcccggcgaccacccactgggccgacgtggcgacgctgcgccaggggtttcccggcgtccatgtgcaaggcgaccgcctgcacacctacgacccgcggtgccgcgacggcgacgcccacatcttcacctcggccggcgtcacggcgggaatcgacctggccctggcgctggtcgaggccgacctcggccgcagcctggcgctcagcgtcgcgcgacgcctggtgatgttcctcaagcgtcctggcggccaggcccagttcagcgcctggctgaccccggaaccgagccgcaccccgcgcctggccgcgctgctggagtggattcccgccaacctcgccggcgacctgtccctggaagccctcgccgaccaggcctgcatgagcccgcgtacgctgtcccgggtatttctccaggaactgggcgtggcgcccggtcgctacgtcgagcgggttcgcctggaggccgcgcgcgccctgctgcaggacgcccaggcgtcgatcgccacggtgtcccggctgtgcggcttcggccatccggaaaacctccggcggacgttccacaagcatctttcggtcagcccccaggaatacgccgaacgcttcggcatgctggcctga

SEQ ID NO: 318977 - DNA, 243 bp, Pseudomonas aeruginosa
atgctggaactgcgccccaactgcgagtgctgcgaccgcgacctgcccggcgacagcggcgacgcgctgatctgcaccttcgagtgcaccttctgccgcgattgcgcgacgacccgcctgggcggccagtgcccgaactgcggcggcgaactgctggcccggccaaggcgtccgcgggatgcgctggtccgtcagcctgcctccagccgacgcgtcgtcaggcccggcggttgtccggagtga

SEQ ID NO: 318978 - DNA, 1170 bp, Pseudomonas aeruginosa
atgctgctacgcaacccgaccctgctcctgctgttctgcggccaggccctgtactggtcctgctcgctgatcggcataaccctgaccgccctggtcggcgtccagctggcgccgttgaacagcctggctaccctgcccctggccctgctggtgctgggcaacctgctggcggtgcagccgttgtcgcacttcatgcagcgccacggccgacgtcccgggctgatgctcggcgccggcggcggcgtgctcggcggcctggtctgcgccgccggtgtctggactggcgatttcctctggttctgtctcggcgcgctgggcatcggggtctaccaggcctcggccatgtactaccggttcgccgcgctggaggcggtggatgccgggcggaaaggccgcgccagcgcctacgtgctcgccggcggagtactcgccgcgctgctggcgccgagcctggcgctgtggtcgcgcaacgcgctggcccaacccttcgtcggcgcctatctgctgatcgccgcgctggccctcgccggcctgctgctgatggctctgctccgcgaaggccaggcgccacgcccggcacgactcgcctggcgcgacataggcggcctgttgcggcggccggtggtccgcgcggccatcgcctgcaccgcgaccggacacggattgatgatcctgatcatgaacgccacgccgctggccatgagcttctgcggcctgccgctggaacagtcgagtcgggtcatccagtggcacgtgctgggaatgttccttccggcgttcttcgccggaccgctggtcgaccgcatcggcaaccgtcgcgtcgccctgctcggcgcgttcctgctcgccgcaagtgccggcatcgccctggacgggcagtcggtcacgcatttcctgctcagttcgctggccctgggcagcggctggaacctgatgctcatcgccggcaccaccctgctcggcgagggccacgccgaaagcgagcgcggcgccgcgcaaggattgatggagcaaggcaacagcctggtggcggcgctgatgtcgttcggctccggcgccctgatcaccagccttggctggaacgcggtgaacctgctggtctggccggcgctgctggtggcgctggcactgctctggccggtacgacgaacgcggacgctgtcgcgctga

SEQ ID NO: 318979 - DNA, 585 bp, Pseudomonas aeruginosa
atgagcgccatcaccattaccgaagctgcccaagcgtatctggccgagttgctggagaagcagagcaccccgggtatcggcattcgtatcttcatcacccagccgggtacccagtacgcggaaacctgcatcgcctactgcaagccgggcgaggaaaaggtcgaggacaccgccatcgccctgaaggacttcactgcctggatcgatgcggtcagcgagcccttcctcgaagatgcggtggtggactacgccaccgaccgcatgggcggccagctgaccatcaaggcgccgaacgccaaggtgccgatggtcaacgaggacagcccgatcaccgaacgcatcaactactacctgcagaccgagatcaatcccgggctggccagccacggcggacaggtgagcctggtcgacgtggtcgaggacaacatcgccgtgttgcgtttcggcggcggttgccagggctgcgggatggtcgacatgaccctcaaggatggcgtcgagaagaccctgatcgagcgtattcccgaactgaagggcgtgcgtgacgtgaccgaccacagcaacaaggagaacgcctactactga

SEQ ID NO: 318980 - DNA, 2289 bp, Pseudomonas aeruginosa
atgttgccaagaccgttggttgggttggccttcgttttgtcgtcttttatccagtctgtttccgctgctgaaatttcctatagccgtgacgtccagccgatctttaccgccaagtgcgtcgcctgccacgcctgctacgattcgccctgccagctcaacctgagcagcgccgagggcgcgcagcgcggcgccaaccaactgccggtctacgacggcacgcggaccaaggcgcaggaaaccacccgcctgtacctcgatgcgcacggtgccgacgcctggcggcgcaaggacttctggtcggtgctcgaaccgcaggacggccaggccgcactgatggcgcggatgctcgagcttggccacagccagccgttgcagccgaatgcgaagatccccgaaggcctggacatttcgatcaaccgcgccaaccagtgcccgacgccggccagcatcgatgcgttcatccgcaagaacccaggttccggcatgcctttcgcggtggccgggctgagcgacgacgaatacgccaccttgcagaagtggctggccgcgggcgccccggtcgaccagcagccgttgcggccgaccgccgccgaggcgcgccaggtggccagctgggagcgtttcctcaaccagcctggggccaagcagagcctggtctcgcgctggctctacgagcacctgttcctggcgcacctgtatttcccggagcagggcgcgcccggccacttcttccagctggtgcgttcgcgcacgcccagcggccagccgatcgacccgatcccgacccggcgtcccaacgacgatccgggcaacagcttctattaccgcctctggccgatccagggcgtgatcgtacacaagacgcacatcacctatccgctgacggcgaagaagctggaacgcgtccaggagctgttcttcggcacccagtggaacaccgacaaggttcccggctacggcgtgcagagccgtgccaacccgttcgccaccttcgccgcgatcccgccacgggcgcgctaccagttcatgctggacaacgccgaatacttcacccgtaccttcatccgcgggccggtgtgccgtggacagatcgccaccgacgtgatccgcgacaacttctgggtggtattccaggaccccgagcaggacctgttcgtcaccgacgccaacttccgcgcgcagagcgagccgctgctggccttgccggggcagatcgacgagctgaagaacctgctcggcctgtggagcgcctaccgggacaagcgcaacgagtacgaagacctgcgccaggacgtctacgccgacgcgccgccgccgacctggaacacgctctggcacggcaacgacaacgccctgctgagcatcttccgccagttcgacagcgcctcggtgcgcaagggcctgcttggcgaggtaccgcagaccctgtggctgatggactacccgctgttcgagcgaacctactacgggctggtggtgaacttcgatgtcttcggcaacgtctcgcaccaggcgcagacgcggctgtacttcgacctgatccgcaacggcgccgagcagaacttcctccgcctgatgccggtcgacgcgcgccagccgttgctcgacgactggtaccagaacagcggcaagctgaagatgtggatggactaccaggccttcgacgacgacacgccgagcgcgctgggattgccggagaagcagccgaagaaggccttcgccgaagaactgctgcgtcgctacggcgacctcaatgcgcgtcccgacccgatcaaccgctgcctggacggcaactgctatcgaccgggcatcgaccgcgaactgcaggacgccgagcaggccttcagtcgcctggtgagccggccggcggccggcctcaaggtcatcgagcgcttccccgaggcgaccatgctgcggatacgtacgtccagcggcaagcgcgaggtctataccgtgctgcgcaaccgcgcgcacagcaatgtcgccttcatgctcggcgagtcgctgcgctaccagccgggcctggacaccctgacgatctacccgggcgtgctgtccagctacccgaacttcatgttcgatctgccggcgacggatgccgaggccttcgtcggcgccctggaggcggcgaagagcggcgaggacttcgacaaggtggtcgaacgctggggcgtgcgccgcagcaatccgcagttctggagctacttccacgatctcgaggcgtacatccgcgaaaccgaaccggtcgaggcgggcgcgctggacatgaatcgctacgagaacctctga

SEQ ID NO: 318981 - DNA, 519 bp, Pseudomonas aeruginosa
atgaaactgctcgccggcagcttcgccgctctcttcctgagcctttcggcccaggcggcggactgtactttcacccagctggaaatcgtgccccagttcggctcgccgaacatgttcggcggcgaggacgagcacgtccgcgtgatgttcagcaacgaggatcccaacgacgacaaccccgatgcctttcccgaaccgccggtctacctggccgaccgcgacagcggcaacgattgccgcatagaggacggcggcatctggtcgcgcggcggcgtgttcctgagccaggacggtcggcgcgtgctgatgcatgaattcagcggctccagcgccgagctggtgtcctacgacagcgccacctgcaaggtggtgcaccgcgaggacatctccggccagcgctgggcggtggacaaggacgggctgcgcctgggagagaaatgctcgggcgaatccgtcgacagctgcgcgaagatcgtgacgcgttccctcgcgccgttctgccagaccgcaaagaaatga

SEQ ID NO: 318982 - DNA, 465 bp, Pseudomonas aeruginosa
atggacagtctcgatcaatgcatcgtcaacgcctgcaagaacagctgggacaagagctacctggccggcaccccgaacaaggacaactgttccggcttcgtccagtcggtggccgccgagctgggcgtaccgatgccccgcggcaacgccaacgccatggtcgacggcctggagcagagctggaccaagctcgcctccggcgccgaggccgcgcagaaggcggcccagggcttcctggtgatcgccggcctgaagggccgcacctacgggcacgtcgcggtggtcatcagcggtccgctgtatcggcagaagtacccgatgtgctggtgcggcagcatcgccggcgcggtcggccagagccagggcctgaagtcggtcggccaggtgtggaatcgcaccgaccgcgaccgcctcaactactacgtctactccctggccagttgcagcctgcccagggccagttga

SEQ ID NO: 318983 - DNA, 3705 bp, Pseudomonas aeruginosa
atgtccagcccgctcaccgatcgcagcgcccgcctgcaagccctccagcacgccctcagggaacgtatcctgatcctcgatggcggcatgggcaccatgatccagagctacaagctggaagaggccgactaccgcggcgagcgcttcgccgactggccgagcgacgtgaaaggcaacaacgacctcttgctgctgagccgcccggacgtgatccaggccatcgagaaggcctacctcgacgccggcgccgacatcctcgagaccaacaccttcaacgccacccaggtgtcccaggccgactacggcatgcagtcgctggcctacgaactcaacgtcgaaggggcgcgcctggcccgccaggtggcggacgcgaagaccgccgagaccccggacaagccgcgcttcgtcgccggcgtgctcggcccgaccagccgcacctgctcgatttccccggacgtgaacaaccccggctaccgcaacgtcaccttcgacgaactggtggagaactacgtcgaggcgacccgcggcctgatcgaaggcggcgccgacctgatcctgatcgagaccatcttcgacaccctcaacgccaaggcggcgatcttcgccgtccagggcgtgttcgaggaactcggcgtggagctgccgatcatgatctccggaaccatcaccgacgcctccggccgcaccctgtcgggccagaccaccgaggccttctggaactcggtgcggcatgcccggccgatctcggtaggcctgaactgcgccctcggcgccaaggaattgcggccgtacatcgaggaactgtcgaccaaggccgacactcatgtctcggcccaccccaacgccggcctgccgaacgccttcggcgaatacgacgaatcgccggcggaaatggccgtggtggtcgaggaattcgccgccgccggcttcctcaatatcgtcggcggctgctgcggcaccaccccggcgcacatcgaggcgatcgccaaggcagtggccaagtacccgccgcgggccatcccggagattccccgggcctgtcgcctgtccggcctggagccgttcaccatcgaccgcagctcgctgttcgtcaacgtcggcgagcgcaccaacatcaccggttcggccaagttcgcccggctgatccgcgaggaaaactacgcggaagctctcgaggtcgcccagcagcaggtggaagccggcgcccaggtgatcgacatcaacatggacgaaggcatgctggactcgaaggcggccatggtcaccttcctcaacctgatcgcctccgagcccgacatctcgcgcgtgccgatcatgatcgactcctccaagtgggaagtgatcgaggccggcctgaagtgcatccagggcaagggcatcgtcaactcgatctcgatgaaggaaggcgtcgaggccttcaagcaccatgcccgcctgtgcaagcgctacggcgccgcggtggtggtgatggccttcgacgaggacggccaggccgacacccaggcgcgcaaggaagaaatctgcaagcgctcctacgacatcctggtcgacgaagtcggcttcccaccggaagacatcatcttcgatgcgaacatcttcgccatcgccaccggcatcgaggaacacaacaactacgcggtcgatttcatcaacgcctgcgcctacatccgcgacaacctcccctacgccctgagttcgggcggggtgtccaacgtgtccttctcgttccgcggcaacaacccggtacgcgaggcgatccactcggtgttcctctactacgcgatccgcaacggcctgaccatgggcatcgtcaacgccggccagctggaaatctacgacgagattccgaaagcgctgcgcgaccgggtcgaggacgtggtgctcaaccgcacgcccgaggccaccgaggccctgctggcgatcgccgacgactacaagggcggcggcgcggtcaaggaggccgaggacgaggaatggcgcagctacagtgtcgagaagcgcctcgagcatgcgctggtcaagggcatcaccacctggatcgtcgaggacaccgaggaatgccgccagcagtgtgcgcgtcccatcgaggtcatcgaaggtccgctgatgtccgggatgaacgtggtcggcgacctgttcggcgccggcaagatgttcctcccgcaggtggtcaagtccgcgcgagtgatgaagcaggcggtggcccacctgattcccttcatcgaggcggagaaaggcgacaagccggaagccaagggcaagatcctgatggccacggtgaagggcgacgtgcacgacatcggcaagaacatcgtcggcgtggtgctcggctgcaacggctatgacgtggtcgacctcggcgtgatggtgccggcggagaagatcctgcagaccgccatcgccgagaaatgcgacatcatcggcctgtctggcctgatcacgccgtcgctggacgagatggtccacgtcgccaaggaaatgcagcggcagaatttccagttgccgctgatgatcggcggcgccactacctcgaaggcgcataccgcggtgaagatcgatccgcagtacagcaacgacgcggtggtctacgtcaccgacgcctcgcgcgcggtaggcgtggccaccagcctgctgtccaaggagctgaaggccgactacgtggcccgcacccgcgccgactacgcggtggtccgcgaacgcacggccaaccgcagcgcccgcaccgagcggcttagctacgaacaggcgatcgccaacaagccagcgttcgactgggccggctaccaggcgccgacgccttccttcaccggcgtcagggtgctcgacgagatcgacctcgcggtgctcgccgagtacatcgactggacgccgttcttcatttcctgggacctggccggcaagtacccgcgcatcctcaccgacgaggtggtcggcgaggccgccacctcgttgttcaacgacgcccaggcgatgctgaagaagctgatcgacgagaagctgatcaaggcccgcgcggtgttcggcttctggccggccaaccaggtcgagcacgacgacctggaggtctacggcgccgatggcgagaccctcgccaccctgcaccacctgcggcagcagacgatcaagccggacggcaagccgaacctgtcgctggccgatttcgtcgcgccgaaggaaagcggcgtgcgcgactacatcggcggcttcatcaccaccgccgggatcggcgccgaggaagtggccaaggcgtacgaagccaagggcgacgactacaacagcatcatggtcaaggcgctcgccgaccgcctcgccgaagcctgcgccgagtggctgcacgagcgggtgcgcaaggagtactggggctacgcccgcgacgagcacctcgacaacgaggccttgatcaaggagcaatacgtcggcatccgcccggcaccgggctacccggcctgccccgaccataccgagaaaggcaccctgttcgaactgctcgatccgcagggcctgtccggcgtcagcctgaccgagcactacgcgatgttccccgccgcggcggtcagcggttggtatttcgcccacccgcaggcgcagtacttcgcggtcggcaagatcgacaaggaccaggtggaacgctacagccagcgcaagggccaggaagccagcgtcagcgagcgctggctggcgccgaaccttggctacgatgactga

SEQ ID NO: 318984 - DNA, 363 bp, Pseudomonas aeruginosa
atgaaattcctcactcccgagcagatggaaaagccgcgcaagcgccgcctgcgcaagaaactgcgcctgggcgagttccaggagttcggcttcagcttcgaactgacctacgaccgcaacgtcctctcccacgacgatgcgctggaccatctgatcgacttcgtcgaggcccagggctgggtgttcggcggtggcggctcgccggaacaggcggagatcagcggctacctgtgcctggcgcgggtcggcagcctggacgaggcggaccgggaaagcgcccgcctgtggctggaagcccaaccctggtgcaagaccttcgaggtcggcccgttgagcgactgctggcacaacttcttcgagtga

SEQ ID NO: 318985 - DNA, 498 bp, Pseudomonas aeruginosa
atgagtgcgaaaatggacgagcaggcgcttctggcgttgctccgcgagctggccatcgacagccagcgggtcgagcatcccgcgatcgcctccatcgaggaatattacgcgcagggcatcgaattgcccgaccagggcatcaagaacctgttcctgcgcaaccgcaagggtactcgccactacctggtgctgctcgacgagcgcaaggaggccgacctgccgggcatcgccgaacagatcggcgaaagccgcctgtcgttcgcctcggtcgagcgcctgcgcgaatacctcggcgtcgaactgggctgcgtgacgcctttcgcgctggtcaacgatccgcagcacagggtcgaggtgttgctcgacgatgccatccgccaggaccagttgctcggtttccacccgttggtgaataccgccaccgagtgcatccgctacgcagacctgctggctttcctcgcccacacggggcatgaaccgcgcctgatccgggtgtag

SEQ ID NO: 318986 - DNA, 303 bp, Pseudomonas aeruginosa
atgaaattcgtccaccagcgcgaacacctcaacgaagacgacatcgtggtcatcgagtgctcgcagcaatgcaatatccgcctgatgaacgacgccaatttccgcagtttcaagaatggcgggcggcatagctaccatggcggcgccttcgaccgcttcccggcgaagatcaaggtgcccagcaccgggttctggaacatcaccatcgataccgtgacccggcgcccgatcagcgtgacgcgcaagccgaacttcaagtggtcgatcaagttcgtgcgccgttccggttcgcagttcacctga

SEQ ID NO: 318987 - DNA, 1041 bp, Pseudomonas aeruginosa
atgcgtagccaagacctccaccagcgcctcgccgatctcggcgccaagcccctgcattgcgggaggatcgtccgcgcctggctgcagggccgcgccctcgatgcctgcaccgcccgccagcgggccgaggacttcctgccgctgggcgtacgccatggtctgccccaggtagcagcggaactggaaggcatcgcccgcctgcacagcgagcatccggcgagcgacggctcgtcgcgcctgctggtggaactggccgaccggcagatggtggaaagcgtgctgctgccgcgcggtgggctgtgcgtctcgacccaggtcggctgcgcggtcggctgcgtgttctgcatgaccggccgcagcggcctgctgcgccaggtcggcagcctggagatggtcgcccaggtggtcctggcgcgccgtcggcgagcggtgaagaaagtggtgttcatgggcatgggcgagccggcgcacaacctcgacaacgtcctcgaagccatcgacctgctcggcaccgatggcggcatcggccacaagaacctggtgttctccaccgtcggcgatccccgcgtgttcgagcgcctgccccggcaacgggtgaagcccgccctcgccctgtccctgcacagcacccgcgccgaactgcgccggcaactgttgcccaaggcgccgccgctgagcccggaagaactggtggaagccggcgaggcctacgcccgccgggtcgactatccgatccagtaccaatggaccctgctcgaagggatcaacgacagcctggaggaaatggacggcatcctgcgcctgctcaagggccgcttcgcggtgatgaacctgatcccctacaacagcatggacggcgacgcctaccggcgcccgagcggggagcggatcgtcgagctggtgcgctacctgcacagccgcggcgtgctgaccaaggtgcgcaactcggccggccaggacatcgacggcggctgcgggcaactgcgcgccagggccacgcagggcacggtggaacggcgcatccccgcccgccaggcctga

SEQ ID NO: 318988 - DNA, 228 bp, Pseudomonas aeruginosa
atgggtatcgagacggaagaaccgaaccagaagccgccgaccttctggcagatgctgcatagcgtgatggctgccgccttcggcgtacagagcgggcgaaaccgcgcccgcgacttcacccacggcaagcccgtgcacttcatcatgctgggcctgctcttcaccctggtgttcgtgctgttgctggccgggatcgtgaaactggtgctgagcctcagcggcctgtga

SEQ ID NO: 318989 - DNA, 1659 bp, Pseudomonas aeruginosa
atgtacgtatacgacgagtacgaccaacggatcgtcgaggaccgcgtcaagcagttccgcgaccagacccgccgttacctggcgggtgaattgaccggtgaggagttccgcccgctgcgcctgcagaacggtctctatatccagcgctatgccccgatgctgcgcatcgccgttccctatggcctgctctcctcgcgccaactgcgcaagctggcgcagatcgcccgcgactacgacaagggctacgcccacatcagcacccggcagaacgtgcagttcaactggccggagctggaagacgtgccggaaatcctcgccgagctggccaccgtgcagatgcacgcgattcagaccagcggcaactgcatccgcaacaccaccaccgaccagttcgccggcgtcgcccgcgacgagctggtggacccgcgcccctggtgcgagatcatccgccaatggtcgaccttccaccccgagttcgcccacctgccgcgcaagttcaagatcgcggtgaacggcgcggtgagcgaccgtgccgccatcgaagtgcacgacatcggcctggaggcggtgaagaacgaggccggcgagctcggcttccgcgtctcggtcggcggcggcctgggccgaacccccatcgtcggcagcttcatcaatgaattcctgccctggcagcacctgctcggctacctggatgccatcctgcgcgtctacaaccgctatggccggcgcgacaacaagtacaaggcgcggatcaagatcctggtcaaggcgctgaccccggaagtcttcgccgagcgcgtcgaggccgaatgggccaacctcaaggacggaccgagcaccctcaccgaggcggaagtccagcgcgtcgccgcgcatttcgtcgatccggcctacaaggccctcgacgacctcgacgagtccctcgcccggctcgacgcggagcaccccggcttcgcccgctggcgcgcacgcaacaccttcgcccacaagaagcccggctacgtcgccgtgacgctctcgctgaagcccaccggcaccgcgccgggagacgtcaccgacaaacagctggaggccatcgccgatctcgccgaccgctacagcttcggcgaggtgcgcaacagccataaccagaacatcattctcgccgacgtcgagcagggcgaactcttcgccctctggggcgaactccgcgaactgggcttcgccacccccaacgtcggcctgctgaccgacatcatctgctgccccggcggcgacttctgctccctggccaacgccaagtcgatcccgatcgccgaagccatccagcgccgcttcgacaatctcgactatctattcgacatcggcgacatcgacctgaacatctccggttgcatgaacgcctgcggccatcaccatgtcggccacatcggcatcctcggggtcgacaagaaaggcgcggagttctaccaggtctccctcggcggcagctcggcgcgcgacgccagcctcgggcagatcctcggcccgtccttcgcccaggagcagatggccgacgtgatcgacaagatcatccaggtctacgtggaacgccggaccgaggaagaacccttcatcgacaccttccgccgtatcggtatcgacccgttcaaggagcgcgtatatgcagcgaatcattaa

SEQ ID NO: 318990 - DNA, 498 bp, Pseudomonas aeruginosa
atgcagcgaatcattaaggaccgccaggtggtcgacgaccgctggcacttgctgcccaaggacgcgaccctggaaagcgtacccaacagcgacgacgtgatcatcccgctggccctgtggctcgagcacggcccggccctgcgcggccgcgacggcggcctgggggtctggctggacgcggacgaggagccggaaagcatcgccggcgacctcgacaggttccaggtggtcgcggtgaacttccccgcctttaccgatggccgcggcttcagcagcgcgcgcctgctgcgcgagcgctacggctacaagggcgagatccgcgcgatcggcgacgtgctgcgcgaccagttgttcttcatgcgccgctgcggcttcgacgcctatgccatccgtgccgaccgcagcccggaagacgccctggccagcctggacgacttcagcgaggtctaccagacctcggtggagcagccgctaccgctgttccgccgccgcggctga

SEQ ID NO: 318991 - DNA, 582 bp, Pseudomonas aeruginosa
atgggccgttcttcccgcaaagacgagattctccaggccgccctggcctgcttcagcgagcatggcgtagacgccaccaccatcgagatgatccgcgaccgttccggagcgagcatcggtagcctctaccaccatttcggcaacaaggaacgcatccatggcgaactgtacctggccgggatcggccagtacgcggcgttgctcgaagccggcttcgccagggcgcgcagcgccgaggaaacggtcaggttgctggtcaccagctacatcgactgggtcgtggcgaatcccgactgggcacgcttcatcctgcacagccgcgggcgggtggaggcgggggagctgggcgagcgcctgcgggccgacaaccaggcgcacttcgcacggatccatgcggcgctggcgggatatcgggccgagggcctgttccgcgagatgccggacgactgctttgcttcggtggtgatcggcccggcccacgaccttgcccgccagtggctggccgggcgaacccgggtggcgttggccgactgtcgcgaactgctggcgcaggtggcctgggacagcgtgcgggcggcctga

SEQ ID NO: 318992 - DNA, 438 bp, Pseudomonas aeruginosa
atgagtcagatgatgcagatgtaccagcaggtcggcccggcccagttcagcgccatgatcggccagttcgcaccctatttcgccagcatcgccccgcagttcgtcgaactgcgtcccggctatgccgaagtcaccttccccaagcgccgcgaggtgctgaaccatatcggcacggtgcatgccatcgccctgtgcaatgccgccgaactggccgccgggaccatgaccgacgcctcgattcccgccggccatcgctggattccgcgcggcatgaccgtcgagtacctggccaaggccactggcgacgtgcgcgcggtggccgacggcagccagatcgactggcaagccaccggcaacctggtggtgccggtggtcgcctatgtcgacgacaagccggtattccgcgccgagatcaccatgtacgtcagccaggcctga

SEQ ID NO: 318993 - DNA, 876 bp, Pseudomonas aeruginosa
atgaaccctccgcaaccacgcctcatcgataacggcaacggccatccgctggccagccattggtaccggcctgccggggagccgcgcggctatctcctgatcgtcccggcgatgggagtggaacagcgcttctacgcgcccttcgccgcctggctggcagagcgcggctacctggccatcaccttcgactacctgggcatggggcaatcgcgcaacggctcgctgcgcggtctcgaggtcgatgtgctgggctgggcccgtcatgactgcagtgccatgctcgccgccgcgctcgccgagagcgggagcaagcccctgtactggatcggccatagcctgggcggccagatcctgcccttcgtcgaagggcgcgagcgtatcgatagggtcttcagcatcgccagcggcagtggctactggaaggaaaacagcccgcggttgcgcaacaaggtctggttgttctggtacctcgtcgcgcccctgctgacgccgctgctcggctattttcccgggcgccgcctgggcatggtcggcgacctgccgcgcggggtgatcgaacaatggcgacgctggtgcctgcatccgcagtacgccctcgcggatggcgaggccatccgccgcgccttctccgccgtacgcacgcccatcgtgtcgctgtcgttcaccgacgatgaaatgatgtcccgacgcagcatcgagtcgctgctgggcttctaccgcgaagcgccgaaaaccgcctggcgcatcgctcccgaggaaatcggcgcccgccacatcggccatttcggcttcttccggccgcagttcgccgaatcgctatgggcgggctacctgttgccggagctgggctccggcaacgccctcagccgaggttga

SEQ ID NO: 318994 - DNA, 993 bp, Pseudomonas aeruginosa
atggctgtattcaaggcgttgtgggtgacggaagcgccccacggcgtttacgaaacgcaggtggtcgagcgcgataccggcgacctgccggcgggcgacgtactgatccgcgtgcagtattcctcgctgaactacaaggatgcgctgtccgccagcggcaaccgcggggtgacccgcaagtacccgcatacccccggcatcgatgccgccggtgtggtcgccgagtcctcggtggccgagttcgcggccggcgacgaggtgatcgtcaccggctacgacctgggcatgaacaccgccggcggtttcggccagtacatccgcgtgcccgcggcctgggtgatcaagcgcccgcaaggcctgagcctgcgcgaggcgatgatcctcggcaccgccggcctgaccgcggcgctctgcgtcgaaaagctggagcgcagcggcctgcgccccgaccatggctcggtgctggtcaccggcgccagcggcggggtcggcagtatcgccgtggaactgctggccaagctcggctacaccgtggcggccgccaccggcaagctggagcaggccgagttcctcaaccgcctgggggccaagcagatcctcgatcgcgccaccgtggccgatggcgtcgacaagccgttgctcaaggaacagtgggccggcgcggtggacaccgtcggcggcgacatcctcttcaacgtggtcaagtcgttgcagtacggcggcagcgtcgcctgctgcggcctgaccgccggcgccggcttcaaggcctcggtgctgccgttcatcctgcgcggggtcaacctgctcggggtggactcggtggagctgccgctggtggtcaaggcatccatgtgggacaagctgtcgctgcaatggaagctcgacaacctcgaagaggtggcgcgcgagatcgccctcgaagagctgccgggggcgatcaaccagatcctcgccggcaagctggtcggccgggtgctggtcaacctcggctga

SEQ ID NO: 318995 - DNA, 1026 bp, Pseudomonas aeruginosa
gtggagttcattgccgaatatgcgggctttctggccaggaccgtgaccgtgctggcggcgatcatcgtggtgctggtggtgatcgtcgccctgcgcggccgcggccggcgcggcgcaggcgggcacctcgacgtgcagaagctcaacgatttctacaaggacctgcgcgagcgggtccgccacagcgtcctcgacaaggccagcctcaaggccttgcgcaaggaggagagcaaggcggcgaagcaggcgaagaaacatcctgaacagaagtcgcgggtctacgtgctcgatttcgacggcgacatcaaggcctcggctaccgagcaactgcgccacgaagtgactgcggtgctgagcatggcgggcaaggacgacgaggtggtgctgcgcctggaaagcggcggtggcatggtccatggctacggcctggcggcctcgcaactggcgcgcatccgccaggccggcgtgccgctgaccgtgtgcgtcgacaaggtggcggccagcggcggctacatgatggcctgcatcggcgatcggatcctttccgcgcccttcgccatcctcggctcgatcggcgtggtggcgcagttgcccaacgtccaccggctgttgaagaagcacgatattgacttcgaggtgcttaccgccggcgaatacaagcgtacgctgacggtattcggcgagaacaccgagaagggccgggaaaagttccaggaggacctggaggtgacccacgaactgttcaagaacttcgtggcccactaccggccgcaactgaacatggacgagatcgccaccggcgaggtctggctgggccaggccgcactgggcaagctgctggtggacgaactcaagaccagcgacgagtacctggccgagcaggccagggagcgcgatgtctaccaggtgcaattcgtcgagcgcaagagcctgcaggaacgcgtcggcctggccgccagcgtggttatcgaccgcgtgctggtgacctggtgggggcggctcaaccagcagaagttctggcaatag

SEQ ID NO: 318996 - DNA, 711 bp, Pseudomonas aeruginosa
gtgggcagcatctacctgattcgacatggccaggcgtcgttcggtgccgacgactacgacgtgctgtcgccgaccggcatccgccaggcggaaatcctcggcgaccacctgctgaacctcggcgtccgtttcgaccgcgtcctcagcggcggcttgcgccgccagcagcacaccgcccgcgccgccctcgaacgcctggagtcctccgggctggccacgccggagctggaagtcgatccggcgttcaacgaattcgaagccgacgcggtgatccgcgcgcacctgccggacctgctcgatgagcagccggaagccttgcacatccttcgccatgcggccgagcatcgggccgagttccagcgcctgttctccaccatcatcgcgcgctgggtttccggcaaccatgagaaagatgggctggaaagctggcaggaattcctcgataaggtccatgacggtcttcgtcgtctgctggcgcaggccagcggcaaggacagggtcgccgtgttcacctccggcggtaccatcaccgccctgctccaactgatcgtcggcgttccgccgctcaaggccttcgagctgaactggcagatcgtcaatacctcgctgactcgcctgaaattccgcggcgaggaagtgtccctggcttccttcaacagtcacgtgcacctggaactgttgaaggcgccggaactcatcacctatcgatga

SEQ ID NO: 318997 - DNA, 315 bp, Pseudomonas aeruginosa
atgaccaccgttgctgacatcgtctccaccatgaaaagcaagttcaacgccagcgcggccgccggcctggatctggtgttccagttcaacatcgaagacggcgacaaccactacctggtcgtcaaggacggtacctgcgaagtggtacagggcgacgccgagaaccccaacgtcaccctgatcatggacagcgaaaccctgaagggcatcaccagcggcgagaccgatggcatgcaggccttcatggccggcaagctgcgcgccgaaggcgacatgatgctggcgatgaagctgggcgaactgttcccggtctga

SEQ ID NO: 318998 - DNA, 1071 bp, Pseudomonas aeruginosa
atgtcgctgaccgaccaatccactcgcatccgcgccggcgaagaactcgacgccgccgtcatcgacccgtacctgaaagcccatatccccggcctcgaaggcaccccgaagatcagccagttccccggtggcgcgtccaacctgacctacctgatcgagtatccgcgccaggagttcgtcctgcgtcgcccgccattcggccacaaggccaagtcggcccacgacatgggccgcgaataccgcatcctgaaccagttgaacgcaggcttcccctactgcccgaaagcctacctctactgcaccgacgagtcggtgatcggcgccgagttctacgtcatggaacgggtcaagggcatcatcctgcgcgccgaactgccgcctgagctgaatctcgacgaacaacagacccgcagcctgtgcaagagcttcatcgacaagttcgtcgaactgcacaacgtcgactacgccgcctgcggactggccgacctgggccgcccggacggctacgtgcagcgccagatcgccggctggaccgaccgctacgagaaggccctgacccccgacgcgccgctctgggaaccggtcaaggcctggctcaaggacaagcagccggccgatcaccacaagccgggcatcgtgcacaacgactaccgcttcgacaacgtgatcctcgatccggacaacccgatgcagatcatcggcgtgctggactgggaactggccaccctcggcgatccgctgatggacctcggcaacaccctcgcctactgggtggaagccggcgacccggctccggtgcaactgacccgccgccagcccagccacctgccgggcatgctgacccgccgggagttcgccgactactacgccgagcgggccgggatcccgccgatcgacaacttggacttctactacacctatggcctgttccgtcttgccggcatcgtccagcagatctactaccgctactaccacgggcagacccaggacaagcgtttcgcccagttcgtgcagatgaacaagctgctggagcagatgagcctgcaggccatcgagcgctcccgcctgtaa

SEQ ID NO: 318999 - DNA, 768 bp, Pseudomonas aeruginosa
atgtccaagacccacctgttcgacctcgacggcaagatcgccttcgtttccggcgccagccgcggcatcggcgaggcgatagccaagctgctggcccagcaaggcgcccacgtgatcgtctcgagccgcaagatcgatggctgccaggcggtcgccgacgcgatcaccgcggagggcggcaaggccaccgcgatcgcctgccacatcggcgagatggagcagatccagaacgtcttcgcacagatccgcgagcagttcggccgcctcgacatcctggtcaacaacgccgccaccaacccgcagttctgcaacgtactggaaaccgacctcggcgccttccagaagaccgtcgacgtcaacatccgcggctactacttcatgtccatcgagggcggcaagctgatgaaggaacacggcggcggcagcatcatcaacgtggcctcgatcaacggcgtatcgcccggcgagttccagggcatctactcggtgaccaaggccgccgtgatcagcatgaccaaggtcttcgccaaggaatgcgcgcagttcggcatccgctgcaacgccctcctgccagggttgaccgacaccaagttcgcttcggcgctggtgaagaacgacgcgatccgcaacctcgccctgcagcgcatcccgctcaagcgcgtggccgagccgagcgaaatggcaggcgccgtgctctacctggctagcgaagcgtccagctacaccaccggcgtggcgctgaacgtcgacggcggcttcctttcctga

SEQ ID NO: 319000 - DNA, 762 bp, Pseudomonas aeruginosa
atgcacactcattctccaatcccccgtaccgccctggtcaccggcggctcgtcgggcatcggcctggccatcgcccggcgccttcggcaacagggttatcggatcgccctggtggcccgtgattcccagcgcctgcaacgcgctgccgccgagttgggcggtgtgccctggatggccgccgatctttcccgccgcgaagctgtcgaggcggtggccgcctgggttggcgacaccttccaggggctcgacgtgctggtgaacaacgccgggttcacccgaaagatcgccgccaccactccgctggctgaggccgagcgggaatgggatgcgctgctggacggcaacctgaaaagcgcgttcctcatgtcgctggcggtgttgccgcatttcgcggaagagggcgggcggatcatccatatcggatcgatcgctgcgcagaccggtagcggcagtcccggtgcgctgggctatgcggcagccaaggccggcctgcatggcttcggcgtggccctggcgcgggaactcggttcgcgcgggatcacggtgaacagcgtggcgccgggttacatcgccgacacccggttctttcccggcggcctcgatccgcaacgggtcgccgccatcgtcggcgagaccccgctgggcaggaccggccgggtcgaggacatcgccgcggcggtggcctggctggcctcgcccgaggcggggttcgtcaccggaacggtggtgtcggtgaacggtggctggcgggtcggcaactga

SEQ ID NO: 319001 - DNA, 906 bp, Pseudomonas aeruginosa
atggccgacttacgccagttccgccagttcgtcgcggttgccgaggagctgagcttccgccgcgccgctgagcgcctgcacatggcccagccaccgctgaccactgcgatccggcggctggaagaagaagtcggcgccagcctgctggagcgtgacaaccgtatccaccgcctgacgccggcgggccgcgcgttcctcgacgaagcccggcgcaccctggcccaggccgaacgcaccctggcggccgcgcgcagcgccgccagcggacgcagaacgttgcgcctggcgttcgtcgacagcaccatcaatattctgctaccgcgcatactccaggcgttccgccaacagcatggcgcgctggacttccagctccaggaagacaccaccgcggggcaactggaggcgttgcgcgaagaccgcatcgatgccggcctgatcgtcctgccggtcgaccgccagcccggcctgtacacacatctactggtggacggcgacatgcgcgtggcattgcccgaagggcatcggctggcacgccatgcgcgcctgcgcctggaacaactggccggagaaccctggctgctgtttccacggcactatgggccgggcatgcacgacctgatcgtcgccgcctgcgcggcagccggcttcgtcccggaggtggtgcaggaggcgcggcagatgcagaccatcgccgggctggtggccggcggcatcggcgtcgcgctagtgccttcgctgctacaaccgttgcgcccgccgggggtcacctttcgtcccctgcaagggcggcgggcgcgaattccctatcggctggcgctggcctaccgcacgccgtcggaactcatcgaacgctttcgcgaaaccgcccaggcgatcgccgccgccccggcttttcgcatggcctag

SEQ ID NO: 319002 - DNA, 645 bp, Pseudomonas aeruginosa
atgcagtacgacggtctggcctgggcattcgcgttactggccttgctggccgccctggtcgcggtgcgcatcctcttcgaacgcacctggttcctcggctggctgcgcggcacctgcggcttggccttcgtcgccgtggcggcgctgctgctggtgctcgcctgggacctgcgcagctattcgctgctcaagcccgagcagccgatggccaccctgagcttccaggccgaagggccgcagcgctaccgggtgctgatccaggagggcgccaacgagcgcagcgtggtgctggacggcgaactctggcaactggacgcgcggattttccgctggaaggggctggccgcgttgatcggtctggcgccgggctatcgcctcgacgcgctcagcggccgcttcctggccctcgagcagcagtcccggggtcgccgcctgggcttgtcgcagagtccgctgggggtcgatctctggcgctggctgcgggccggcgagcacgacctgttcctgttcgagccgctggcggggcgggtgactttcctgccgatggcggacaaggcggtgttcgcggtgaactacggcgtcgccgggctgcttgccgagccgatgaacctggcggccgaggaggcgctcagggactggcgctag

SEQ ID NO: 319003 - DNA, 780 bp, Pseudomonas aeruginosa
atgcccttcgaactcgcgatagaccccagcaccctgatcatcctggccgtggtggcctttctcgccggcttcatcgacgccatcgccggcggcggcggcctgttgaccatccctgcgctgctcaccgccggggtcccgccgcacctggcgctgggtaccaacaagctgagctcgaccttcggtgcggcgaccgccagctacaccttctaccagcgcaagctgttccatcccgggaagtggcgcaacggtttgctcgccaccgcgatcggcgccgccataggcgcctgggcggctcacctgctgcccgccgagtggctgaaccggatgctcccggtggtggtattcacctgcggcctctacatgctcttcggcggcacgccgaaggcgccgctggacgccgatgcgccgctcggacgcaagcgccagtggccgcagggcctcgccctgggcttctacgacggcgtggcgggaccgggcaccggagcgttctggaccgtcagctcgctgctcatgtacccgctggacctggtccgcgccagcggtgtggcgcggagcatgaacttcgtcagcaacatagtggcgctggcggtgttcatcgcctccggccaggtgatctggttgctcggcctgtgcatgggtgcgtcgctgatggtcggcgcctatttcggcgcgcgcaccgccatcggcggcggggcgaagttcattcgcccggtgttcatcctggtggtcctggcgctgaccgcgcggctagcctggcagcactggttcagcggcgcctga

SEQ ID NO: 319004 - DNA, 837 bp, Pseudomonas aeruginosa
atggccggcgagttccgctggcaggcaggtcggccggctaccgcccaggtcggcggctgggtgctcgcgcactgtcagcagcgcttcctccaggacgacaacggcctgctgttcccccgcgaatggctgaagcgccaggaactcccgctgctcgccgaacatggggtcggccattggcagggcgagccggtctacgtgctggaactggacgagccgatcgagctgccgggcatggcctgggcgccgttgcggcagttcatgctgcacggcgatttcgatcagttctgcatgctcggctatgccagccagatcggcatctgggcacgtcacaaccggttctgcggcaattgcggcacacgcatgcaggcgcaggaccacgagcgggtgatgcagtgtccgcagtgcgggctgcaccagtacccgcgcctgtcgccgagcatgatcgtcctggtgacccggggcgacgaggtgttgctggcgcgttcgccgcgcttcgtgccgggggtctacagtaccctggccggcttcgtcgaggccggcgagtcggtggagcagtgcgtggtccgcgaggtgcgcgaagaggtcggggtggaggtcgccaatctcgaatacatcggcagccagaactggccgttcccgcattcgctgatgctcggtttccacgccgagtacgtgtccggcgagatcgtcccgcaggaagacgagatcgaggacgcccagtggttctccctcgatgccttgccgccgctaccggcgcagcgctcgatcgcccggcacctgatcgacctgtacctggcgcgccgctcaggcgccgctgaaccagtgctgccaggctag

SEQ ID NO: 319005 - DNA, 1689 bp, Pseudomonas aeruginosa
atggtcacaggagccacgtccctcagtctggtgcgcgacgagttgttcgccaccatggaacaggccgaacagggtcttgagcagttcattgccgagcggcagaacggcagcctgctgcagcacgccgtcgaatgcctgcaacagatccgcggcaccctcaacctgatcgagctggccggcgccgagctgctggcccaggaagccctgcagctggcgaccgacattcccaccggcgtcagcgaggagcgcgacggccagctggcagccctgggcaacgccctgtacgtgctgcgccgctacctggagaacgtcgaggccaatcgccaggagatccccgagctgctcttgccggcgatcaacgaagtgcgctgtgccgcagggcagccggcgctgccggaaagcttcttcttcagcgcccgcctggatatcccgcggccgccgagcactgccatcgaccacctgccttccgaagccgaactgggcgaggaaagccggcggatgcgccacatgtaccagatcggcctgctcggcctgatccgcgaacagaacctctatcccagcctcaagctgatgggccgcgcgctggcgcgcctcgacagcctgcacggcggggtggcccgttcgcggctgtgctggatcggcgccgcggcgatcgagtcgatcgtcgatggccaactgttgccgcgcaagtcgcgcaagcaactgttctcgcgcatcgaccgcgagctcaagcaattgctgatcggcccggcctacgaggcgccgcgccatctgctcaaggaactgctttacctggtggcgctgtccgacggccagggcccgcgttcgcgcgaggtccgcgaactgcatgggctggcgccgctgccgttcaccgaccacctgctggaagaggaatcgcagcgcctgtccggccccggccagtcggtgatgcgttcgctgtccacggcgatccgcgaggaactcgccggggtcaaggacatgctcgacctgatcgagcgcggcgtggcccagccggatagcctgaccaacctgcatgcgcaactgggcaagctgagcaagaccctcggcatggtcggcctgaactcggccggcaccgccctgcagacccagctacccaccgtggccgcctgggctgccagcggcgtcgccgattcgccgccggcgttgctgcgcctggccgatgcggtgctctacgtggaaagcatggtcggcaacctcgagcgcggcgagcgccgcatcatccggccgactccggcggagcccgggcaggaagccgatgcgttcgccgtgcaccagttggccgaggcgcgcatcgtggtgatcgaggaggccaaggccggcctggccctggccaagcgtgcgatcaccgcgtacctggaatccaatggcgacaagctcaacctggccaacgtcccggccagcctgcaggcggtccggggcggtctctggttcctcggtcaggagcgcgccgcgctgctggtcggcggctgcgccgactacatccagcagcgcatgatcgagaccgcgcagatgccttcggaacagatgctggaaaccctcgccgacgccctgaccagtctcgaatactatctcgagggcggtgccgtgctgcgtccgcagggccagccggacgtcctcgacctggccagcgccagcgtcaaggcgctcggactgccggtggccgcctga

SEQ ID NO: 319006 - DNA, 813 bp, Pseudomonas aeruginosa
gtgaccgagtacaacgcattccgtgtggagctggcagacaagatcgcccacgtccagatcaaccgtccggacaagatcaatgccatgaaccaggacttctggcgcgagatcatcgagatcttccgctgggtcgacgataccgacgaagtgcgggtggtcgtgctgtccggggcgggcaagcatttttcctcggggatcgacctgatgctgctggcccaggtcggcagccaactgggcaaggacgtcggccgcaacgccgacgccctgcgtcgcaagattctcgagctgcaggcctcgttcaacgcggtcgacaactgccgcaagccggtgctcgcggcgatccagggctactgcctgggcggcgccatcgacctggtctcggcctgcgacatgcgctactcgaccgccgacgcgcagttctcgatcaaggagatcgacatcggcatggccgccgacgtcggcaccctgcagcgcctgccgcggatcatcggcgatggcatgatgcgcgagctggcctacaccgggcgcatggtcgacggcgaagaggcacggagcatcggcctggtcaatcgtacctacgcggaccaggccgcattgatggatggggtcttcgaactggcgcggcagatcgccgcgaagtcgccgatcgccatccgtggtaccaaggaaatgatccgctatatgcgcgaccaccgggtcgacgacggcctcgagtacgtcgctacctggaacgccgccatgctccagtccgccgacctgcgggtggcgatggccgcgcatatggccaagcagaagccggaattcgctgattga

SEQ ID NO: 319007 - DNA, 1503 bp, Pseudomonas aeruginosa
gtgagcagtcccctgagccaggctttcgcacagaacttcctcgggcattcgccgcgctggtacaagctgacggtgctcgccttcctcttgctcaaccccctgctgctatggctggccgggccggtgacaagcgcctgggtgctggtcggcgagttcatcttcaccctggccatggcgctgaaatgctatccgctacagccgggtggcctgttggtgctggaggcgctgctgcttggcctggctacccccgaggcgctctatgcggaattgcagcacaacttcccggtgctcctgctgctgatgttcatggtcgccggcatctacttcatgaaggacctgctgctcctgctgttttcccgcctgctgctcggcgtgcgctcgaagaccctgctatcgctcctgttctgcctgctggccgccctcctctcggccttcctcgacgccctcaccgtgaccgccgtggtgatcagcgtggcggtggcattcttcgccgtgtatcaccgggtcgcttcggggcagcgcgccagcgaggactacgatcccgccaccgaccgccaggtccccgagctgcaccgggcccatctcgaggaattccgcgccttcctccgcagcctgctcatgcacgcggcggtcggcaccgcgctgggcggcgtctgcaccctggtgggagagccgcagaacctgctgatcggccacgaggccggctggcatttcgtcgagttcttccgccaggtcgcgccggtatccatgccggtactggcggccggcctgctgacctgcgtgctgctggagaagagccgccgcttcggctatggcgcccagttgccggcggcggtgcgccaggtgctcgccgagtacgccgccagcgaaagccgcaaacgcggagcgcagcagaaggccgcgctgctggtgcaggccctggcggcgctggtactgatcgtcgggctggccctgcatgtcgccgaggtcggcctgatcggcctgttggtgatcgtgctgatcactgccttcaccggcgtcaccgacgaacaccagatcggccgcgccttccaggaggccctgccgttcactgcgctgctggtggtgttcttcgcggtggtcgcggtgatccaccagcagcacctgttcaccccgatcatccaggcggtgctggcgctgccgacggaacgccagccgggcatgctgttcatcgccaacggcctgctctcggcgatcagcgacaacgtattcgtcgccaccatctacatcaccgaggtgaaacaggcgctggatgccggccacatgagccgcgagcatttcgataccctggcggtggcgatcaataccggcaccaacctgcccagcgtagcgacgcccaacggccaggcggcgttcctcttcctgctgacctcctccatcgccccgctggtgcgcctgtcgtacggccgcatggtctggatggcgctaccctacaccctggtgatgggcggcctgggctggtgggcggtcagtcattggctttga

SEQ ID NO: 319008 - DNA, 1356 bp, Pseudomonas aeruginosa
atggcggggggagagaaggccggcaagcgcggcatggggttctggacctgcagcgcgctggtgatcggcaacatggtcggttcgggagtcttcctgcttccctccagcctggcggcgttcggcgggctcagcctgttcggctggctggtgtcgagcaccggcgcggtgctgctggcgctgaccttcgcccgcctggcgcgggtcaaccccggcgccggcggcccctacgcctatacccgcgacggtttcggcagcttcgccggctacctgtgcgcctggacctactggaaagccgcctggatcggcaacgcggcgatcgccgtgaccctggtcggctacctgcgggtattcatcccggcgctggcggatccgctgctgatggtcagcgtggccatcgccgcgatctggctgtgcaccctgatcaacctgcgaggcatcggcaccttcagcgtggtgcagaacctgctgaccatcctcaagctgctgccgttgttgctggtcggtatcctcggctggttccacttcaatcccgagcacctggcgatcccggcgcgcagcgagctgccgaacatgggctatgcccaggcgatcgccaccaccgcggcgctgaccctgtggtcgttcatcggcctggagtcggccaccgtgccggccgacgacgtcgaggatccgcgccgcaccattccccgtgcgaccctgttcggcacgctggccgcggcggccctctacatcctctcgatcactgcggtgcagggcctgatgccgccggaggtgctggcccgctccacctcgccgttcgccgacgcggcgcggatcctgatgggcgactggggctactacctggtggctgccggggcggtcatcgcctgcctgggcgcgctcaatggctgggtcctgttgcagggccagatcccggtggctccggcgcgcgacgggctgttcccggagtcgctcggccagctcaacaagaacggcgcgccggcccacggcctgctggcctcggggctgctggtgacggcgctggtgatggtcgacgggcatggcgacctggtcgatgtgttcaacgtgatcatcctgctcggcaccatgaccggggtggtcccctacgcgttctgcaccgccgcgctgttgcaactgctggcggtgcgaccggacgagttctcgccgcgttcacgccggcaattgctggtgatcggctcgctgggcttcgcctactcgctatgggcgctgtatggcaccggccagcaggcgatcttctggggcttcctggtgctgatggccggtatcccaatgtacacctggcggcaatggcgcaaccaggtcaacggagtgccgacgctcaaagccaatgactga

SEQ ID NO: 319009 - DNA, 2256 bp, Pseudomonas aeruginosa
atgtataaagacctcaaatttcccgtcctcatcgtccatcgcgacatcaaggccgacaccgttgccggcgaacgcgtgcggggcatcgcccacgaactggagcaggacggcttcagcattctctccaccgccagctccgccgaggggcgcatcgtcgcttccacccaccacggcctggcctgcattctggtcgccgccgaaggtgccggggaaaaccagcgcctgctgcaggatgtggtcgaactgatccgcgtggcccgcgtgcgggcgccgcaattgccgatcttcgccctcggcgagcaggtgaccatcgagaacgcgccggccgagtccatggccgacctgcaccagttgcgcggcatcctctacctgttcgaagacaccgtgccgttcctcgcccgccaggtcgcccgggcggcgcgcaactacctggccgggctgctgccgccattcttccgtgcgctggtcgagcacaccgcgcagtccaactattcctggcatacgccgggccacggcggcggtgtcgcctatcgcaagagtccggtgggacaggcgttccaccagttcttcggggagaacacgctgcgttccgacctgtcggtctcggtccccgagctgggatcgctgctcgaccataccggccccctggccgaggccgaggaccgtgccgcgcgcaatttcggcgccgaccataccttcttcgtgatcaatggcacttccaccgcgaacaagatcgtctggcattccatggtcggtcgcgaagacctggtgctggtggaccgcaactgccacaagtcgatcctccactcgatcatcatgaccggggcgataccgctctacctcactccggaacgcaacgaactgggaatcatcgggccgatcccgctgagcgaattcagcaaggagtcgattgccgcgaagatcgccgccagtccgctggcgcgcggtcgcgagccgaaggtgaagctggcggtggtgaccaactccacctacgacggcctgtgctacaacgccgagctgatcaagcagaccctcggcgacagcgtcgaggtgttgcacttcgacgaggcttggtacgcctatgccgcgttccacgagttctacgacggacgctatggcatgggcacctcgcgcagcgaggagggacccctggtgttcgccacccactccacgcacaagatgctcgccgccttcagccaggcctcgatgatccacgtgcaggatggcggggcccggaagctggacgtggcgcgcttcaacgaagccttcatgatgcacatctcgacctcgccgcagtacggcatcatcgcttcgctggacgtggcttcggcgatgatggaagggcccgccgggcgttcgctgatccaggagaccttcgacgaggccctcagcttccgccgggccctggccaacgtacggcagaacctggaccggaacgactggtggttcggcgtctggcagccggagcaggtggagggcaccgatcaggtcggcacccatgactgggtgctggagccgagcgccgactggcacggcttcggcgatatcgccgaagactacgtgctgctcgatccgatcaaggtcaccctgaccaccccgggcttgagcgccggcggcaagctcagcgagcaggggattccggctgccatcgtcagccgcttcctctgggagcgcgggctggtggtggagaaaaccggtctctactccttcctggtgctgttctcgatgggcatcaccaagggcaagtggagcaccctggtcaccgaactgctcgaattcaagcgctgttacgacgccaacctgccgctgctcgacgtcttgccctccgtggcccaggccggcggcaagcgctacaacggcgtgggcctgcgcgacctcagcgacgccatgcacgccagctaccgcgacaacgccacggcgaaggccatgaagcgcatgtacacggtgctgccggaggtcgcgatgcggccgtccgaggcctacgacaagctggtgcgcggcgaggtcgaggcggtaccgatcgctcggttggaagggcgcatcgcggccgtcatgctggtaccctatccgccgggtatcccgctgatcatgccgggtgagcgcttcaccgaggcgacccgctcgatcctcgactatctcgagttcgcgcggaccttcgagcgcgccttccctggtttcgactccgatgtgcatggcctgcagcatcaggacggaccgtccgggcgctgctataccgttgaatgcataaaggaatga

SEQ ID NO: 319010 - DNA, 390 bp, Pseudomonas aeruginosa
atgcgcagcgcttatcggatcgtcagcgatcactatgcggcctctagccgtggggacctcgccggaatgctggcggacatggacgaacgcaccgaatggacggaaatggccggtttcccgctggccggcacctatgtcggcgcggccgccatcggcgccggtgtgttccaggccttgcaacgggactgggagggcttcagggtcgagatcgagcgcctgatcgacggcggcgacagcgtggtcgccgtcggtcgatatgcagcgacccaccgtcgcagcggcaagtcgttcgaagcacgtgtggcacacgtatggacggtagaggacggcaggatccgccgtttcgagcagttctgcgacaccttgctggtggaccgggcgacacgctga

SEQ ID NO: 319011 - DNA, 741 bp, Pseudomonas aeruginosa
atgcgtagcgtcgtactggataccgaaaccaccggcatgccggtgaccgatggtcaccggatcatcgagatcggctgtgtcgagctggaggggcgccgcctgaccggtcgccacttccacgtctacctgcaacccgatcgcgaggtcgacgaaggggcgatcgccgtccacggcatcaccaacgaatacctgaaggacaagccgcgcttccgcgaggtcgccaacgatttcttcgaattcatccgcggcgcccagctgatcatccacaacgcggcgttcgatatcggcttcatcaacaacgagttcgccctgctgggccagcaggaccgctcggacgtgaccgagtactgctcggtgctggataccctgctgatggcccgcgagcgccatccgggccagcgcaacaacctcgatgcgttgtgcaagcgctacggcgtggacaactccggtcgcgacctgcacggcgcgttgctcgacgccgagatcctcgccgacgtctacctggcgatgaccggcggccagaccagcctgtcgctggccggcagcggcgcggaaggcgacggcagcggccggccgatggtcagcccgatccgtcggctcgatccggcgcgggtagccaccccggtgctgcgcgccaacgccgaagagctggctgcgcatgcggcgcggctggcggtgatcgagaagtcggcaggtggtccgtcactctgggcgcaactggaggcgccggtcggcgaatag

SEQ ID NO: 319012 - DNA, 447 bp, Pseudomonas aeruginosa
atgacagataaagaacaggtagtgatctataccgacggcgcctgcaagggcaaccctgggcgcggcggctggggggcgttgctcctctacaagggcgccgagcgagagctttggggcggcgagccggacaccaccaacaaccgcatggagctgatggcggcgatccaggcgctggcggcactcaagcgttcctgtccgatccgtctgatcaccgactcggaatacgtgatgcgcggcatcaccgaatggttgccgaactggaagaagcgcggctggaagaccgccagcaagcagccggtcaagaatgccgacctctggcaggccctggatgaacaggtcgcccggcaccaggtggagtggcagtgggtccgcgggcataccggcgaccccggcaacgagcgggccgaccagttggccaaccgtggcgtcgccgaattgccgcgctga

SEQ ID NO: 319013 - DNA, 762 bp, Pseudomonas aeruginosa
atgaacgaaccgcaagccttcgcccagaccgatgccgagtggctggcatcgatcaaccgggcgcgcgactggttccagggcccgctgggcagcctgatgctggccgaggagcgacgcctgttgtgcgacgagctgacccgttacttcggtggctacctggtgcactacgggccgcatgccgaactgccgccgagcaccgggcagattcagcgcggcgtgcgcctggggccgccgctgccgggcgtggacatcgcctgcgaagagggcgcctggccgctcagcgaacatgccgcggacgtggtcctgctgcaacacggcctggatttctgcctgtcgcctcaccgtctcctgcgcgaagccgcgcgtaccgttcgtccgggcggccacctgctgctgatcggcatcaacccatggagcctgtggggcatccgtcattatttcgccggggatgccttgcgccaggcccgctgcattcctccgtcgcgggcctgcgattggctcaacctgctgggcttcgcgctggagaaacggcgcttcgggtgctatcgtccgccgcttgcgtcggcagcctggcaatcgcgcctggctcgcctggagcgctggggcgacgcctggcagtcttcgggcgccggcttctatctattggtggcacgcaagctggtcgtggggttgcgcccgttgcgccagagcaagcgcgaaccgcgcggtcagctggtgcccatgccggtggcgaaagtcagccggcgagattccgaaatttag

SEQ ID NO: 319014 - DNA, 786 bp, Pseudomonas aeruginosa
  misc_feature (326)..(335): n is a, c, g, or t
atgatacagatcgacgccctgtccgccttcaacgacaactacatctggctgttgcaagatgcgacaagccgtcgctgcgcggtggtcgaccccggcgacgccaagccggtggaagcctggctggccgcccatcccgactggcggttgagcgatatcctggtgacccaccaccatcacgaccacgtcggcggcgtcgcggccctgaaggaactgaccggcgcgcgggttctcggcccggccaacgagaagatcccggcccgcgacctggcgctggaagacggcaaacgggtcgaggtgctcggcctggtcttcgagatcttccacgnnnnnnnnnngcccggccataccctcggccatatcgcctactaccacccggcggagacgccgctgctgttctgcggcgacaccctgttcgccgccggctgcggccgtctcttcgaaggcaccccggcgcagatgcatcattccctggcgcgactggccgcgctgccggccaacacccgggtctactgcacccacgagtacacgctgagcaacctgcgcttcgcgctggcggtggagcccgacaacgcagcgctgcgggaacgcttcgaggaagcgacccggctgcgcgaacgggaccgcatcaccctgccgtcggaaatctcgctggaattgtcgaccaatccatttcttcgcgtttcggaaaaatctgttaagaaaaaagccgaccagcggagcggccagcaaaaccgcaccccggaggaggttttcgccgtcctgagggcctggaaggaccagttctga

SEQ ID NO: 319015 - DNA, 1605 bp, Pseudomonas aeruginosa
atgccgccacagacacgtaaaacccccgatctagacgccctggctcgcgccgttcgggtgtccatcctgctcatcgccggtgcgctcgccggctgccagggcagcggccagatcaagggggaggcccaggccaaagcagcacgtcccggcgcccgagccgtcgacgtccagttcaacccctcctggctgcatacccagcccggccagaacgccgcctacaacgacatctgggaccgcatgcgcgacggtttccagctccaggatgcgatcagcaccaacccgcgcatcgaacgccagcgcctctggttcctcagcaaccagtcgttcctcgaacaatcgagcgcgcgcggcagcctctacatgcactacgtggtcgagcgcctggaagaacgcaacatgccgctcgaactggcgctgctgccggtcatcgaaagcgcctataaccccttcgccctgtcgcgcagcaacgccgccggcctctggcagttcattcccgccaccggccagcatttcaacctgcgccagaccaatttctacgacggtcgccgcgacatcaccgcctcgaccaatgccgccctgacctatctcgagcgcctgcacgacatgttcaacggcgactggatgctcgccctggcggcctacaacgccggcgaaggcactgtcagccgcgccatcgaacgcaacgagaaactgggcctgccgaccgactactggaacctgccgctgccgcaggaaacccaggactacgtacccaagctgctcgccctctcacagatcgtcatggcgccggattcctacggcatcagcctgaacccgatcaacaacgagccctacttccaggccgtccgggtcaagcgcgggatcgacctgtccagcgtcgccgcgctggcgaacctggacgaggacgagctgtaccagcttaacccggcctacaagcgccgcgtgaccatggacggcccccagcaactgttggtgccgatggagaaagcggcgttcctgaccgcctcgctggacaccctcaagccgaaggaagtcaccgcctggcagcaataccgggtgcgtagcggcgacagcctgcacagcatcgccaaccgctatcggatcaccgtagcggagctcaagagcgccaaccgcctgtccagcaaccacctgcgcaagggccagcaactgagcatccccgggcagatcgccggcggcgccgtcaagccggtctaccagcaactcgcccgacaggcttccaccccggccaggacccgctcctataaggtcaagaacggcgacagcctgtggcagatcgcccgcaacaacggcgtcgacgtcaacgacctgaagcgctggaacggcctggacaagcacgccctgaaggtcggccagaccctcaagctgcaaggcggcacccaggccctggcggcccgcaagggaaacgccgccggcaagcgcgacagcgccacctactacaaggtcaagcaaggcgactcgatgtacctgatcgccaagcgcttcaatgtcgaaatgaagcacctgcagcgctggaacccgcgcagcaagcaggcgctcaagcccggccagaccctgaccctgtacctggacaccgcgagccgctga

SEQ ID NO: 319016 - DNA, 1830 bp, Pseudomonas aeruginosa
atgcgtcgcctctccttcctgatcctcggcctggccgtgagcctgcccagcttcgccgcgattacccagagccatggttatgcccaattcggcacgctcaagtatccggccaatttccagcacttcgactggaccaatcccgacgcccccaaaggcggcaccttgcgcctgatggcctcgggcagcttcgacacgctcaacccctacaccctgaaaggcaccagcccgatcggcaccggcgatttcctccagtacggagtcaacgagctgaacgaaccattgatggtgggcaccggcctgtacgacccgtccggcgacgaaccagcctccagctatggcctgatcgcgaagagcgtggaatacgcggaaaaccgcagctgggtggtattcaacctgcggccggaagcgcgcttccacgacggcaggccgatcaccgccagcgacgtggccttttcctatcgcaccctggtcaagcaggggcacccgatgtaccgcacctacctgcaggaggtgaagcgggtcgatatcctcaccccccaccgggtgcgtttcgtcctgcggcgctccggcaacccgctgctgatcctgcgcctgggcgagcttccggtgctgccgcagcattactggaaggatcgcgacttccgcgccaccaccttcaccgcgccgctgggcagcggtccctatcgcatcgtcgaggtcgatcccgggcgccgcctggtgttcgaacgcgtgaagggctggtggggcgaaaaactgccggtgaaccgcggcaaatacaatttcgaccgggtcgtggtggacttctaccgggacaacggcgtcgccttcgaagccttcaaggccggcgagttcgacttctacatcgagcaccaggcgaagaactggctgaacaactatcgcttccccgcggttctgcgcggcgatgtgatccgcacggaaatcccgcaccagatccccagccagacccaggcgttgttcatgaacacccgtcgcgccgtgttcaaggagcgcgcgctacgccaggcgctgggcgagatgttcgacttcgaatggaccaatcgcgccctcttcagcaattcctacctgcgctcgcgcagctactacccgaacagcgaattcgccgccagcggcgtcccggagggccaggaatggctgtacctgtcgccgtaccgcaagcaattgccggcgcagttgttcaaacagccgttcagcctgccgaccaccgaggggcgcggcattccccgtgaaaccctcaggcatgcactcggtctactggccgatgccggctggaagctgtccggcgaccgactgctgaataaaaagggcgaaccgctgcgcttcgaaatcctgctggtcaatccgagcctggagcgtattctccagccctatcgcgaaaacctcgccagcatcggcatcgacgcgcgcctgcgcaccgtcgaccgcgcccaatacaagcagcgcctggaccagttcgactacgacatgatcctcatgaccctgccgcagaccctcagtcccggcctggaacagtggcagtacttccactccagccaggtgaaggtcaagggcagcaagaattacgcgggcatcgccaacccggtggtcgacgccatgctcaaccgcctgctcggcgcccacagccgcgacgaacaggtcgccgccgcgcgcgccctggaccggaccttgctctggcagtactacagcattcccaactggtacctcaattcgcaccgtctggcgtaccgcaaccgcttcgccttcgtcgccaccccgccctacaccctgggcctgcgcgcgtggtggcagaaaaacctggagacgtcccgatga

SEQ ID NO: 319017 - DNA, 1848 bp, Pseudomonas aeruginosa
atgatccgtccccgcttcacccctctgctggcagccctgctgctcggctgctgcggcccgctcctcgccgcaccgaaacatgcactgacgctctacgatgagcctccgaagtatcccgccgatttcaagcatttcgactacgtgaatccggatgcgccaaaaggcggcatcctccgccaggccgacttcggcggcttcgacagcctcaacccgttcatcggcaagggcgtctcggccccttcgctgggcctgatctacgacaccctggccttccagtcgcaggacgagccgttcaccgaatacggcctgctcgcggagaagatcgagaaggcaccggacaacagctacgtgcgcttctacctgcgcccccaggcccgtttcagcgacggcacgccggtcaccgccgaagacgtggtgttcaccttcgagacgctggtgagcaagggcgacccgatgtaccgcaactactatgcggacgtcgacaaggtggtcgccgaggacaagcttcgcgtgcgcttcgacttcaagcacgccggcaaccgcgaactgccgctgatcctcgggcagatcgcgatcctgccgaaacactggtgggccgaccgcgacttttccaagaccggcatggaaatcccggtaggcagcggtccctaccgcatcgccaaggtcgatccgggacgctccatcagctacgagcgagtcaaggactggtgggccaaggaccttccggtctcccgcggactctataacttcgacaccatcaccatcgactcctatcgcgacatgtcggtcgccctggaagccttcaaggccggccagtacgacgtcaacctcgaatattcggcgaaggactgggccaccggctacgagtcgccggcattgcgcgacgggcgcttcatcaaggccagcatccacaaccacaacccggtggggatgcagggcttcgccttcaatatccgccgcccggtgttccaggaccgccgggtacgccaggcgatcagcctgctgttcgacttcgaatggtcgaacaagcagctgttcttcagctcctacaagcgcaccaacagctatttcgagaactcggagatggccgcccaccagttgcccagcgaagccgagctgaagatcctcgaaccgctgcgcgacaagattcccgacgaggccttcgaccaggtcttccagaatccggtcaatgacggcagcggggtgatccgcgagcagcggcgcaaggcctaccagttgctcaccgaggccggctacaggatcgagaacaaccgcatggtaggtcccgacggccagccactgagcttcgagttcatgctgttccaggccaacatggaacgggtcatcctgccgttcaagcgcaacctggccgaacttggcatcgacatgcagatccgtcgcgtcgacgtctcgcagttcgtcaaccgcctgcgctcgcgggatttcgacatgacctcggcgacctggccgcaatccaactcgccaggcaacgaacagcgagagttctggcattccagcagcgccgacaaggccggcagccgcaacttcatcggcctcaaggacccggccatcgacagcctggtggaaagcctgatccagtccgactcgcggcaaagcctgatcgaccatacccgcgccctcgaccgcgtactgtcgtggggctactacgtggttcccaactactacgtcgatacctggcgggtcgcctactggaaccgtttcggccggccgaaggtgacgccactctacgactggggcctgatgacctggtggcagaccagcgacaaggcgctgccgagcaaggcgcaagccgaagccacgcaagacgccgagccggaacgggagtaa

SEQ ID NO: 319018 - DNA, 1083 bp, Pseudomonas aeruginosa
atgctctcctatatcctgcggcgcctgctgctgatcgtccctaccctgttcggcatcctgctgatcaacttcatcatcatccaggccgctcccggcggtccggtggagcagatgatcgccaagctggaaggcttcgacgccgcttccggcggcgccaccgggcgcatctccggcggcggcggcgaagtcgccgtggccggctcgcaataccgcggcgcgcaaggcctggacccggagctggtgaaagagatcgagcgcatgtacggcttcgacaagtcggcccccgagcgcttcatgatcatgctgaagaactacctgcacctggacttcgggcagagcttcttccgcgacgccaaggtcaccgacctgatcatcgagaaattgccggtgtcgatctcgctcgggctctggagcacgctgatcatgtacctggtgtcgatcccgctggggatcgccaaggcggtccgccatggtagcgtcttcgacatctggaccagctcggcgatcatcgtcggctacgccattcccgccttcctcttcgccatcctgctggtggtgctgttcgccggcggcagctactgggactggttccccctgcgcggcctgacctcgaacaacttcgaccagctcagcctcggcggcaaggtgctcgactatttctggcacctggccttgccggtaaccgccctggtgatcggcaacttcgccaccatcacgctgctgaccaagaacagcttcctcgacgagatcggcaagcaatacgtggtcaccgcccgcgccaagggcctgaccgaacgccgcgtgctctacgggcacgtattccgcaacgccatgctgctggtgattgccggcctgccggctgcgctgctggggatcttcttcaccggttcgctgttgatcgaggtgatcttctccctcgacggcctcggcctgctcagcttcgaagcggcgatgaaccgcgactacccggtggtcttcggcacgctgttcatcttcaccctgttcgggctggtcatgaagctgatcagcgatatcgtctacaccctggtcgatccgcgcatcgacttcgagaaccgggagtaa

SEQ ID NO: 319019 - DNA, 1020 bp, Pseudomonas aeruginosa
atgcgcctgtctcccatcaaccagcgccgctgggcccgcttcaagagcaacaagcgtggctggtggtcgctctggctgttcctcatcctgttcgtcggcagcctcggcgccgaactgatcgccaacgacaaaccgctggtcgtgcattacgacggcggctggtatttcccggtcttcaaacgctacccggaaaccaccttcggcggcgaattccccctggaagccaactacaagagcccctacatcagccaactgatcgccgagaaggacggctgggtgctttggccgccgatcccctacagctacgacaccatcaactacgagctgaaggttcccgcccccgccccgccgtcggcggaaaactggctgggcaccgacgaccaggcccgcgacgtgctcgcccgggtgatctacggcttccgcgtgtcgatcctcttcgccctgaccctgaccgtgctcagttctctgatcggcgtcaccgtcggcgccctgcaaggctactacggcggctgggtcgacctgctcggccagcgtttcctggaagtctggtcggggctgccggtgctctacctgctgatcatcctggccagcttcgtccagccgaacttctggtggctgctgggcatcatgctgctgttttcctggatgagcctggtggacgtggtccgcgccgagttcctccgcgggcgcaacctggaatacgtccgcgccgcccgggccctcggcatgcgcaacagcgccatcatgttccgtcacatcctgccgaacgcgatgatctcgaccctgaccttcatgccgttcatcctcaccggcgccatcggcaccctcacctccctggacttcctcggcttcggcctgccgcccggcgcgccgtcgctgggcgagttggtcgcccagggcaagtccaacctccaggcaccctggctgggcatttccgccttcgtggtgctggcggtcatgctgagcctgctggtgttcatcggcgaagccgcccgcgacgctttcgacccgaggaaatga

SEQ ID NO: 319020 - DNA, 1611 bp, Pseudomonas aeruginosa
atgagcgagaacattctggaaatccgcgacctcgccgtcgaattcctctccggcgagcaacgccagcgggtggtcgaaggcgtcagcttcgacatccgccagggcgagaccctggccctggtcggcgaaagcggctcgggcaagtcggtgaccgcccactccatcctgcgcctgctgccctactccgtcgccagccacccagcaggcagcatccactaccagggcgaggatctgctcaagctcccggaacggcgcctgcgcgggatccgcggcaaccgcatcgccatggtcttccaggaacccatgacctcgctcaatccgctgcataccatcgagaagcagctcgccgaggtcctcgccctgcacaagggcctgggcggcgccaaggccagcgcgagaattctcgaactgctcgagctggtcggcatccccgagccggccaagcgcctgaaagcctatccacacgaactctccggcggccagcggcagcgcgtgatgatcgccatggccctggcctgcgagccgcaactgctgatcgccgacgaaccgaccaccgcgctcgacgtcaccgtccagttgaagatcctcgatctgctcaaggacctgcaggcacgcctgggcatgtccctgctgctgatcacccacgacctcaacctggtccggcgcatcgcccaccgcgtctgcgtcatgcaacaagggcggatcgtcgagcaggcttcctgccaggaactcttcgcagccccgcgacacccctatacccgcgagctgctcaacgccgagcccagcggtgcgccggcaagcaacccgcccggtgaaacccttttggcggtggacgacctgcgggtctggttcccgatccgcaaaggcgtgttccgccgcaccgtggaccacgtcaaggcggtcgacggggtcaatttcgaactaccccgcgggcagacgctgggcatcgttggcgaaagcggctcgggcaagtcgacccttggcctggcaatcctgcggctgctggaaagccagggcggcatccgcttcgaaggcacccggctggacggtctcgcgcaacatgacgtgcgcccgctgcgccgcgagatgcaggtggtgttccaggacccgtatggcagcctcagcccacgcatgtgtgtcggcgagatcgtcggcgaaggcctgcgcatccataggatcggcagcgaggccgaacaggagcaggcgatcatcgacgcgctggtggaggtcgggctcgatccgcagacccgctaccgttacccccacgaattctccggcggccagcgccagcgcatcgccatcgcccgggcactggtgctgaaaccggcactgatcctgctcgacgaaccgacctcggcgctcgaccgcaccgtgcagcgccaggtcgtggaattgctgcggcaactgcagggcaagtacaacctcacctacctgttcatcagccacgacctagcggtggtcaaggcgctcagccaccagctgatggtggttcgacatggcaaggtggtggaacagggcagcgccgaagcggttttcgcctcgccgcaacatccctatacgcagcaattgctggaggctgccttcatggccccggcaagcgcggaaaactga

SEQ ID NO: 319021 - DNA, 798 bp, Pseudomonas aeruginosa
atgggatttctcacaggaaaacgcgccctgatcgtcggagtcgccagcaagctctccatcgcttccggcatcgccgccgccatgcaccgggaaggcgccgaactggccttcacctaccagaacgacaagctcaggggccgggtggaggagttcgccagtggctggggctcgcggccggagctgtgcttcccctgtgacgtggccgacgacagccagatcgaagcggtgttcgccgccctgggcaagcactgggacggcctggacatcatcgtccactccgtcggattcgctccaggcgatcagctcgacggcgacttcaccgcggtgaccacccgcgagggcttccgcatcgcccacgacatcagcgcctacagcttcatcgccctggccaaggccggacgggaaatgatgaagggccgcaacggcagcctgctgaccctctcctacctgggcgccgaacggaccatgccgaactacaacgtaatgggcatggccaaggccagcctggaggccggggtccgctacctggccggcagcctgggcgcggaaggcacccgggtcaatgcggtttccgccgggccgatccgaacgctcgccgcctccgggatcaagagtttccgcaaaatgctggccgccaacgagcggcagacgccgctgcggcgcaacgtcaccatcgaggaagtcggcaatgccggcgccttcctctgttcggacctggccagcggtatcagtggcgagatcctctacgtcgatggcggcttcaacactaccgccatgggcccgctggacgacgactga

SEQ ID NO: 319022 - DNA, 1866 bp, Pseudomonas aeruginosa
atgctgcagaacatcagggataattcccagggctggatcgccaagaccatcattggcgtgatcatcgttctcctgtcgctgaccggcttcgacgcgatcatccgggccaccgaccactccaacgtggccgccaaggtcaacggcgacgatatcagtctcaatgaagtccaacaggccgtggacatgcagcgtcgccagctgctgcaacgcctgggcaaggatttcgatccatccatgctggatgacaagctgctcaaggaagcggccctgaaggggctgatcgagcgtaccctgctgctccaggccgccaaggacgacaagttcgccttctccgaccaggcgctggaccagttgatcctgcaaactcccgagttccaggtcgacggcaagttcaacgcggatcgcttcgaccaggtcatccgccagatgaactacagccgcatgcagttccgccagatgctcggccaggaaatgctcatcggccagcttcgcgccggcctggcgggcaccggtttcgtcaccgacaacgaattgcagtccttcgctcgcctcgagaagcagacccgcgacttcgccaccctggcgatcaaggccgacgcctccaagagcagcgtgagcgacgacgaggtgaaggtcttctacgaaggccacaagagcgagttcatgactcccgagcaggtggtcgtcgaatacgtggagctgaagaagtcctccttcttcgaccaggtcaaggtgaagcaggaagacctcgaggcgctgtaccagaaggaaatcgccaacctttccgagcagcgcgatgccgcacacatcctgatcgaggtgaacgacaaggtcggcgacgagcaggccaaggcgaagatcgacgagatcaaggctcgcctggccaagggcgaggatttcgccgcgctggccaaggagttctcccaggatatcggctcggccgccaccggcggtgacctgggctacgccggtcgcggcgtgtacgaccccgcgttcgaggaggcgctgtatgcgctgaagcaaggtgaggtatccgccccggtgaagactccgtacggctaccacctgatcaagctgctgggcgtgcaggcgccggaagtaccgagcctggaaagcctcaagccgaagctcgaggacgaactgaagaaacagatggtcgagcagcgcttcgtcgaggctaccaaggacttggaaagctccgcctacgaagctgccgacctgagccagccggcgcaggaaatgggcctgaaggtccagaccagccagccgttcggacgttcggggggcgacggcatcgctgccaaccgccagatcgtgcagaccgcgttcagcgccgaggtgctggaagaagcggccaacagtggcgccatcgagctggatccggacaccgtggtggtgctgcgggtcaaggaacacaacaagccgaaggagcaaccgctggagcaggtcgcggcgaacatccgcgagcgcctggccgccgaaaaggccgccgaggaggcgcagaagcgtggcgaggccctgatcgcagagctgcgtgaaggccgtacctcttccgcagcgggtgagtcgtggaaagtggtcgaggcggcctcccgcggccacgaaggcgtcgatccgaaactgctccaggcggtgttccgcatgcagcgtccggaggccaaggacaagccttcgttctctggcgtgaccctggccaatggcgattacgtggtgatccgcctgaatggcgtcagcgagccggaggaggctatctccgacgacgagaaggccatgtaccgccgcttcctggcttcgcgcagcggacaggcagacttcgccgccttccgccgtcagttgcaggacaaggcggaagtcgagaaatactga

SEQ ID NO: 319023 - DNA, 273 bp, Pseudomonas aeruginosa
gtgaacaagtcggaactgatcgatgcaattgccgcatctgctgatatcccgaaagctgttgccggtcgcgcactggacgcagtgatcgagtccgtcactggcgccctgaaggctggtgactccgtcgtgctggttggtttcggcaccttcgctgtcaaagagcgcgctgctcgcaccggtcgcaacccgcaaactggcaagccgatcaagatcgccgctgccaagatcccgggcttcaaagccggtaaagccctgaaggatgctgtcaactaa

SEQ ID NO: 319024 - DNA, 2397 bp, Pseudomonas aeruginosa
atgaaaacactcgtcgaattgcccttgctgccgctacgtgacgtggtggtgtacccgcacatggtcatcccgttgttcgtcggtcgggaaaagtccatcgaggccctggaggcagcgatgaccggcgacaagcaaatcctcctgctggcgcagaaaaaccccgcggacgatgatccgggcgaagatggcctgtaccgcatgggtacggtcgctaccgtgctgcagttgctcaagctgccggatggcaccgtcaaggtgctggtcgaaggcgagcagcgcggccaggtcgagcgcttcatcgaggaggaagggcacattcgtgccgcggtccaggccatcgacgacgccaatgtcggcgagcgcgaggccgaggtcttcactcgcagcctgctgagccagttcgagcaatacgtccagttgggcaagaaagtccccgccgaggtgctttcctcgctgaacagcatcgacgagccgagcaggctggtcgataccatggccgcgcacatggcgctgaagatcgagcagaagcaggacatcctggagatcaccgacctgtcgtcgcgggtcgagcatgtcctggcgctgctggatgccgagatcgacctgctgcaggtggaaaagcgtatccgcggccgggtcaagaagcagatggagcgcagccagcgcgagtactacctgaatgagcagatgaaggccattcagaaggaactcggcgatatcgacgaagggcacaacgaagtcgaggagctgaagaagcgcatcgacgctgccggcctgaccaaggaggcgcacaccaaggccactgccgagctgaacaagctcaagcagatgtcgccgatgtcggcggaagccaccgtggtgcgttcctacatagactggctgctgaacgtgccgtggaaggccgagagcaaggtgcgccatgatctcgccaaggcggaagacatcctcgatgccgaccattatggcctggaagaggtcaaggagcgcattctcgagtatctcgccgtgcaaaagcgggtgaagaagctcaagggcccggtcctttgcctggtgggaccgcccggcgtgggcaagacctccctggccgaatccatcgctcgcgccaccaatcgcaagttcgtgcgcatggcgctcggcggcgtgcgtgacgaggccgagatccgcggtcaccgtcgtacctatatcggctccatgccgggccgcctgatccagaagatgaccaaggtcggcgtgcgcaacccgctgttcctcctcgacgaaatcgacaagatgggcagcgacatgcgcggggatcccgcctcggcgctgctcgaggtgctcgacccggagcagaaccacaacttcaacgatcactacctggaagtcgactacgacctgtccgacgtgatgttcctctgcaccgcgaactcgatgaacatcccggcgcccctgctggatcggatggaagtcatccgcctgccgggctacaccgaggacgagaaggtcaatatcgccgccaagtacctgattccgaagcaggtccaggccaacggcctgaagaagggcgagctgaccttcgaggaaggcgccctgcgcgacatcattcgctactacacccgcgaagccggggtgcgcagcctcgagcggcagatcgccaaggtctgccgcaaggcggtgaaggagcatgccaagctcaagcgtatccaggcggtggtgtccagcgagacgctggagaactacctcggcgtgcgcaagttccgttatggcctcgccgaacagcaggaccagatcggccaggtgaccgggctggcctggacccaggtcggcggcgagctgcttaccatcgaggcggccgtggtacccggcaagggccagttgaccaagaccggatcgctgggcgacgtgatggcggaatcgatcaccgcggcgttgaccgtggtgcgcagccgcgcccagagcctaggaatcgcggcggacttccacgagaagcgcgacatccatatccacgttccggaaggcgctacgccgaaggatggcccgagcgcaggtatcggcatgtgcacggcgctggtttcggcgatcacgcagatcccggtgcgcgccgacgtggcaatgaccggggagatcaccctgcgtgggcaggtgctggcgatcggcgggctgaaagaaaaacttttggcggcgcaccgcggcgggatcaagacggtgatcattcccgaggaaaatgttcgcgacctgaaggaaattccggacaatattaagagtgatctggttattaaaccggttaaatggattgacgaagtcctgcaaattgcgctgcaatacgccccggagcccttgcccgatgcggctccggagatggttgcaaaggatgaaaaacgcgagcctgattccaaggagcgaattagcacgcattag

SEQ ID NO: 319025 - DNA, 1281 bp, Pseudomonas aeruginosa
atgactgatacccgcaacggcgaggacaacggcaagctgctgtattgctccttctgcggcaagagccagcacgaagtgcgcaagttgattgccggcccctcggtctttatctgcgacgagtgtgtcgacctgtgcaatgacatcatccgcgaggaggtgcaggaagcgcaggcggaaagtagtgggcacaaacttccggcgccgaaagagatccgcaccatcctcgatcagtacgtgatcgggcaggagcgggccaagaaggttctggcggtagcggtatacaaccactacaagcgcctcaaccagcgtgacaagaaggacgatatcgagctcggcaagagcaacattctgatgatcggcccaaccggctcgggcaagaccctgctggccgagaccctcgcacgtctgctgaacgtgccgttcaccatcgcagatgcgaccacgctgacggaagcgggctacgtgggcgaggatgtcgagaacatcatccagaagctcttgcagaagtgcgattacgatgtggagaaggcccagatgggcatcgtctacatcgacgagatcgacaagatctcccggaaatcggacaacccctccatcactcgcgacgtttccggcgagggtgtgcagcaggccctgctgaagctcatcgagggcaccgttgcctcggtaccgccgcagggcggtcgcaagcatccgcagcaggagttcctgcaggtcgatacgcgcaacatcctgttcatctgcggcggcgctttcgccggtctggagcgggtcatccagaaccgttccgagcgcggcggcatcggtttcaatgccgaagtgcgcagtcaggagatgggcaagaaggtcggcgaggcgttcaaggaagtcgaaccggaagatctcgtcaagttcggtcttattcccgagtttgtagggcgtttgccggtgatcgcgactcttgatgagctcgacgaggctgcgctcatgcagatcctgaccgagccgaagaacgctctcaccaagcagtacgccaagctgttcgaaatggaaggcgtcgatctcgaattccgtccggacgcactcaaggcggttgcccgcaaggcgctcgaacgcaagaccggtgcacgtggcttgcgttcaattctcgaaggtatccttctcgataccatgtacgagattccctcccagcaggatgtcagcaaggtggtcatcgatgagagtgtcatcgatggctcgtcgcaacccctgatgatctacgagaacagcgaaaagccagccaaggctgcgcctgaggcatga

SEQ ID NO: 319026 - DNA, 642 bp, Pseudomonas aeruginosa
atgtctcgcaactcttttattccgcacgttcccgatatccaggccgccggtggcctggtgcccatggtggtggagcagtccgcccgcggcgagcgagcctacgacatctattcgcgcctgctgaaggagcggatcatcttcctggtcggccaggtcgaggactacatggccaacctggtggttgcccagttgctgttcctggaggctgaaaatcccgagaaggacattcatctctacatcaactcgccgggtggctcggtgactgccgggatgtccatctacgacaccatgcagttcatcaagcccaacgtctcgaccacctgtatcggccaggcgtgcagcatgggtgccctgctgcttgcgggcggtgccgccggcaagcgctactgcctgccgcattcgcggatgatgatccaccagccgctgggcggtttccagggccaggcctcggatatcgagatccatgccaaggaaatcctcttcatcaaggagcgtctgaaccagatcctggcgcaccacaccggccagcccctggacgtcattgcccgcgataccgatcgtgaccgcttcatgagcggtgacgaagccgtcaagtatggcctgatcgacaaggtcatgacccagcgcgacctggccgtctaa

SEQ ID NO: 319027 - DNA, 1311 bp, Pseudomonas aeruginosa
atgcaagtttctgttgaaagcacttccgctcttgagcgccgcatgaccgttggtgtgcctgccgagcgtatcgagaccgaagtcaacaagcgtctgcagcagaccgcccgtcgtgccaagattccaggtttccgccccggcaaggtgccgatgagtgtcattcgtcagcgctacgaagcttccgcgcgccaggaagccatgggcgatctgatccaggaaaccttctacgaagccgtggtcgagcagaagctgaatccggccggttcgccgtcggtagagcccaagtccttcgagaaaggcaaggacctggaatacatcgcaaccttcgaagtcttcccggaatttaccgtttccggcctggaagacatcaaggtcgagcgcctgcaggccgaagtttccgatgctgatgtcgacaatatgctcgacgtcctgcgcaagcagaacacccgtttcgaagtggtcgagcgtgccgctcagaacgatgaccagttgaacatcgacttcgtcggcaagatcgacggcgaagccttcgccggcggttccgccaagggcaccctgctggtgctgggctccggtcgcatgatcgccggcttcgaagaagggctggtgggggcgaaggccggtgaagagcgcgtgctcaacctgaccttccccgaggactaccagaacctggacctggccaacaaggctgccgagttcaccgttaccgtcaatagcgtagccgagcccaagctgccggaactgaacgaagagttcttcgctctgttcggcgtgaaggaaaccggtctcgatggcttccgcgccgaagtgcagaagaacatggagcgcgagctgcgccaggcgatcaagtccaaggtcaagaaccaggtcatggaaggtctgctgcaggccaacccgatcgaagtgcccaaggccctgatcggcaacgaagtgaaccgtctgcgcgtgcaggccgtccagcagttcggtggcaacatcaagcctgaccaactgccggccgagctgttcgaagagcaggccaagcgccgtgtggtgctgggcctgatcgtcgccgaagtggtcaagcagcacgagctgaaggccgacgaaggtcgcgttcgcgaaatgatcgaggaaatggcctcggcctaccaggagcccgagcaggtcgtcgcctggtacttcaagaacgagccccagctgaacgaagtccgttctgttgtactggaagaacaagtcgtagatactgtcctgcaaaaggccactgtgaccgataagcaggtatcctacgaagaagcggtcaagccggccgaagctccgcaagcggcctga

SEQ ID NO: 319028 - DNA, 708 bp, Pseudomonas aeruginosa
atggactgccctaccctcagcaaggtattgctcgtcgaagacgaccagaagctcgcccgcctgatcgccagtttcctttcccagcatggtttcgaagtgcgccaggtgcatcgcggtgatgccgcgttcgccgccttcctcgacttcaaaccgcaagtggtggttctcgacctcatactccccggacagaatggtctgcaggtgtgccgggagatccgccgggtcgcgaacctgccgatcctcatactcaccgcccaggaggacgatctcgatcacatcctcggcctggagtccggcgccgacgactacgtgatcaagccgatcgagccaccggtgctgctcgcccgcctgcgcgccctgatgcgccggcacgcgccccttcccgcctccccggaaagcctgacattcggcaagctgaacatcgaccgacggcggcgcgaagcggaactcgaaggcctcggcatcgaactgaccacgatggagttcgagctgctctggctgctggccagccaggcaggggaaatactttcccgcgacgagatcctcaaccagatccgcggcatcggcttcgacggcctgaaccgcagcgtcgacgtctgcatcagcaagctgcgcaataaactgaaggacaatccgcgcgagccggtccggatcaagaccgtctggggcaagggctacctgttcaacccgctgggctgggagctctga

SEQ ID NO: 319029 - DNA, 1287 bp, Pseudomonas aeruginosa
atgctgcgcctgttcctgcgcctctacctgctactggccctggggttcgccgccgcgatcttcgtggtcgaccatgtcatcgacgcgttctacgacagcatcgtcgagaactatcaccgcgacgccgttcgcggccaggcctattcgctggtggaaaagctggccccgctggaccaggccggacgccagcgacagcttgaagactggcgtccccactacgggctcgagctgagcctgacggatgccaggcaggcgaagctgacgcaggaagagcaggccctcctcgacaagaacctgctggtggtacgcgaggacttcacggaattcatcagccgcatcgacgcgggcccgcagctgctcgacatcaagctgccgccggaaccctcgctgaccccactgttcaccgtgctggcctacatcctgctcggcgtgctggtcggcatcgccctgctggtatgggtccgcccgcactggcgcgacctcgagaccctgcgcctggccgcgcaacgcttcggcgacggcgacctgtcatcgcgcacgcgcattttccgacgctccgatatccgcaccctggcccagcacttcaaccagatggccgaccgcatcgaaagcctgatcagcaaccagcgtgaactgaccaacgcggtatcccacgaattgcgcacgccgatctcccgcctgtccttcgaactcgagcaattgaacaagcaggtcgacgccgaagtacgccacgacctgatagaggacatgcgcgccgatctcggcgaactggaggaaatggtctccgaactgctgacctacgcccgcctggagcacggcaacgtcgggagccaccgggaaatcgtcgacgccgcgagctggctggatagcgtcgtcgccgacgtcgccctggaagccgaagccgccggagtcacctgcgagatcagcgcctgccaggtcgaacagatccgcatcgagcctcgcttcatggcgcgcgcagtgatcaacctgctgcgcaacgccattcgccacgcacactcgcgcgtcgaaatcgccctcctcgatcaaggcgacagctgtcagatacgggtcaacgacgacggccccgggataccggcggacgcccggcagaagatcttcgaacccttttcgcgcctggacgacagccgcgatcgcagcaccggcggcttcggcctgggcctggcgatcgtccgccgggtcgcgcaatggcacggcggctatgcggaagcgctggaaacgccgcagggaggcgcctccttccgcctgacctgggagcgaccccgttga

SEQ ID NO: 319030 - DNA, 1839 bp, Pseudomonas aeruginosa
atgtttcgtgcaatgcatctttcccttctcggctgcctgctcggcaccagcggctgccacggactgccgcccgccccgccagcgccgagcgccgccgtgggcaactacggcgaggtcatcgactatctgcaacgccacatccgccgggaaatggaaaggcaggacgtgcccggcctggccctggcattggtcgacgaccagcaactggtctgggcccgcggtttcggctatgccgaccgacagcacaggatcaacgccagcgagcacaccgcattccacgccggcgacctgtccaagctactgatcgccagcgcgaccctgcaactggccgaacgcggccaactctctctcgacgccccgctccaggacaccttgcgcgagttctacgtacgctcacgcttccatgccgaccagagcgaggcggatcgcgcgatcactttccgccggctgctcagccaccagtccggccttcctggcgaacacctgccgcccctgttcggcaaacgcccgagctcactcggccaactgccggcgaaagtatccggcgtctggctgagcaatccgccgggaacccaggtcgcctattccaaccttggctacgagctggtcggcgcggctatcgagcgcaacaccggaaagcacttcgagcagcacatgcgggagcacctgctggaccctttgcagatgactcgctccagcttcgccaggaacgccctgccccaggcgcaacgcgcccaaggctacagcggcggcggtcgccccggctccgccgccgccagcgacctcccggtcaacgacctgtggagcagcccggtcgacctcagccgcttcgtccgcatgctgttcgccaacgggcgccacaaggagcgccagcttctccggaaacactccgtcgaggagatgttccgccagcagaacgccggcaatgccctggacttcgactgccaggtgggcctggcctggttcctcagcccgtgcggctccgcgccgctggaaggaggcatccgtcactatgagtacgccagcgccaccccaggattcagcgcccatctgattctgctgccggaacagcgcctcgccgccattgtcatgagcaacgccgatgacagcgggtcgctcactgcctccctggcccggcaagcggcgtcgctcatgctgcaggtcaaacagggcgctcgtcgccccgccgtacagcccacccccgcgcgcgcccccgcactgaaggtgccgagcccggaggaccggcgacagctatacggtcgctacgcaacccgccaaggccagattcgcctgtacgagcgcaggggtcgcctgtacgcggatttcggcgaacaacgcgtggaactgttacgcgacacctcgggctggctgcagatgagaaaaagtctgctggggttctggcctgtcggcgtggacagcgccggacagttgcaactggacgtggtcagctacggccaacgccgaatcctggtgtcccgccgccacgaccagaccgcctacctcggcgagcgcatcgagccgacatccctgccccaggcctggaccgaagccgtcggcacctaccgcgtcgccagcacgggccggcacagctacctgaacggcctgagcatcaggatcgaagacggcttcctgctggtgcgcgggcaagccggaggaacccgctccggcgagttcatcctgcaacccatcgacagcgcacacgccgtcctggccggcagcggccagggcctgggagacaccttcagtcgcgacttcgacggtctgaacgcgctcggctaccgcttcgcccagcaagacaccaaggcacgtccctggctgcaacggaaggagtccccatga

SEQ ID NO: 319031 - DNA, 129 bp, Pseudomonas aeruginosa
atgttcaccgccttcgccttccgcggccgccaaccttataccgttcgccggaacacagcccagggcgcgaccttgcgcccgaaactggcgaaccggccggatgcgccggcttccgtcgggaagtcctga

SEQ ID NO: 319032 - DNA, 222 bp, Pseudomonas aeruginosa
atgtcgatgaaatggaccgagcagcgcttgcgcaaggctctcaagcagatggcgaacaatcatgaatcggctgcggtcgaggtcatgcgcgccgtcgagcgggcgaacgatccgaagctggcgcagcgcctgctcgaggtgatcgagcagatgcaccaggatgccgatgcgctgcgctccatcgacgacgaaatcgccagcggcgtgatccgttgccaataa

SEQ ID NO: 319033 - DNA, 855 bp, Pseudomonas aeruginosa
atgaccgcacaactgatcgacggcaaagcgatcgccgccaaccttcgccagcagatagcccaacgcgtgaccgagcgccgccagcaaggcctgcgcgttcccggcctggcggtgatcctggtcggcaccgatccggcctctcaggtctatgtggcgcacaagcgcaaggactgcgaggaagtcggctttctctcccaggcctacgatcttcccgccgaaaccagccaggacgacctgctggccctgatcgaccgcctgaacgacgatcccgccatcgacggcatcctggtccagctacccctgcccgcccacctggacgcctccctgctgctggagcgcatccacccggacaaggacgtggacggtttccatccctacaacatcggccgcctggcccagcgcatgcccctcctgcgcccctgcaccccgaaaggcatcatgaccctgctcgccagcaccggcgccgacctgtacggcatggatgcggtcgtggtcggcgcctcgaacatcgtcggccgccccatggctctggagttgctgctgggtggctgcaccgtcaccgtgacccaccgcttcacccgcgacctggccgaccatgtgtcgcgtgccgacctggtggtggtcgctgccggcaagccgggactggtcaagggcgagtggatcaaggaaggcgccatcgtcatcgacgtcggcatcaaccgccaggccgacggccgactggtcggcgacgtggaatacgaagtggcagcgcaacgcgccagctggatcaccccggtgccgggcggcgtcgggccgatgacccgcgcctgcctgctggaaaataccctgcacgccgccgaacacctgcacgactga

SEQ ID NO: 319034 - DNA, 1383 bp, Pseudomonas aeruginosa
gtgctgcagatctacaacacgctgagcaagaccaaagaagtcttcacgccgctggtcggcaaccaggtacgcatgtacgtgtgcggcatgaccgtgtacgactactgccatctgggccacggccgcagcatggtggcgttcgacgtgatcacccgctggttgcgccaccgtggctacgacctgacgtacgtgcgcaacatcaccgatatcgatgacaagatcatcaatcgcgccaacgagaacggcgagccgttcgatgtgctgaccgagcgcatgatcgcggcgatgcacgaggacgaggcccggctgaacatcctcaagccggaccaggagccacgcgccaccgatcacatcgccggcatgcacgcgatgatccagatcctgatcgacaagggctatgcctacgcgccgggcaacggtgacgtgtactaccgggtcggcaagttcgctggctacggcaagttgtcgcggcggcgggtcgaggacctgcgcatcggtgcgcggatcgagccgggcgaagcgaaggaggatccgctcgatttcgtgctctggaagggcgccaagcctggcgaaccgagctggtcgtcgccctggggcgaggggcgcccgggctggcacatcgaatgctcggtgatgtccacctgctgcctgggcgattccttcgacatccatggcggtggcaacgacctggagttccctcatcacgagaacgagatcgcccagagcgaggccgcgaccggcaagccctacgccaagtcctggctgcactgcgggatgatcaccatcaacggcgagaagatgtccaagtcgctgggcaatttcttcaccatccgcgaagtgctggagaaatatcaccccgaagtggtgcgttacctgctgatcgccagccattaccgcagtccgatcaactactcggaggagaacctgcgcgaggccaaggcggccctggaccgtttctacaacgcgctcaaggggctgcccgaggcggcgccggcggaagcggcggagtatgtcgagcgcttcgccgcggcgatggacgacgacttcaacaccgcgggtgcctgctcggtgctgttcgagctggcgcgggaggtcaatcgtctgcgcgaaagcgacctgtcggcggcggccgcgctggccgcgcgcctgaagcagttggctggcctgctgggggtgctgcaactggagccggaagccttcctgcaggcgggcgccgagggcaaggtcgatgcggccgaggtcgaggcgctgatccaggcgcgcctggaggcgcgggcggcgaagaactgggcggagtccgaccggattcgcgatcggctcaccgccatgggcgtcgtgctggaggatggcaagggcggcactacctggcgcctggccgactga

SEQ ID NO: 319035 - DNA, 1671 bp, Pseudomonas aeruginosa
atgagcaagccagagaccaccgccgccccgaacttcctgcgccagatcgttcaagccgacctggatgccggcaagcacgcgaagatcgtcacccgtttccccccggagcccaacggttacctgcacatcggccacgccaagtcgatctgcctgaacttcggcctggcccaggaattcgctggcgattgccatctgcgcttcgatgacaccaacccggccaaggaagaccaggagtacatcgatgccatcgaggccgacatcaagtggctgggcttccagtggtccggcgaggtctgctatgcctccaactatttcgaccagttgcatgcctgggccatcgagctgatcaaggccggcaaggcgttcgtctgcgacctcggtcccgaggaaatgcgcgaataccgcggcactctcaccgagccgggccgcaacagcccttaccgtgaccgttcggtggaggagaacctcgacctgttcgcccgcatgaaggccggtgagttccccgacggcgcccgttcgctgcgggcgaagatcgacatgggttcgccgaacatgaacctgcgcgacccgatcctgtaccgcatccgccatgcgcatcaccaccagaccggcgacaagtggtgcatctacccgagctacgacttcacccacggtcagtcggacgccatcgagggcatcacccattcgatctgcaccctggaattcgaagaccatcgtccgctctacgagtggttcctggccaacctgccggtgcctgcgcaaccgcgccagtacgaattctcccggctcaacctgaactacaccgtgaccagcaagcgcaagctcaagcaactggtcgacgaaggccatgtcagcggctgggacgatccgcgcatgtcgaccctgtccggctatcgccgccgcggctataccccggagtcgatccgcaacttctgcgagatgatcggggtgaaccgcgccagcggcgtggtcgacatcggcatgctcgagttcagcatccgcgaccacctggacgccaccgcgccgcgtgccatgtgcgtgctgaaaccgctcaaggtggtgatcaccaactaccccgaagggcaggtggagaacctcgagttgccgcgtcatccgaaggaagacatgggagtgcgtgtactgccgttcggtcgcgagctgttcatcgatgccggtgacttcgaggaagtcccgccggccggctacaagcgcctgatccccggtggcgaggtgcgtctgcgcggcagctacgtgatccgtgccgacgaagcgatcaaggatgccgacggcaatatcgtcgaactgcgctgcagctacgatccggacaccctgggcaagaacccggaaggccgcaaggtcaagggcgtgatccactgggtgccggccgagggcagcgtcgagtgcgaagtgcgcctgtacgatcggctgttccgctcggccaatccggagaaggcggaagagggcggcagcttcctcgacaacatcaacgccgactccctgcaggtactggccggctgtcgcgccgagccgtcgctgggccaggcgaacccggaggatcgcttccagttcgagcgcgaaggctatttcgtcgccgacctgaaggactccaggccgggcaagccggtgttcaaccgtaccgtcaccctgcgtgactcctggggacagggctga

SEQ ID NO: 319036 - DNA, 498 bp, Pseudomonas aeruginosa
atgatcaagctgcataccaaccatggcgtcatcaccctgaagctcgatgaagagaaagccccggaaaccgcggcgaacttcaaggagtacgtgaaaagcggccactacgacaacaccgtcttccaccgcgtgatcaacaacttcatgatccagggcggcggtttcgagccgggcatgaagcagaagcccactcgcgcaccgatcaagaacgaagccaacaacggcctgaccaacaaggtcggcagcatcgccatggctcgtaccatggacccgcattcggccagcgcgcagttcttcatcaacgtcgccgacaacgatttcctcaaccataccgcccccaccacccagggctggggctatgccgtcttcggcgaagtggtcgagggcatggacgtggtcaacaagatcaagggcgtggccaccaccatgcgcagcggccaccaggacgtgccggccgaggacgtgatcatcgagaaggccgaaatcgtcgaagaatga

SEQ ID NO: 319037 - DNA, 723 bp, Pseudomonas aeruginosa
atgagcgtcctgttcatctcggacctgcatctcgaagcggaacgcccggacatcacccgggcgtttctgtctttcctcgatgagcgcgcccgccgggccgaggccctgtacatcctcggcgacttcttcgaagcctggatcggcgacgacggcatggacgccttccagcgctccatcgcccagtccctgcgccaggtggccgacggcggtacgcgcatctacctgatgcacggcaatcgcgacttcctcattggcaaggcgttctgccgcgaggccggatgcacgctgctgcccgacccgagcgtgatcgacctgtacggcgagccggtattgctgatgcacggggacagcctgtgcacccgagacgaggcctacatgcgcctgcgccgctggctgcgcaacccgctcacgctctgggtactgcgccacctgccgctggccacccggcacaagctggcacgcaagctgcgcaaggaaagccgcgcgcagacccgcatgaaagccgtcgacatcatcgatgtcacgcccgaagaagtgccccgggtcatgcgcgggcatggcgtgcgtaccctgatccacggccacactcatcggccggccgaacacccgctggacatcgacggccagcccgcccggcgcatcgtgctcggcgactgggaccgccagggctgggccctggagatcgacgccaacggccatcgccaggcgcccttcccgctctga

SEQ ID NO: 319038 - DNA, 1332 bp, Pseudomonas aeruginosa
gtgatcatctcgaagggaaacctgatcaagttcgtcgccgcccccctcggcgtgctcgccctcggcttcggcctgttcaacggtgtgttcttctataacgaagccggcttcatgacccacgtaaggaccatcttcggcgacgagaagatcgtcgatgacgtcggctacgcgaccaagtggttcggtcgtgccaccacctggaagaaggccatcagcgtgcagtccgtgctggtcatggacgataacgacaccaatccggacaacgacggcctcggcgccaccatcgaggctttcccgatcgtgttcctcggcaacgtcgatgccaaggtcgaatcttccgcgcgctttcgcctgcccggcggcgagccgttcctgaagatggcccaggaataccgcaacccggacaatttcatccgcaccgcactggtgccggcgatcaaggaaaccctccaggccaccgcttcgctgatgagcgccgacgactactacgccggagcccgcagcgaattcgccgccgagttcgagaaccagctcaacgacggcctgtacctgatcaagcgcaaggaagtccgcgggccgcgcggcgccattccgcaccagaccgcgatcctccaggccggcaccgagcagggagcgttcggcgacaacaacgccagccagttcgtcaccgagaaggtcaccgatgccaagggcatcccggtacgcaagcaacagcagttccgcaagttcggcgtcgaggtggtggaagcgcggatcaccaacgtcgatcccaacccgcagtacaagcagcgcatggtcaaggtccagcaggcgctcgccgagctggcggtggcgcggcagaaccgcctgaaggaagaagaggaaaagctgctggtcaccgcccgcggcgagaaggaagtcgaggccaagcgccaggaaaccctgcgcgaccagatcgaacgcaccacccaggcggaaaccgacaagcaattggcggtgatcaacgccgagcgcgagaagcagcgcgccgagatcgagaagcagaccgccgaactgctgcgcgacaaggccacggtgaccgcccaggccaccaagatcaccgccgacgccgaggcttacgcccgcgaagcggtgatcaaggcggacggcgcgttgcagccgaagctcgacgcgctgatcgcgatcaacaaggtctgggccgaagccgccgcccaggcccccgtccccagcgtaatgatgggtgccggcgccaacggcgcggcgagccgccaggacgagatcggccagctgatgggcgttctggcgaccaaggccgcccgcgacctggccctcgacctcaaggtcaaggactga

SEQ ID NO: 319039 - DNA, 612 bp, Pseudomonas aeruginosa
atgttgcccgagatcgaccaattccttgcctgttccactcccgccgcctgggtcgaggcggccctggagcgccaggacgtcatgctgctggaccacaaggcctgcgagatgaaggccgcggcgacggcgatgcaactgatcggcaagtactccggccgcctggacctggtgaacaagatgagccgcctggcgcgcgaggagctgcgccacttcgagcaggtgctggcgatcctgaagaaacgcggtatcccggtggtcaatgtcagcgcctcccgctacgcctcggcgctgcgcgacctggtgcgcaagcaggagccgcagcggctgaccgatacgctggtggtcggcgccttcatcgaggcgcgttcctgcgagcgcttcgccgccctggtgccgcacctggacgcggagctggcgaaattctacggcggtttgctgaagtccgagtcgcggcatttccaggactacctgaagctggcctaccagtacggcgacgaggccgacgtggagcggacgatcgaggtggtgcgggccaaggaggccgagctgatcagcagtccggacaacgaattccgcttccacagcggcctcccggtggacctggtggcctga

SEQ ID NO: 319040 - DNA, 864 bp, Pseudomonas aeruginosa
atgcaagccattcgcagcatcctcgtggtgattgaaccggaccagctggaaggtctcgccctgaaacgggcacaactgatcgccggcgtgacccagtcgcacctgcacctgctggtctgcgagaagcgccgcgaccacagcgccgccctcaatgacctggcccaggaactgcgcgaggaaggctacagcgtctcgaccaaccaggcctggaaggactccctgcaccagaccatcatcgccgagcaacaggccgaaggctgcgggctgatcatcaagcagcactttcccgacaacccgctgaaaaaggccatcctcaccccggacgactggaaactgctgcgcttcgcgccctgcccggtactgatgaccaagaccgcccggccctggacgggcggaaagatcctcgccgcggtcgacgtcggcaacaacgacggcgagcaccgctccctgcacgccgggatcatcagccatgcctacgacatcgccggcctggccaaggccacgctgcacgtgatcagcgcccacccctcgccgatgctctcctccgccgacccgaccttccagctcagcgaaaccatcgaggcccgctatcgcgaggcctgccgcaccttccaggccgagtacggtttcagcgacgaacaattgcacatcgaggaaggtccggccgacgtgctgatcccgcgcaccgcgcagaagctcgacgcggtggtcaccgtgatcggcaccgtggcgcgcaccgggttgtccggcgcgctgatcggcaataccgcggaagtggtgctggataccctggaaagcgacgtgctggtgttgaagccggacgacatcatcgcccacctggaggaactggccagcaaggagtga

SEQ ID NO: 319041 - DNA, 468 bp, Pseudomonas aeruginosa
atgtcttcgcaaagaatcaaaaccccctgcgtagggctttgctccacggtatacggcgacctggtatgccgtggctgcaagcgtttccaccatgaggtggtcaactggaacctctacgacgccgaggaaaagcgggctgtctggagtcgccttgagcagttgctggcccaggtgatggccgccaagctggaagtcttcgacgccgcgcgcctgcgcctgcaactggagcagcggcagatccgtttcgtccccgagcagtctccctattgctgggcctaccagttgatcgcccgcggttcccggctgatcaaccagatcgaagcctacggcgtggcactgctgccggaattccgcgactggagcctgccggacctgcgcgatgccatcgaccgggaattcttcctgctgtcggaagcgcattaccagcgctacatcgcgccctcgttcctgcaggcgatcgacagatag

SEQ ID NO: 319042 - DNA, 2610 bp, Pseudomonas aeruginosa
gtgcttgaagcctaccgcaaacacgtagaagagcgtgccgcccagggtgtcgtgccccaaccgctgaacgccgaacagaccgcaggcctggtcgagctgctgaagaacccgccggccggcgaagaagaattcctccttgacctgatcaccaaccgcgtaccgccgggcgtcgacgaagccgcctacgtcaaggccggattcctttccgccatcgtcaagggcgaagccacctccccccttatcgacaagcaacgtgccgccgagctgctgggcaccatgcagggcggctacaacatcgccaccctggtcgaactgctggacgacgccgaactggccaacaccgccgccgaacagctgaagcacaccctgctgatgttcgacgccttccacgacgtcgccgagcgcgccaagaagggcaatgccgcggccaagtccgtgctgcaatcctgggccgatggcgagtggttcaaggccaagccggaagtcccggaaaagctgactctcaccgtattcaaggtccccggcgaaaccaacaccgacgacctctccccggcccccgacgcctggtcgcgcccggacatcccgctgcacgccctggccatgctgaagatggcccgcgacggcatcgagccggtccagccgggttcggtcggtccgctgaagcagatcgaagcggtcaaggccaagggcttcccggtcgcctacgtcggcgacgtggtcggcaccggttcctcgcgcaaatccgccaccaactcggtgctgtggttcttcggcgacgacattccgttcgtgccgaacaagcgtgccggcggcttctgcttcggcaccaagatcgcaccgatcttctacaacaccatggaagatgccggcgccctgccgatcgagttcgactgcaccaacctggccatgggcgacgtcatcgacgtatacccctatgaaggcaaggtcgttcgccacgacagcggcgaagtggtcaccaccttcgagctgaagaccccggtcctgctcgacgaagtccgcgccggcggccgtatcccgctgatcgtcggccgtggcctgaccgagaaggcccgcgccgagctgggcctgggcacctccgacctgttccgcaagccggaagcaccggccgatagcggcaagggcttcaccctggcgcagaaaatggtcggccgcgcctgcggtctgccggaaggccagggcgtgcgcccgggcacctactgcgaaccgaagatgaccaccgtcggttcccaggacaccaccggcccgatgacccgcgacgaactgaaggacctcgcctgcctcggcttctccgccgacctggtgatgcagtccttctgccacaccgcggcctatccgaagccgatcgacgtcaagacccaccacaccctgcccgacttcatcatgacccgtggcggcgtgtcgctgcgtccgggcgacggcatcatccacagctggctgaaccgcatgctgctgcccgataccgttggtaccggcggcgactcgcacacccgcttcccgatcggcatctcgttcccggccggctccggcctggtggccttcgccgccgccaccggcgtgatgccgctggacatgccggagtcggtgctggtgcgcttcaagggcaagctgcaaccgggcatcaccctgcgtgacctggtccatgcgatcccttactacgcgatccagcagggcctgctgaccgtcgagaagaagggcaagaagaacatcttctccggccgcatcctcgagatcgaaggcctcaacgacctgaccgtggagcaggccttcgagctgtccgacgcctcggccgagcgttccgccgccggctgcaccatcaagctgccggaacaggcgatcgccgagtacctgaagtccaacatcaccctgctgcgctggatgatcggcgaaggctacggcgacccgcgcaccctggagcgtcgcgcccaggcgatggaagcctggctggccaagccggagctgctggaagccgacaaggacgccgagtacgccgcggtgatcgagatcgacctggccgacgtcaaggagccggtgctctgcgcgccgaacgatccggacgacgcgcgtctgctgtcgagcgtacagggccgcaagatcgatgaagtgttcatcggctcctgcatgaccaacatcggtcacttccgcgccgccggcaagctgctggacaaggtcaagggcggcatcccgacccgtctgtggctggctccgccgaccaagatggacgcccaccagctgaccgaggaaggctactacggcatctacggcaaggctggcgcgcgcatggaaatgccgggctgctcgctgtgcatgggcaaccaggctcgcgtccagaccggttccaccgtggtctccacttcgacccgtaacttcccgaaccgtctgggcgatgccaccgatgtgttcctggcatcggccgagctggcggcggtctcctcgatcctcggcaaactgccgaccgtggaggagtacatggcctacgcgaaggacatcgacagcatggctgccgacgtctaccgctacctgagcttcgaccagatcgccgagttccgcgaagcggctgcgaacgccaagatcccggtcgtccaggcctga

SEQ ID NO: 319043 - DNA, 1128 bp, Pseudomonas aeruginosa
atggcgctgaccgattcggcctcgctgatcgtggccgccacccagggcttcgcccagccctacggcctcacgctcaatctcaggcgccaaccgtcctgggccaccttgcgcgacaagctgctcagcggcgagctggatgccgcgcagtgcctgtacgggcttgtctacggcgtccagctcggcctcggcggcagcgcggcaagcgagatggcggtgctcatgggactgtgccagaacggccaggcgatcaatctttccgaaccgctgaagcaggctggcgtgaccagtgcggaggcactgctccggcatcggcgccagaatggtgcacgcctgaccctggcgcagacctttcccaccggtacccacgcgctctggctgaactactggctggcgagcatcggtctgcatccgctgcacgacgtgcacagcgtggtggttccaccggcgcagatggtcggccatctccaggccgggcgcatcgacgggttctgcgccggcggtccctggggcgccctggccgtggaccagggccagggcttcaccatcgccaccagccaggcgatctggccggaccacccggaaaaggtcctcggcactacccgcgccttcgtcgacgcctacccgaacaccgcccgcgcgctggtcatggcggtcctcgacgccagccgcttcatcgaacagaacgccgagaaccgcctgggcaccgcgcaactgatcagcggccgcgactatgtcgacgctccgctcggcgcgatccagccgcgcttcttcggccgctaccaggacggcctcggcaacgcctggcaggacccgcatccgctgcgtttctatgccgacggcgaagtcaaccggccctggctctcggatggcatgtggttcatgacccaattccgccgctggggcctgctgcgcgaagacccggactacctgggcatcgcccgcagggtccagcagaccgcgctgtaccgcgatgccgcgacggcccttggcctgtgcctggacggcgccgacatgcgccgctcgacactgatcgacgggcgcacctgggacggcagcgaccccgccggctacgcccgcagcttcccgatccacgccctggccgaaaccggccagggcatcgacctctga

SEQ ID NO: 319044 - DNA, 579 bp, Pseudomonas aeruginosa
atgctgcgtatcctgctgatcgacgacacgccgaagaaagtcggacgcctcagggccgccctgctcgagagcggtttcgaagtggtggacgagtcggggctgaccatcgacctgccggcgcgcgtcgaagcgctgcgtcccgacgtgatcctgatcgacacggagtctcccggccgcgacgtgatggagcaggtctgcctggtcagccgcgaccagccgcgaccgatcgtgatgttcaccgacgagcacgatccgggagtgatgcgccgcgccatccagtccggggtcagcgcctacatcgtcgaaggcatccaggccagccgcctgcaaccgatccttgacgtggccatggcgcgcttcgagagcgaccaggcgctgcgcgctcaactgcaggcgcgcgaggcgcagctggccgagcgcaagcgcatcgagctggccaagggcctgctgatgaagatgaagcattgcggcgaggaggaagcctacacgctgatgcgacgccaggccatgagccgccagcagaagctgatccaggtcgccgagcagatcatcgccatgcacgacatgctcggcggctga

SEQ ID NO: 319045 - DNA, 696 bp, Pseudomonas aeruginosa
atgatcgatctcagcacctggaaccttaccattcccaccgaacccaccccgcaggtgatcaccacccagcaactcaacaacggctaccagagccggtacttccagcaaggcaacgatggcggcctggtcttctgggtgcccatcgacggctcgcacaccgaggacagcacctatcctcgcaccgaactgcgcgaaacccaggccgacggcagcctcgacaactggtactactggcaggccgacaacgaactgcgggtgaccatgagcgtcgagaaggtcccctcgaagaacaaggtgatcatcggccagatccacagcaagtcgccacagaccgacgacggcgaacctctggtgaagctgcagtactactacaagcccgaggaaggcctcggccgggtcgaggcgctggtacgcaaccacccggacgattcctatagccgcaacgtgtcgatcctcgagcaggtacgcctgggcgagcgcttcaactacagcctgcgcgtcacctccagcggcgagttggcggtgcgcgcgcgcagccaggacggcgaagaggacgcttactaccagaccctcggcagcgcctggaacgaccagttgctctatttcaaggccggcgcctacgtgaacgacaacgccggcgacagcggcgaaggcagccgcgtgaccatctaccacctgaacaccgcccatcgctga

SEQ ID NO: 319046 - DNA, 1212 bp, Pseudomonas aeruginosa
atgaacaacagcttctggaaggccggccatgcgccgaccctgttcgcggcgtttctctatttcgacctgagcttcatggtctggtacgtgctcggcccgctgggggtgcagattgccggcgacctgcaactgagcacccaacagcgcgcgatgatggtcgccacgccgatcctcgccggcgccgtactgcgcttcctgctcggcctgctggccgatcgctggtcgccgaagagcgccggcatcctcgcccagatcatcgtcatcgccgccctggcagccgcctggctgctgggcgtgaacagctatgcgcaggcactgctgctggggttgttcctcggcttcgccggggcatccttcgccgtggccctgccgctcgcatcgcaatggtacccgccgcaacaccagggcaaggccatgggcatcgctggcgcgggcaactccggcaccgtgctcgccgccctcttcgcccccggcctggccgccgcgttcggctggaacaatgtgttcggcttcgccctgctgccgctcgtcctgaccctcctggtgttcgccatggtcgcgcgcaacgccccgcagcggccggcgcccaaggccatgggcgattacctgaaagccctcggcgaccgcgacagctggtggttcatgttcttctacagcgtcaccttcggcggcttcctcggcctggccagcaccctgcccggctatttccacgaccagtacggcctgaacccggtgaccgccggctactacaccgccgcctgcgtcttcgccggcagcctgatgcgcccgctcggtggcgccctcgccgatcgcatcggcggcatccgcagcctgctgatggtgtacaccctggccgccatctgcatcgccgcggtcggtttccacttgcccagcgcgatggccgccctcggcctgttcgtggtcgccatgctcagtctcggtgccggtaatggcgcggtgttccagctggtaccgcagcgcttccacaaggaaatcggcgtgatgaccgggctgatcggcatggccggcggcatcggcggcttctgcctgactgccggcctcggcgcgatcaagcaaagcaccggcgactaccagctcggcctgtggctgttcgccagtctcggcgtgctggcctggttcggcctccacggggtgaagcggcgctggcgcaccacctggggctcggccgcggtcaccgccgcgcgggtctga

SEQ ID NO: 319047 - DNA, 1596 bp, Pseudomonas aeruginosa
gtggtcaccccggcgccggccctggccgccagcaagggacacctgctggccatcgccgacggtgtcagccagtgcgccgatggcggcctggcggcgcgcagcagcctgcaagcgctggccctggattactatgcgactccggaaacctgggccatcgtgcaatccctggaccgcctgctgctggcgcagaaccgctggctacaggccaacggcggcggccagccgctgctcaccaccctcaccgccctggtgctgcgcggcacccgctacaccctggcccacgtcggcgattgccgggcctacctatggcgcgacggcgagttgctccggcagaccagcgaccacgtctgggaacagccgcacatgcaacacgtgctgacccgcgccctgggactggaccagcatctggtggtcgactatctggaaggcgatctggagcccggcagccagtggctactggtcagcgacggcgtctgggcgacgctgggcgacagcggcatccgcagcatcctgcgcaacgccgaggagccgcagcgcagcgccgaggccctggttcgcgccgcccacctggcaggcagccaggacaacgccagcgccctgctggtacgcgtggaagccgtgcccgcaggcagcctcggcgacgccctcgcgcaactgggccactggccactgccgccgccgctgaagcccggccagctcttcgaaggctggcgggtccggcagttgctcggcgaatcccgccagtccctgctctaccgggtcgaggatggccagggccaaccctggctgctgaagacccttcccgccgcacgtgccgacgatccgctggcaacccaggccctgctgctcgaggaatggttcctgcgccgcgtccagggccggcatttccccgagctgcacggattggcgcagcgccagcatctgtattacctgatgcgcgagcaccccggagagactctcgccgagcgcttgcgcaaccatggcccgctgtcgctgccggagtggctggggctggccaaccagctgctgcgcgggcttggccagttgcatcgacgcaacctgctgcaccgcgacctcaagccggaaaatctccacctcggccgcgacggcgagctgcgcctgctggatttcggcctggcctggtgtccgggattgtcgcgcgaagacccccatctgctaccgggtacgcccagctacctggcgccggagtgcttctccggcacctcgccctcggtgcgccaggatctctacgccaccggcgtctgcctctaccaggcgctgaccgggcgctatccctatggcgagatcgaagccttccagcacccgcgcttcggtcgccccgtcccgcccagccgctatcgccccgacctgccggcctggatcgacgacctgctgctgcgcgccgtcgcctgcgaccccgcacagcgcttcgagaccgccgaggaatggctgctctcgctgcaacagggagaagcgttgccggtcgcggcgccccgcccattgctggagcgcgaaccgctgcagacctggcgcgccatcgccctgctgtccctggccgccaacctggcgctactcctggtctggctgaagggctga

SEQ ID NO: 319048 - DNA, 2451 bp, Pseudomonas aeruginosa
atgaagaagatcaagctggtgatggtcggcaacggcatggccggggtccgtaccctggaagaactgctcaagctcaactcggacttctacgacatcacggtgttcggcgccgagccccatcccaactacaaccgcatcctgctgtccccggtgctggccggcgagcagaccttcgaggaaatcgtcctcaacgacctcaactggtatgcggaaaacggcatcaagctcctcctcgaccgcaaggtggtgcagatcgaccgggtccgccgcagggtggtcgccgcggacggcagcgaggccgagtacgaccgcctgctgctggccaccggctcggtccccttcatcctgccgatacccggcaatcgcctgcagggcgtgatcggctaccgcgacatcgccgacacccaggccatgatcgactgcgcccggacccacagccacgcggtggtgatcggcggcggcctgctcggcctggaggcggccaacggcctcaagcaacgcggcatggacgtgaccgtcgtgcacctctccgactggctgctggaacgccaactggaccgcaccgccggcaaactcctgcaaggcgcgctggaagcccgcggcatccgcttccgcctgaacacccagacccaggaactgatggacaacggcagcggccgggtctgtgccgtgcagttcaacgacggcgacgtgattcccgccgacctggtggtaatggccgccggcatccgccccaataccgagctggccgaaagcgcgggcatcccctgcaaccgcggcatcctggtcaacgacaccctgcagacctacgacccacgcatctatgcggtcggcgaatgtgccaaccaccgtggcatcgcctacggcctggttgcgccgctgttcgagcaggccaaggtctgcgccaaccacctggctcatctcggctacgcccgctaccagggctcggtgacctcgaccaagctcaaggtgaccggtatcgacctgttctccgccggcgacttcatcggcggcgaaggcagcgagaccatcaccctttccgaccccatcggcggcgtctacaagaagctggtgatcaaggacgatgtactggtcggcgcctgtctctacggcgacaccgccgacggcggctggtacttccggcagatccgcgagaaccacaacgtcgcgcagatccgcgatcacctgatgttcggcgagaacgccctcggcgatgtcggccaccagggccagaacagcgccgcgagcatgcccgacacggccgaagtatgcggctgcaacggcgtctgcaagggcaccatcgtcaaggccatacaagaacacggcctgttcagcgtcgacgaagtcaagaaacacaccaaggccgccagctcctgtggctcctgcgcgggattggtggaacagatcctgatcagcaccgtcggcggcgccgccgacgtcaagccgaagagcgagaaggccatctgcggctgcagcgacctcaaccacgggcagatccgcaaggccattcgcgaacaccggctgaccagtctcgacgccgccatgcgcttcatggactggaagaccccgaacggctgtgccacctgccgtccggccctgaactactacctgatctcgacctggccgggagaagccaaggacgatccgcagtcgcgcctgatcaacgaacgcgcccacgccaacatccagaaggacggcacctactcggtggtaccgcggatgtggggtggcgtgaccaacgccgccgagttgcggcgcatcgccgacgtcgccgacaagtaccaggtgccgatggtcaaggtcaccggtggccagcgcatcgacctgctgggggtgaagaaggacgacctgccggccatctggaaagacctcgacatgccctccggacatgcctacggcaaatccatccgcaccgtgaagacctgcgtcggcagcgagttctgccgcttcggcacgcagaactcgacgcagctgggcatcgatctggaacacgacctgttcaacatgtggtcgccgcacaaggtcaagctggcggtctccggctgcccgcgcaactgcgccgaggccgggatcaaggacgtcggcatcatcggcgtggactccggctgggagatgtacatcggcggcaacggcgggatcaagaccgaggtcgcggagttcttcgtcaagctcaagaccgccgaagaggtgcgcgaatacaacggcgccttcctccagctctaccgcgaggaagccttctacctggagcgcacggtgcattacctgcagcgggtcggcatggagcacatccgcaaggcggtggtcgaggacgcggaaaaccgcaaggcgctcaacgaccgcctgcaattcgccctgtccttcgagcaggacccatggaagcagcgcatcgaacagccgcaattgaagaaggagttcgaacggattccgctcaagcaactggaaaacgtctga

SEQ ID NO: 319049 - DNA, 327 bp, Pseudomonas aeruginosa
atgaactggctggatagctgcgccctcgatgaaatcaacccgctgggctcgcgcgtggtcgccggcccgaaaggcgacatcgccatcttccgcgccgccgacgaccaggtcttcgccctcgatgaccgctgcccgcacaagggcggcccgctgtcccagggcctgatctacggcaagcgagtggcctgtccgttgcacaactggcagatcgaactggagagcggcgaagccgtggccccggaccagggctgcgcccatcgccacccggtgcgggtggagaacgggcgggtgctgctcggcctggacagcgtggcgctgtgcgcctga

SEQ ID NO: 319050 - DNA, 738 bp, Pseudomonas aeruginosa
atgagcggtaaggtctggctggtgggtgcgggtcccggcgatccggaactgttgaccctgaaggcagttcgcgccctgcaggacgcggatgtggtgatggtcgacgatctggtcaacccgagcatactggagcactgtccgtccgcccggctggtccgggtcggcaaacgcggcggctgccgctccacaccgcaggacttcatccagcgcctgatgctgcggcatgcccgccagggacgcagcgtggtgcgcctgaaaggcggcgatccatgcatcttcggccgcgccggcgaagaagccgaatggctggcccggcacgggatagacagcgagatagtgaacggcatcaccgccgggctggctggcgccactgcctgcggcataccgctgacctaccgcggcatcagccgcggcgtgaccctggtgaccgcgcatacccaggacgacagcccgctggcctgggaagccctggcacgcagcggtaccacgctggtggtctacatgggcgtcgcccgactcgcggagatccaggccgggctgctggctggaggcatggccgaggatacgccgctggcgatgatcgagaacgccaccttgggcaaccagcgcgaatgccgcagcaacctcggcgagctactgcgggacgccggacgtttcgccttgaaaagcccggcgatcctggtgatcggcgaagtaacccgcgacatcgtgtcgcaaccgatttccctgagcgcctga

SEQ ID NO: 319051 - DNA, 1053 bp, Pseudomonas aeruginosa
atgaaactgaagaacaccttaggcgttgtcatcggctcgctggttgccgcttcggcaatgaacgcctttgcccagggccagaactcggtagagatcgaagccttcggcaagcgctacttcaccgacagcgttcgcaacatgaagaacgcggacctgtacggcggctcgatcggttacttcctgaccgacgacgtcgagctggcgctgtcctacggtgagtaccatgacgttcgtggcacctacgaaaccggcaacaagaaggtccacggcaacctgacctccctggacgccatctaccacttcggtaccccgggcgtaggtctgcgtccgtacgtgtcggctggtctggctcaccagaacatcaccaacatcaacagcgacagccaaggccgtcagcagatgaccatggccaacatcggcgctggtctgaagtactacttcaccgagaacttcttcgccaaggccagcctcgacggccagtacggtctggagaagcgtgacaacggtcaccagggcgagtggatggctggcctgggcgtcggcttcaacttcggtggttcgaaagccgctccggctccggaaccggttgccgacgtttgctccgactccgacaacgacggcgtttgcgacaacgtcgacaagtgcccggataccccggccaacgtcaccgttgacgccaacggctgcccggctgtcgccgaagtcgtacgcgtacagctggacgtgaagttcgacttcgacaagtccaaggtcaaagagaacagctacgctgacatcaagaacctggctgacttcatgaagcagtacccgtccacttccaccaccgttgaaggtcacaccgactccgtcggcaccgacgcttacaaccagaagctgtccgagcgtcgtgccaacgccgttcgtgacgtactggtcaacgagtacggtgtagaaggtggtcgcgtgaacgctgttggttacggcgagtcccgcccggttgccgacaacgccaccgctgaaggccgcgctatcaaccgtcgcgttgaagccgaagtagaagctgaagccaagtaa

SEQ ID NO: 319052 - DNA, 498 bp, Pseudomonas aeruginosa
gtgacgcgcgcctatgaagaattgatgcggcgttaccagcgcacgctgttcaacgtctgtgcccgctacctgggcaacgaccgcgacgcggacgacgtgtgccaggaggtgatgctgaaagtcttgtacgggttgaagaactttgagggcaagtcgaagttcaaaacgtggctatatagcatcacgtacaacgagtgcatcacgcagtaccgcaaggagcgccgcaagcgccgattgatggatgcgctcagcctcgacccgctggaggaggcttccgaggagaagtcgccgaaggttgaggagcggggcggattggatcgttggctcgtccatgtcaatccgatagatcgggagattctggttcttcgcttcgtcgcggaactggagtttcaggagatagcggatatcatgcacatgggtctgagtgcgacgaaaatgcgctacaagcgggcactggaccgcctgcgcgaaaagttttcagatgcgaccgaaacatag

SEQ ID NO: 319053 - DNA, 825 bp, Pseudomonas aeruginosa
atgcaattcgatatctggacccagagcttgctgaccgcgatgaacaccctgtggggcaagctggcaggcttcatccccaacctgctcggcgccctggtggtcgttctgctcggcttcgtcatcgccaagctgctcgatgcgctgctttccaagctgctggccaagctgggcctggaccggctgatgggtggcaccggcctgaccaagctgctggcccgggtcggcatccaggttccggtctcgacgctggtcggcaagatcgtctactggttcgtactgctcgtcttcctcgtatccgccgccgagtcgctcggcctgcagcgggtatccgccacgctggacgtcctcgccctgtacctgcccaaggtgttcggcgcggccctggtgctgatcgtcggcgtgctcctggcgcaactggtgaacagcgtcgtgcgcggcgcggcggacggcgtcggactcgaatacgcgaacggcctggggcggatcgcccagtggctggtcatcatcatcagcatctcggtggcggtggggcagctcgaggtcaagaccgacctgctcaactacatcatcgccatcgtcctgatcaccgtcggcctggccgctgcgctggccctgggcctgggcagccgcgaggtcgccgggcagatcattgcaggaatctacgtccgcgagctgtatcaggtcggacaacaggtgaaagtgggtgacgttgaaggcactattgaagagataggtacggtcaagaccatcctgctgacggaagagggagagcttgtgtcgctggccaaccgtctactgctcgatcagcgagttaccagccgctga

SEQ ID NO: 319054 - DNA, 249 bp, Pseudomonas aeruginosa
atgcacgatccgttcgaagagtccctgcgggacctgctcaaggcttcggctccccagccggacgacgacgcgcgtctgggacgggtgctgaagacggccaatcgccaggtcggcgccggtgacctgttcagcctcatggggcactggctgcaggcgctgatgatcggcatcaacaacggttcgccgcatctggcgccggtttcccgtatttccgcgaaaaacgcatcttctgctgacaaggctgagtga

SEQ ID NO: 319055 - DNA, 999 bp, Pseudomonas aeruginosa
atgcaagcgtacgagtcgggtgacgagcgcggcctgatctatggctacgtcctcaacgggcgcggcggcggacgccgtgtcggacgcaaccagatagcggtgctcgacctgctgccggaggaaagcctttggctgcactgggaccgcggcgtaccggaggcacaggcctggttgcgggattccgcggggctcagcgagttcgcctgcgatctgctgctggaggaggcgacccgcccccgtttgctcgatctcggggccgaaagcctgctggtgttcctccgtggagtgaacctgaatccgggcgcggagccggaagacatggtttcgctgcgggtattcgccgacgcgcgccgggtgatctcgctgcgcctgcggccgctgaaggcggtggccgatctgctcgaggacctggaggcggggaaagggccgaagacagcatccgaggtcgtgtactacctcgcgcactacctgaccgatcgcgtcgacacgctgatcagcgggatagccgaccagctcgatgctgtcgaggagctggtcgaggcggacgagcgcgccagtcccgaccagcaccagttgcgtaccctgcgccgccggtcggcggggttgcggcgctacctggcgccgcagcgggacatctactcgcaactggcgcgctacaagctgtcctggttcgtcgaggacgacgccgattactggaacgagctgaacaaccggctgacgcggaatctcgaagaactcgagttgatacgggagcgcatcagcgtcctgcaggaagccgagtcgcggcgaatcaccgaacggatgaaccgcaccatgtatctccttggtataatcaccggctttttcctgccgatgagcttcgtcaccggcctgctgggaatcaatgtcggcggcattccaggggcggatgcaccgcatgggttctggctggcctgcctgctgatcggcggcgtcgccaccttccagtggtgggtatttcgtcggctgcgctggctctga

SEQ ID NO: 319056 - DNA, 489 bp, Pseudomonas aeruginosa
atgcattacgtcactcccgatctgtgcgatgcctatcctgagctggtccaggtcgtcgaacccatgttcagcaacttcggcggccgcgactccttcggcggcgagatcgtcaccatcaagtgcttcgaagacaactcgttggtcaaggagcaggtcgacaaggacggcaagggcaaggtcctggtcgtcgatggcggtggttcgctgcgccgcgccctgctgggcgacatgctggccgagaaagcggcgaagaacggctgggaagggatcgtcgtgtatggctgcatccgtgacgtcgacgtgatcgcccagaccgacctcggcgtccaggccctggccagtcatccgctgaagaccgacaagcgcggcatcggcgatctgaacgtcgccgtgaccttcggcggcgtcaccttccgccccggcgagttcgtgtatgccgacaacaacggcatcatcgtttctccgcaggccttgaagatgcccgaatag

SEQ ID NO: 319057 - DNA, 1011 bp, Pseudomonas aeruginosa
atgcaaagcagtagtcgcctctttcctgtcgccctggtcagcgccgagttgcgcgccgaccttaccgaagacatctaccgcctgaagcccggcaacagccccgatgccagcgtcgagctggtcgtaacccggcttggacagcaggccgccggcgagcggcgcggaccgcctgtgatcctcctgcacgggagtttttccaaccgccgcttctggtactcgccgcgtgcgctcggactaggtccttacctggcgcgggcggggttcgatgtctggctgccggaaatgcgcggccatggcctgtcgattcgcaacgatggttaccgggacaaccgggtcgccgactacgcgcgctacgacctgccggcgctggcctccttcatccacgagcagtgcgggcagccggcgcactggattggccactccctcggtggggtggtgctggcggcgggactgggcgggggctacctggaccaggcgcggatcgcttccgtggcgttgttcggtagccaggtcagcaccgcgcactggctgttcaggttgcccatggcaggcatcctcgcgcgcctgctgctgcgccgcgtcgatgcgctgtccggaagccgttggcggcaggggccggaagacgagccggtcggcctggcgctggaggtcctgcgttggcatgggctgttcggccgcttcggcgagccgggcaacgactggtggaaggggctcgccgcagtcgacgtaccgctattggcggtcgccggggctggggaccggcaggacccgtcctgggcctgtcgcaagttgttcgagcagttcgcctcgtccgagcgcgaatacctgttgctcggacacgaggctggctacgccgaggactacgggcatatcgagatgctgatcggcaaggcggcccagctagaggtctggcccttggtggagcgctggctgcgccagcgatcgccggcgggcgacgaatccgcgtggagcgaggcgctagacgtatcggaagccggaatcagcggctaa

SEQ ID NO: 319058 - DNA, 2376 bp, Pseudomonas aeruginosa
ttggtagagtacgtagtttccctcgataagctcggcgtccatgatgtagagcatgtggggggcaagaacgcatccctcggcgagatgatcagcaacctggccggtgccggcgtttccgtacccggcggatttgccaccaccgcccaggcctaccgtgacttcctcgagcagagtggcctcaacgaccgtatccacgcggccctggacgccctggacgtcgacgacgtcaacgccctggccaagaccggcgcgcagatccgccagtgggtgatggaagccgagttcccggcccgtctcgacagcgagatccgccaggccttcgccgccctggccaacggcaacgacaacctcgccgtggcagtgcgttcctccgctaccgccgaagaccttccggacgcctcgttcgccggccagcaggaaaccttcctcaatatccgcggcgtggacaatgtgatccgcgcagcaaaagaggtcttcgcctccctgttcaacgaccgcgccatcgcctaccgcgtgcaccagggcttcgatcacaagctggtcgccttgtccgccggcgtgcagcgcatggtccgctcggaaaccggcaccgctggggtgatgttcaccctggacaccgaatccggcttccgcgacgtggtcttcatcaccggtgcctacggcctgggcgagaccgtggttcagggcgcggtgaaccccgacgagttctacgtccacaagccgaccctggaagccgggcgtccggccatcctgcgccgcaacctgggtagcaaggcgatcaagatgatctacggcgacgaagccaaggccggtcgctcggtcaaggtggtggacgtcgatcgtgccgatcgcgcccgcttcgccctgagcgacgccgaggtcaccgagctggccaagcaggccatgatcatcgagaagcactatggccgcccgatggacatcgaatgggccaaggacggtgacgacggcaagctgtacatcgtccaggcacgcccggaaaccgtgaagagccgcgccagcgccacggtcatggagcgctacctgctgaaagagaaggggaccgtcctggtggaagggcgtgccatcggccagcgcatcggtgccggtccggtcaaggtgatcaacgacgtgtcggaaatggacaaggtccaaccgggtgacgtcctggtctccgacatgaccgacccggactgggagccagtgatgaagcgcgccagcgccatcgtcaccaaccgcggcgggcgcacctgccacgcggcgatcatcgctcgcgaactgggcatcccggcggtggtcggttgcggcaacgccacccagatcctgcaggatggccagggggtgaccgtttcctgtgccgaaggcgataccggcttcatcttcgaaggcgaactcggtttcgatgtgcgcaagaactcggtcgacgccatgcccgaccttccgttcaagatcatgatgaacgtcggcaatcccgatcgcgctttcgatttcgcccagttgccgaacgaaggcgtgggcctggcccgcctcgaattcatcatcaaccgcatgatcggcgtgcatcccaaggcgttgctgaacttcgccggcctgccggcggacatcaaggaaagcgtggagaagcgcatcgccggctatcccgatccggtcggcttctacgtcgagaagctggtggagggcatcagcaccctggccgcggcgttctggccgaagaaggtcatcgtgcgcctgtccgacttcaagtccaatgagtacgccaacctgatcggcggcaagctctacgagccggaagaagagaacccgatgctcggcttccgtggcgcctcgcgctacatcagcgagtcgttccgcgactgcttcgagctggagtgccgtgcgctgaagaaggtccgcaacgaaatgggcctgaccaacgtcgagatcatggtgcccttcgtgcgcaccctgggcgaggcgagccaggtggtcgagctgctggccgggaacggcctgaagcgcggcgagaacggccttaaggtcatcatgatgtgcgaactgccgtcgaacgccctgctggccgacgagttcctcgagttcttcgatggcttctccatcggttccaacgacctgacccagctgaccctgggcctggatcgcgattccggcatcgttgcccacctgtttgacgagcgcaatccggcggtgaagaagctgctggccaacgccatcgctgcctgcaacaaggccggcaagtacatcggcatctgcggccagggtccgtcggaccacccggacctggcccgctggctgatggagcagggcatcgagagcgtctcgctgaaccccgactcggtgctggatacctggttcttccttgccgaggggcaagaccaggcctga

SEQ ID NO: 319059 - DNA, 819 bp, Pseudomonas aeruginosa
atgaaacgaaccgcattcttcatctcggacggcaccggtatcaccgccgaaaccctgggccaaagccttctggcacagttcgagaacatcagcttcgtcaaactgacgagaccgtacatcgataccgaagaaaaagcgcgcgccatggtacagcaaatcaataatgctgccgagtcggacggggcccgcccgatcatcttcgataccatcgtgaaccgcgacatccgggcggtcctggcgcaatccaacggtttcatgatcgatatcttcgccacctttctttcgcctctggaacaggagctttcggccgactcgtcctattcggtcggcaagtcccactccatcggccacaactccaactacatggatcgcatcgaggcggtgaacttcgccctcgacaacgacgacggcgcccgcacccactactacgacaaggccgacctgatcctggtcggcgtctcgcgctgcggcaagacgcccacctgcctgtacatggccctgcagtatggcatccgcgccgccaactacccgttgacggaagaggacatggagcgcctgcaactgccgaacgccctcaagcagtacaagcacaagctgttcggcctgaccatcgaccccgatcgcctcaccgcgattcgcaacgagcgcaagcccaacagtcgctacgccagcttcgcccagtgcgaattcgaggtacgcgaggtcgaaagcctgttccgccgcgaaaacatcgcctacatcaactccacgcatttctcggtggaggagatttccgcaaagatcctcgtcgaaaaaggcgtggaacggcgcttcaaataa

SEQ ID NO: 319060 - DNA, 540 bp, Pseudomonas aeruginosa
atgaaactcaagcccttagctcccctgctctgcctattcatcgccgtaccaggcctgagcgtagccgccgaaaagacggtctacggcctgaacgaatacgcgcgcatcaacgacccggacatccagctggccgccaagctcgacaccggcgccaagaccgcctccctcagcgcccgcgacatcaagcgtttcaagcgcgacggcgaaacctgggtgcgcttctacctggccaccgacaacgccgacgacaccccgatcgagaagcccctggcgcggatcagcaagatcaagcgccgccacggcgacttcaaccccgacgagggcaaggcctataccgcccgtccggtgatcgagctgcaggtctgcatgggcaaggcgattcgcaccatcgaagtgaacctgaccgaccgaagtgcattccaatacccgcttttgatcggctcggaggccttgaagaaattcgacgcactggtcgatccgagtttgaaatactcggccgggaaacccggctgcaaacctgatgcaaaacctgctgagtaa

SEQ ID NO: 319061 - DNA, 1527 bp, Pseudomonas aeruginosa
atgcgctctctcaacctgcatctgaaagtcctgatcgccatcctgctgaccctgggtgtggcgatcaccgcctatcagattttcgtccagggtattcccgttaccgaagccgaaaccgatgacctctggaacatcgatgccaaggtcgacttcgtcgccacgccgaaaaccccggtcaaggtgcagatgttcgttccgccgttgagccaggactacgtcagcctcaacgaaagcttcgtctccaacaattacggcgtcagcatcaatcgcgccgacggcaatcgcaaggtgacctggtccgcccgccgcgccaacggcaagcagaccctgtactaccgcctggtgctgaccaagcgctacaccggcgagaagaccaaggagaaaggcccgatcttccgcgacagcctgcccctggaaggcccggagaagatcgccgcagaagccctgctggcccccattcgccagcactcggccgacgtcgagaccttcgtcagcgaagccatcaagcgcgccaacaacggcaacgacgacaacgtcaagctgctgatggccggcgacaccagcctggaaaagaaagcgcatatcgtcgagaccctgctgtccatcgcccacgtgccgatggagcgggtccataccatccgcctggtcgccgacctgcaacagagcccggaactgtggctgcgcagcttcaacggcgagaactggctgtatttcaacgtggtcaccggcgaacagggcctgccctccgatcgcctgatctggtggcttggcgatgagccgctgatgaccatcgacggcggcaagaaggcccaggtcagcttcagcctgaacagcagcgagatgaacgccatccgcctggccaagctgtccgacgagaacaccgaggcggccttcctcgagtactccctgtacggcctgccgctgtccacccagcagaccttccagatcatgatcatgatcccgatcggcgtgctggtgatcctgatcctgcgcaacctgatcggcctgcagacccttggcaccttcaccccggtgctgatcgccctggccttccgcgagaccggcctgcaatggggtatcgccctgttcaccgtgatcaccgccctgggcctgtcgctgcgctcctatctcgagcacctgaagctgcagatgctgccgcgcctctcggtggtgctgaccttcgtggtggtgatgatcgcggtgatcagcctgttcagccacaagctcggcttcgagagcggcctgtcgatcgccctgttcccgatggtgatcctgaccatgaccatcgaacgcctgtcgatcacctgggaagagcgcggcggcggccatgcgatgaaggtggccatcggcaccctgttcgcggcatcgctggcgcacatcctcatgcgcatcccggaactggtgtacttcatcttcaccttcccggccgtgctgctgatcctggtcgccttcatgctcgccatgggccgctaccgcggctaccgcctgaccgagctgttccgcttcaaggccctgctcaaggactga

SEQ ID NO: 319062 - DNA, 984 bp, Pseudomonas aeruginosa
atgtcgatctggaagacctggaaagacctgaccgcgaaaggcgtgatgggcatcaaccgacgcaatgccgattacgtcctgaagtacaacaagcggcacctgtatccggtggtggacgacaagatcatcaccaaggaacgcgcgctcgaggccggcatccacgtgccggagatgtacggcatcatcgagaccgagaaaggcatcgacaagctcaacgagatcatcggcgagcacaacgatttcgtcatcaagccggcgcagggcgccggcggcgacggcatcatggtgatcgccgaccgcttcgagggccgctacaagaccgtgtcggggaagatcgtcagccacgaggagatcgagcaccacatctcgagcatcctctccggcctctactccctcggcggccatcgcgaccgcgtactgatcgagtaccgggtgacccccgaccagatcttcaagagcatcagctacgaaggtgtcccggacatccgcatcatcgtactgatgggctacccggtaatggccatgctgcgcctgccgacccggcagtcgggcggcaaggccaacctgcaccagggcgccatcggcgtgggcgtcgacctggccaccggcgtcaccctgcgcggcacctggctgaacaacaagatcgccaagcacccggacaccaccaacgcggtggacggcgtgcaactgccgaactgggacggcttcatgaagctggcggccggttgctacgagttgtcgggcctcggctacatcggcgtggacatggttctcgaccaggagaaaggcccgctgatcctagaactcaacgcccgcccgggcctgaacatccagatcgccaacgacagcggcctggtgcaccgctgccacgccgtcgaggcgcgactggaagaactcaaggcgaaaggcatcgaagagtccgcggaagagcgcgtacgcttctcccagcagttgttcggccacgtccagcagcaccagggctga

SEQ ID NO: 319063 - DNA, 1191 bp, Pseudomonas aeruginosa
atgatgcgcgcatccatcgtactttgcgtcttctccctggcgctgccggcatcttcgccgggctgggcctccggcgggcgctacctgacctgggtggacgacaatggcggggtgcacaacaccttcgtcgacggccagttcgaccgccagcagcgccaggcacggcagcgtatcggccagagcgaccaggcgcgggtgctgaacaaggcggacaacgccacgcagtggccggggaacagcagcggaggggagagcaagcgtcgctactacacctggatcgatgccaacggcaacgtgcagaacagcttctatgccggcgcccaggtcgccggccagcgcgccgactacgtcctgcccaacggcgagcactccgccgaatacatcgatgccgaggccttcgagggcaagggtttcgttcgcagcgagaacggcagtccctactacacctgggtggacgagaagggccgcatgcacaactcgcagatcccgcccgaggagcgcgcggcgcgcttcaagcgggaggccgcgccttcgtcgcagatcgccttcaccgagggccggcagatcgagttcaagcaacgtccgacggcgttgcccgggctggatggcgccggccagcagagcgatgcgctgaaggctttgctcaagggcaccgagatgaccatcgacgatctctaccaggacctgcaacggcgctgctgcgagcagatcgccgagagcgacttcaccgaactggatgccgacgaaccgcgctacgaggagttgaaccgcttctcgccgagcttcgactttcccatgggcaggagcttctacgcggcgatccggctgccgcgctcccagggtgtctacggcctgcgcatccgcagtttcgccaaccgccaggtggtctacccgtcgctgctgttcctcgacgagcagaagcgtccgacccggctggtcagcgacgcggtgtacaagctgaacccggaaacctggtatcgctacgctttcatcgagggtacggtgccggtgcgagccaatcgcggcgagcgctacgtgctgctgctgaccaccgacgaggaccgctcgctgcaaaccctcgacaacaagccgttcaagcgtccgctgcaggacctggcggtgaacgaggcgggtatgcaggtgcatgagcacgcccggcagggcggcttcgagctggccgtggtgcgttga

SEQ ID NO: 319064 - DNA, 1599 bp, Pseudomonas aeruginosa
atgaagatgcgcattgcgccgctctggctggcgctggcaggggtgtgcctggcctggattccgccggccggcgcgcagatggccaacgacctgaccatcggcaacccgaaagccatggccctcggcaacgccgtgaccgccgacgagaccggcatcgattcggtgcactacaacccggcggcgctgaccaggatgaagggccgccaggcgaccgtgaagctgctcaccggggtaatggacatccgcgccggcttcaaggcgccgccgaactacggcgaaggcaccttcggcctgcgcgacgacccggtcgccaacagccacagccggaccctgaccccgaccatgtacctgcccggcctcggcggcatgaccgacgtgccgttgctggtggcgccgctggccgggatctcgatcaacccgccgggttccaagttcaccttcgccaccaacgtctacaccccgcaagcgctgggctacagccgcgattccgatagcgatccggcgcgctaccagggacgcgaggtgtcgttgcagcggctcacctacttctcgccgaccctggcctaccaggtcaacgacgaactgtcggtcggcctgtcggtgggtttttcccaccaggcagtagcgttgaacgaggatttccgggcgccgaaccagttgctcgggctgttgcagcagaccaaggagatcggttgcctgccgggaatgcaggagatcctcgaggtgttcttcaacgtctgcggcggcaacatcggtccgttccagaacctggccaatatcgacctggacatgcagcagtcgctgtcgcccagcttcaacctcggcgtgctctgggagcccaccgactggttcgcctggggcgcgacctaccagagcgagtcgcggatgaggctcaagggcaagtaccgggtcgactacggccaaggctggcagggtttctggaccggggtgcacaagtcgctcggtggtgcgatcctcggccagatgttcccctacgggaacgtcgatgaagagcatggcaacgccacgatgaacatggtctacccggatgccttctccaccggcgtgaagctgcgcccgttcaagaagtggcaattcaacttcgacctgaaatggaacggctacagcgactggaacgagttcaagatcgagttcgaccgcgagcttgacctgctgcgcatcgccaagtacctcgactcgaaggacgccaccagccacagcatcaccctcgaccgcggctaccgcgatacctggagctgggccatgggcgtgcagtacgacgtcaacgaccgtttgcagctacgcgccggctacgaataccggccttcggcgatccccaagggccaggcggacatcctggtgccgatcggcgatgccaatctctacggcctggggctgggctaccagtgggacaaggacacggtgatcgatgtcggtttcaactacttcgtcaccaagcagagcgtcaaggccgataccagctgcaacctgaactgcaccgggctcgacaacctggtgtacaacccctacgcgggactggacgtggacaccacggtgaaggcctatattttcgccatgacctaccgtacgaccttctga

SEQ ID NO: 319065 - DNA, 1026 bp, Pseudomonas aeruginosa
atgagaatcagggggtacacatgcgcggcggcgctgatgctgtctatcagcggtttgtccgttgccgaggaagcctcggtcgaccaggcccgtgacgcgctggccaagaagaatgacgatgccgacagcgccaaggcgctggaggaggtcttccaggccgccgagaagagctacaccttgctgaagaagggcgagcggaccctgacctacggtttcgactacgcgctggtgcgcgaccagcggctgaccctggtgccgctgaccaagaccagtggcggcacgcagatctacggcctcgccggccggcagagccagtcccagcacaccttcaccaactccttcaccttcgactacgggatctgggacaacctcaccttcagtttccgcctgccgctggtagccaagtacgacaccgagatggatacccacgcctacagcctcggcgacgtttccgcgaccttgcgctggcagccctgggcggcggtgcgcgggcggccggtcaccacgctgtataccaccatcggcctgccgaccggcgacagtccctacaagaccaacctggacaaggacatctccaccggcaacggctactacagcctgggcttcggcgcgaacatgtcctatgtgatcgacccggtggtcctctacggctcgctcggctacacctggaacctgccggtggacgacgtgcaccagaccctggccgacaactcccagctggagaaggtctcgcccggcaacacgatcaacttcaacatgggcatggcctacgcgctgtcctacgacgtctcgctggcgacttcgtaccagatggcctacacgctgaagaaccgctaccacaccactgccggtacgttcgagtcgtccgaacagaccagtagcatcatgaacttctcgctcggcttgcggacgtcaccggactacatcgtcaacgtcaacgccggtttcggcctcacggaagactcgccggatgtactgctggggttatccgtacccctcgatatcaaagggctgaaggcccagtaa

SEQ ID NO: 319066 - DNA, 762 bp, Pseudomonas aeruginosa
atgttcgagattttgctgggaagtctgatcgggctgttcgggttcacccagacggtcgataccaagccgcaaccgcagggcacggtcaacctcagccagcctctgacccccaatggaccctaccgcgaatcggtgcagctggagccgatgagccagttgcagttccgcaacgtcatccgccaggcctatgactacagctgcggctcggcggcgcttaccacgctgctggactactacctcgggcgcaacctcgaggaacgccaggtcatggaagggctgctgcgctatggcgaggccgataagatcgtgcagcgccgcggtttctcgctgctcgacatgaagcgctacgccgctgcgctgggctacaagagcggtggttttcgcgccgagttcagcgacctggacgctctcgagcatccggcgctggtccccatccactatgccggcttcaagcatttcgtggtggtgcgcgatgtctacaacgatcacgtcttcgtcgccgatccggccttgggcaacatcagcttcacccggacgcgcttcgaggaaatctgggaccagaacgtcctgttcgtgatcttcccgagtgggcaggagccccgcaacgcgctggcgctgaacgatcgcgacatgcgcctggtggacgaccgcaccgtcagcctgctggcgttccgcgagtttccgcagatcaacaagatcactgaaaaccaggtccgtgagctgggcactggtggcgacgtcatacacctgcgcaccaagtag

SEQ ID NO: 319067 - DNA, 438 bp, Pseudomonas aeruginosa
atgaaaaagcacctgttccttgcaactgctgttctggctgctcccttgctggcgcatgccgacctgaaagccatggacgatggcgcgctgtccgacgtgaccggccaggcaggcatcagcatttccggtactttccagggctccgtcggggccgtgacctacaccgataccgacaccaacggcggctccctgcggctggagaacatcagcctgccggcgctgaccatcgacgataccaagccgctgaccatcgacgtcgtcaccaccgatatcggcggcaagtcgacccagcaactggccatcggcctgccggccatcaccggcgacgtgaccgttggcgccatcaaggtgggcgacaccagcgccgccagcatcggctcgctgaccgtctccgggctgaacatggccggttccaccatcaaggtctggggtcactga

SEQ ID NO: 319068 - DNA, 2724 bp, Pseudomonas aeruginosa
atgggccatcgcgacggtgttcccgccagcaccattccgctgttgcagaccaagctgttcccgccaggcgccggagggctgccgctgctgccccgccaggcgctgatcgaccgcctgtacgaggcccgcgggcgacgcgcgatggtgctcagcgcgccggccggcttcggcaagagcaccatcctctgccagttgcgcctgcgcctgctggagcagggcgcggcggtggcatggttgtcctgcgacgagaccgacagcgaaccgcagcgtctgatccagtacctgctggcgagcatccagcgagtggtcccggcattcggcggcaataccgccaatctgctcggcaccgacgtcgcggtgccgctggagggtatcctggatgccttcctcgccgacttgcgtcgcctggaaggccccttgtacctgttcctcgacgatttccaccgcatccgccacgccgccttgccgcatggggttcgctacctgatcgagaacctgcccgatcacgtgcgggtggtggcctcgacccgcttccgcccgcgcttcctggtcgacgagccgaccctcaagccctggaccttctgcctgagcgcggaagacctacgactttcgcgcgaggagagcgatgcgtttctcctcgacctcaaggggctggagctgggcgagcgcgagctgaagctgctgttcaagcgcaccgaaggctggatcacggcgttgcacctggcggccctggccctcagtcgcaataccgaccgggaaggtttcctccgcgggctctccgggaccgaacggaacatcgccgactacctggcggaagacgtgctggccagcctgcccgccgacctgcagctgttcctcgaccagacctcggtgctcgacgagttcaatgcggaactgtgcaatgcgctgaccgggcgtcgcgacggcctggacatgctcatgcgcctgcagaacgagcagttgttcgtcatcgccctggacgaccagcgcgaatggttccgctaccaccatctgttcgccgagttcctccaggggcggctgtcccggcatgccgatccgaccccgttgctgcatgcggcggcgcgctggtgcgaggggcgcgacctggccgaccgggcgatcaagtacgcccttcgcgcccgcgactacctgttcgccgccgagttgctggagcgccagggcgcgcgcctgatcgccggtaaccgggtgtacggcatcctcggcatgctcaacggcattcccgccgaggtgatccgcgagcatccggtgttccagatcttctacgcctggcaactggcgttcgagcaacgcttcgccgaggccgaggcgttgatcgaggaggtcagccaccgcctcttgcaggggcgcggcaaggtcatgcacttcgggctcggcgagttgctcgccgccgcccaggtgctcaaggccctggtgttgctctaccaggacaagctcgaagcctgcctgaaggtcgcccgtcactggctgtccatggtcccgagcaaccagccggtgttccgcgccagcctgctctgcgtgcaggcttcggcgcatgcgctgctcggcgactacgccgaggccgccggcgccatcggttccgcgcgggaggacctgaaagtcgccgacagcgagtacctgcaggtggtgaccagcctgatcgaatccctgatctgcaaggagagtggcgacctggagcggggcagggcgatcgccgagtcggcgcgcaaccgggtcgagcaggtattcggccggcgcagccgggtcggcggacccttgtcgctggcctatgccgacctgctctacgagcaggaccggcatgccggcgtgctcgccgaactaccgctggcgacggtctggcgggatgtcgcgacgccggtggaactgctcagtcgcggccagttggtcatggccaaggcgcgcttcttctccggcgccgccgagcaggggctggcgcaactcgacgaatggctgagcggtctgctctcgcccggctacgagcgtgtctatgctcacgccatgagctgcaaggtgcagttcctgctgtggctgcgccgtccgaacgaggccgaacgggtctgcctgcaactggagcggcatcttgccgggctctccggcgagcggcatgccgacgcacagaccgccctggtcctggcggaggctcggctggcattgtccgagcgtcacgcggaacgcgcgcagagcaagctggaaagctgtctggccggctactcttccgcttaccagagggatcggcggctgcgtttgtccttgttactttctgtggcgtattggcagaaaggtaacagcgaaaaagccatcggcctgttcctcgccacgctcgaggaagcctggaatctcggctaccgccggctgttccaggacgacgcgttgtggctgttgccgatgtgggaaagctggagggaagcggagcccaagcgtgccgcggcctggcaggggctggccgacctgctccgcgagcagtgccggaagctctccgtggacccggaaagtttcgatgaaaatcaggatgttagccatcgcgaacgggaaatcctgcggctggtggcggcgggcttgtcgaaccgcgatatcgcgcaggcggtgcacctgtcggaagccaccatcaagtggcacctgcacaacctgttcgccaagctgggtgtgaagagcagaacgcaagccgtactaaagggtaaaagcctgggactgctgagcgaggcgtga

SEQ ID NO: 319069 - DNA, 2571 bp, Pseudomonas aeruginosa
atgttttccgcacctgccggcttcggcaagacctgcgcgctcgccgccctggccagggagcgcactgtagcagaccaggcggtggcctggctgtcgctggccgaagaagacgacgaccccgcccgtttctgccggcagctgatcgaggcgctgggcgaagccgtgccgcagcttggcgacgacgcccagacctacctgcagaacaccatgcgggtcccggtggtggcggtgatcgaaagcctgctcggcgatctcgatcgctatgcgcggccgttgctgctggtgctggacgacctgcacctggttagcaacccggacatcttcaccggcctcaatcgcctggtgcagtacgcaccgcccgggctggtcctggccctgggcacgcgttcgcagccggcgctgagcctggctacctggcgggccaagggactgttgctggaaatcggcctcgaggagctgcgcctcggcttcgaggaaacccgcgaatacctcgagcgcagcggtctctatctggacgagccctgcctgaaggcgctctatggccagaccgaaggctgggtggtgggcgtgcatctcgtcagcctgtggctgcgccagcaaccgcaggtgcaggaaatggccctgctcgacggcgacaagcaggcggtcagcgcctatctgctggcggcggtcttcgaacgcttgcctggcgacctgcaggaagcgctgctggcccttggcgttgccagccaattgagcggcgacctggccaacgccctgaccgggcgccaggacggccaggcgctgctggagcgcctggagtccatgcaattgttcctcctgccgctggatcgcgaacgccagtggtatcgcttccacctgctgttcgccgacttcctccgcaaccgcctgcgcgactccgatccggaccgtttcaagcaactgcatttcaacgccagcctgtggttcaccaaccaccacatgccgacgttcgccatcgagcatgcctgtgcggcggaagacccggagatgatcgccgcgctggtcgacggatgcggactggagctgatcaaccgcggccagctcagcctgatctaccgttggcgcaagcatgtgccggacgaaatcgccgagcgctatccgatcctggtccttaccgatgtctggtcgcgggccagcgacctcagcctgggcgaggccaaccggatcatcgacgaactgctggcgcgctggggggagagccgcggcgacgggccgatgggcgaccagtacctctccgcgctggcggtgaaggcggtggtggcgttgcagaaggacgatctggaactgtgcatcgccctggctcgccgggtcgaggtccagctcgggcagaacgctgccttcctcgaagtggcggtgttgatcaccgccgcgctggcccaggtggtccgtggccagggtgaccaggcgcggcgcctgctgggactggcgcagcagcgcaatcatttcctcgaagggcgctacctggacatgcaactggccaacgtcgaggtgatcctcgcactcgagcagggccaggtgaagcaggcgcaactgctcatcgagcggctccgccagcgtgcccggccgctgttcgagaagtccaggagcgcgctggcgctgccgaccatcaccgaggccctgaccgcctactacaggatcgagctggacgggctggaagagcgcctgggctgggcgctcgggcatgtggatgtgatcaatccgatcgatttctatgcccaggggcagatctgcctggcgcgcacccagcgcttgctgggacggccgaaggaggcgctggccagcctggcggcgatgcaggccctggcctcgcgcaatcagtcgtggcgcttcttcgcccaggccatggccgaagagatcaacctgatcctccaggacagcggccccgaccgcctgaagcgcgccgagcagcggttgaagagcgcggactggaacaagatggcggcacactaccgcaacatggccttcaacccggtcaactggtcgctgggtgtgagccgcgtgcgcctgttgcaggggcgaggacatttcagcgaggcgctgcacgagatcactcagttgcgcggcaccttgcagcccggctggcacggcctgcagcgcctgcgcctggatatcctggcggcgctcagctatcagcgcctgggctaccaggaacgggccaacagcctgctcggcgaatgcctgatcaatgccgaacgggaaggggtgcgcagcctcttcatcgaggaaggcgacggtattcgccagttgctccagcaactcgaatccaccgagcgccagccggcgctacagaccttcattcgcggcctgctcggcatctggcccgggcagggcgtgcgcaagccccaggatgcgctcgaggaaggcctgacggagcgcgagcgcgaagtggtctgcctggccgcacagggcctatccaacgaagaaatcggccagcgcctgtcgctggccctggggaccgtcaaatggcatctgcacaacatctacgaaaagctcaaggtgcgcaatcgcacccaggcgatccggcgagcccgcgagctgagcctgctctga

SEQ ID NO: 319070 - DNA, 1362 bp, Pseudomonas aeruginosa
atgcccagttgtcatgttcaccccctgccctaccatagcgacccaagctgtctctttgccatcatccatgaggcgcccggtgcggtgatgctcgattcgggtcgccccatcgctacccgtggacgctatgaccttatgagcgcctggccattggcagaactggcgccgctgcccgacgaatcggccaaccgcttcttcgcccgcctacgcgaagcggccggaagcctgggccccgcgcagctgccagcgccgtacgaactgcccttcgccggcggtctgctgggctatttatcctacgacctgggtcggcgcatcgagcgcatcggcgaacacgcccgcgatgacctgggcctgccgctggcctccgtcggcctgtatgcctgggcgctgatcagcgaccaccaggccggcaccagccaactggtattccacccgcgattggacgagcgcgaacgccagcgcctgatcgccctgttcagcgaggaaacgcaaggcgcggccggcaacttcaagcttctgggaaaattccgacggagcatcagcgcatccgactatcggcaggcgatccgccgcatccaggactacatccaggcaggcgactgctaccaggtgaactatagccagcgcttccaggccgcttgcagcggctcgccgtggccggcctatcgcgccctgcgcgaggcctgcccgacgccgttctccggctacctgcgactggccgacggcgcgatcctcagcctgtcgccggagcgcttcctcaagctcggcaagggcaaggtggaaacccggccgatcaagggcacccgcccgcgcggcaagacccccgaggaggacatggcgctggcggcgtcgctgctggccagccccaaggaccgcgcggaaaacctgatgatcgtcgacctgctgcgcaacgacatcggacgcagttgccaacctggcagcgtacgggtaccggagctgttcgccctggaaagctatcccaacgtgcatcacctggtgagcagcgtcaccggcgaactggcgccgggcaaggacgccctcgacctgctggaaggcagcttccccggcggctcgatcaccggcgcgccgaagattcgcgccatgcagatcatcgacgaactggaaccgagccgacgcggtatctactgcggcagcctgttctacctcgacgtgcgcggcgagatggacagctcgatcgccatccgcaccctgctggtcaggaacggccaggtcagttgctggggcggcggcggcatcgtcgccgactcgcactgggaggacgagtaccaggaaaccctggacaaggtccgggtactgctggaaaccctggaagggatggccgggacagcgtccccggaatag

SEQ ID NO: 319071 - DNA, 618 bp, Pseudomonas aeruginosa
gtggaaattgcctgtcttgacctggaaggcgtgctggttccggaaatctggatcgcgttcgcggaaaaaaccggtatcgacgccttgaaggcgaccacccgggacattccggactacgacgtgctgatgaagcagcgcctgcgcatcctcgacgaacatggcctgaagctgggcgacatccaggaggtgatcgccaccctgaagccgctggagggggcggtggaattcgtcgactggctgcgcgagcgcttccaggtagtgatcctctccgacaccttctatgagttctcccagccgctgatgcgccagctgggcttcccgaccctgttgtgccacaagctggagatcgacgacagtgaccgggtggtcggctatcaattgcgccagaaggatcccaagcggcagtcggtgatcgccttcaagagcctctactaccgggtgatcgccgccggtgattcctacaacgacaccaccatgctttccgaggcccacgccggcatcctgttccatgccccggaaaacgtgatccgcgagtttccccagttccccgcggtgcatacctacgaagacctcaagcgcgagttcctcaaggcttccagccgttcgctgagtctgtag

SEQ ID NO: 319072 - DNA, 735 bp, Pseudomonas aeruginosa
atgagccagcctttcgaccttcccgccctcgcctccagccttgccgacaaatccccccaggacatcctgaaagccgccttcgagcacttcggcgacgagctgtggatctccttcagcggcgccgaggacgtcgtcctggtagacatggcctggaagctcaaccgcaacgtgaaggtgttcagcctcgacaccggtcgcctgcacccggaaacctatcgtttcatcgaccaggtccgcgaacactacggcatcgccatcgacgtgctttcccccgacccgcgcctgctcgaacccctggtgaaggaaaagggcctgttcagcttttatcgggacggccacggtgagtgctgcggcatccgcaagatcgaaccgctcaagcgcaagctcgccggcgtgcgcgcctgggccaccggccaacgccgcgaccagagccccggcacgcgcagccaggtggcggtgctggaaatcgacggtgccttttccacgccggaaaagccgctgtacaaattcaacccgctgtcgtccatgaccagcgaggaggtctggggctatatccgcatgctcgaactgccctacaacagcctgcacgaacgcggctatatcagcatcggctgcgaaccctgcacccgtccggtgctgcccaaccagcacgagcgcgagggccgctggtggtgggaggaagccacccacaaggagtgcgggctgcacgccggcaacctgatcagcaaggcctga

SEQ ID NO: 319073 - DNA, 348 bp, Pseudomonas aeruginosa
atgcgcatcaccatggtcaagaaagtcctcgccaacggcgaggactgccgcaagtgcaaggaagtccagcaacgcctggaacaaggcggctacctgccgcgcatccatcgcaccctggtggccgacgaacgcgacccgaacagcgcaggctggatggtcgccgcccaatatggcgtagagaccgcgccgttcttcgtggttcgccacgacgacgggcgcgaacaggtctacaccgtgttcatgagcttcctccatgaagtcctcgaaccgcgagccgagcagtccgcggacgctgatcgcgaagcgctggccaggctggccggtcgcgacaatctcgacatgctctga

SEQ ID NO: 319074 - DNA, 975 bp, Pseudomonas aeruginosa
atgaagcttcagcaattgcgctatatctgggaggttgcgcaccacgacctcaacgtctccgccacggcgcagagcctctatacttcgcagccgggcatcagcaagcagatccgcctgctggaggacgaactgggcgtcgaggtgttcgctcgcagcggcaagcacctgacccgggtgacgccggcgggggagcggatcatccataccgccggcgagatcctgcgcaaggtcgagagcatcaagcagatcgcccaggaattctccaacgagaagaagggcacgctgtccatcgccactacccacacccaggcgcgctatgcgctgcccaacgtgatcagcggcttcatcaagcagtacccggacgtctccctgcacatgcaccagggcacgccgatgcagatcgccgaaatggcggccgacggcaccgtcgacttcgccatcgccaccgaggcgctggagttgttcggcgacctgatcatgatgccctgctaccgctggaatcgctgcgtcatcgtgccccacgggcatccgctgaccaagctgccgaaactgaccctggaagccctggccgagcagccgatcgtcacctacgtgttcggcttcaccggccgctccaagctcgacgaagccttcagccagcgcggcctggtgcccaaggtggtattcaccgcggccgatgccgacgtgatcaagacctacgtgcggttgggcctgggggtcggcatcgtggcgcacatggcggtcgatccgaagctcgacaacgacctggtgatcctcgacgccagccacctgttcgagtccagcgtgaccaagatcggcttccgccgcggcaccttcctgcgcggcttcatgtgcgacttcatcgagaaattcgctccgcacctgacccgcgagctgctggccaaggccgtgcaatgccacaacaaggccgagctggacgagttgttcgacggcatcgaactgccggtctactga

SEQ ID NO: 319075 - DNA, 498 bp, Pseudomonas aeruginosa
atgattcgttcgattctctacgccaccgatctggggctctatgctccctatgtcctgcaacacgccctgtcgctgacccgcgcctacaacgccgagctctatgtcgtccatgtggtggagcccctcgggctgttcgccgagtcggtcctgcagacctaccttgacaccgagcgtctccaggacctgcgggcgcaagggctggacaacgtcatggaaagcatcgagaagcgggtcctggaagggtttcgcgatgaactcggcgagttgccccaggatgcggcgctggtcaagagcgtgcgggtggtgcagggcgacccgccgcagatgatcctcgatgaggcggaaaagctggccgtggacctgatcgtcgccggcagccatagccacggcactcaactcgacacgccgctgggccggactgccgcgcgtctggtgcaactggcggaggtaccggtgtacctggtgccgatgttgcagcaccgtagtcgcgacctgtag

SEQ ID NO: 319076 - DNA, 948 bp, Pseudomonas aeruginosa
atggattcaaagcagcaacggatcggcgtcatcggtacgggagccatcggcggcttctatggattgatgctggcgcatgccggtcacgacgtgcattttctcctgcgcagcgagttcgaggcggtcaatcgcgccggactcagcctgaatagtgcggtgcatggcttccggcgcctggcgccggtccaggcctaccattcggcgcaggacatgccgccctgcgactggttgctggtgggcgccaagaccaccggcaatcacgaactggcacccctgatccgcgcagcggcggcgccgggagccaaggttctgctgctgcagaacggtctgggcgtggaggagcggctgcggccgctgctgccggaaagcctgcatctgctgggcggcctctgcttcatctgtgtgcatcgcggcgaaccgggcgtgatcgagcaccaggcctacggcggagtgaatctcggctatcattccggaccggccgacgagcgacgccggcgcgagatcgtcgaggagggtgccgcgctgttccgcgagtccgggctggagtccacggcgatgcccgacctggagcaggcgcgctggcagaagctggtctggaacatcccctacaacgggctgtcggtattgctgaagagcagcaccgcgccgctgatggccaacgcggacagtcggtcgctgatcgaggcgatcatggaggaagtcatcggtgctgccggcgcctgcggcttcatcctgcctgagggctatgcggaccaactgctggcggcgaccgagcggatgcccgactatcggccgagcatgtaccacgacttcgcccatgggcggccattggagctggcggcgatctatgccgcgcccctggcccgcgctgctgctgcgggctaccggatgcccagggtcgaggcgctgtaccaggcgttgcgcttcctcgaagcacaaccgcgctga

SEQ ID NO: 319077 - DNA, 381 bp, Pseudomonas aeruginosa
atgatggtcgggccccatttcttcctttctatcgaggtcagcagcgtgccgtccctggaactcaccgatctggacgccgaccggcagttgcttgccctggaaggggtttcgctgttggtattcaccagcgaaggctgcgcgtcgtgccgctgggcccggcgccatctccccgcgatggacctgcccatcgagcgcctgtgctgggtggacgccggccgcaatggcggcctggtggaacgctacggcgtctttcacctgccggccctgttcatggtccgcgacggccgcttccatggcgcactgaacgttccgctgcaccaggaagccttgcggggtgcggtgctggcggggtcgaccgctttacctgaggagttgccctga

SEQ ID NO: 319078 - DNA, 1077 bp, Pseudomonas aeruginosa
atggctgatttacagatcgacgaccttaacgttgcctccaacgagaccctgatcacgccggagcagctcaagcgtgaaattcccctgaccgacaaggccctgcagaccgtggcccatggtcgccaggtggtgcgcgacatcctggatggcaaggaccaccgtctgttcgtggtgatcggcccctgctccatccacgacatcaaggccgcccacgaatacgccgaccgcctcaaggcgctcgcggccgaagtggcggatacgctgttcctggtgatgcgcgtgtacttcgagaagccgcgtaccacggtgggctggaaaggcctgatcaacgatccgtacctggacgactcgttcaagatccaggatggcctgcacatcggtcgccaactgctccgcgacctcgccgagaaaggcttgcccaccgccaccgaagcgctcgacccgatttccccgcagtacctgcaggacctgatcagctggtcggcgatcggcgcccgtaccaccgaatcgcagacccaccgcgagatggcctccggcctgtcttccgcggtcggcttcaagaacggcaccgatggcagcctgaccgtggcgatcaatgccctgcagtcggtctccagcccgcatcgcttcctcggcatcaaccagcagggcggcgtatccatcgtcaccaccaagggcaaccgctatggtcacgtggtgttgcgcggcggcaacggcaagccgaactacgattcggtcagcgtcgcgctctgcgagcaggacctgaacaaggcgaaaatcccgctgaacatcatggtcgactgcagccacgccaactccaacaaggacccggccctgcaaccgctggtgatggacaacgtcagcaaccagatcgtcgaaggcaacaactcgatcgtcggcctgatggtggaaagccacctgggctggggcagccagccgattccgaaggatctcgaccaacttcagtacggcgtctccatcaccgatgcatgcatcgactgggcgaccaccgagaagagcatccgcagcatgcacgccaagctcaaggacgtgctgccgaaacgccagcgcggctga

SEQ ID NO: 319079 - DNA, 285 bp, Pseudomonas aeruginosa
gtgagcgagtccctgtccatccatcatgacgtgggcggccatcagttcgagacgacggtggatggccatcgtgcctatctggcgtatatggacctgggcaagcagacgctggacatctaccggaccttcgtaccggattcgctgcggggtcgcggtatcgctgccgcgctgaccgaacacgccctgcagtacgccgaccgcatgggctacagcgtgatcccgtcctgctcctacgtggagcgttacatcgagcgtcgccagcgtcaggccgatccggccgcctga

SEQ ID NO: 319080 - DNA, 690 bp, Pseudomonas aeruginosa
atgagcgagttgatcagctaccagttcgaagacggcatcgccaccctgaccctcaacaacggcaaggtgaacgccatctccccggcggtgatcgacgccttcaaccaggctctcgaccaggccctgcaggacaaggccgtggtcatcgtcaccggccagccgggcatcctctccggtggctacgacctgaaggtcatgacctccggcccggagaatgccgtcaacctggtcgccgccggctcgaccctggctcgccgcctgctctcccatccctatccggtgatcgtcgcctgccccgggcacgcggtagccaagggcgccttcctgctgctctcggccgactaccggatcggcgtcgacgggccgttccagatcggcctgaacgaagtcgccatcggcatgaccatgcaccatgtcggcatcgaactggcccgcgatcgcctgcgcaagtcggcgttcacccgctcggtcatcaatgccgagatgttcagtccggccgctgcggtggatgccggcttcctcgacaccctggtcagcgccgaccagttgcaggaaagcgcgcgtgcagcggcccagcagttgaagaaactcaacatgaccgcgcatcgcaataccaagctcaaggtgcgcaaggcactgctggaaaccctcgaccaggcgatcgagctggacaagaagcacctgggctaa

SEQ ID NO: 319081 - DNA, 189 bp, Pseudomonas aeruginosa
atgaaacgcaacgtcttcgccgccattctcctcggcatggctaccaccctcgcagtgcaagccagcttcgccgacgaatccagcctgatggaaaaccgcatggtccatctgaaccagcacgccatcgagcaggcccagcagcaacaggccacggcgccaaccgcgagcgacaccgatgcgcagggttga

SEQ ID NO: 319082 - DNA, 507 bp, Pseudomonas aeruginosa
atgattcgtgaagttgaaggtgacattctgctttccggggcccaggtgatcgcccacggcatcgcgccccaggaccatttcgacagcggcctggccctcgccttgcgcgaacgctggccgtcgatggttcgcgactaccggcatgccgcccatgccagggcgcccgagccgggcggcatctgggtctgggccggggtcgacgagcagggcaagacccagtgcatcgtcaacctgatcacccagggcatgctgcacagcggtcgcagcgccaagccgggcaaggcgagcctggaggatgtcggccatgccctgcgcgagctggcccgctatgtgcgcagcgaaggggtgagcagcctggctctgccctgcgtggcgacgggagtgggcgggctggactggtccgaggtcaagccgctggtggttcgccacctgggcgacctggagatcccggtgattctctacgaggtctatcgcaagggcgtggcggccgaggaaaagctggcctga

SEQ ID NO: 319083 - DNA, 489 bp, Pseudomonas aeruginosa
atgccgaaatggattgcactttgcctgatcccgctgttggcaagctgcgccacctgccgccaggacagcgacagggaaaaactgctgtacgagaacgacatgcttcaggcgaaactgatcatcgtcgccaacgaccgcgatcgcctgccgctggcccaggccctgctggagcgcgcggcgcgcgacgaccgcagcggcgaggcggacttctaccaggccgtgctgatcgctcgccgcgacggccaggccagcgattgcgagcgcatcacccgcctcctcgaacgttccgccgagcgccgctacccgctggccaacgcgatgctctacaagatctacgccgagcccttcctgttgccgcgcgccgacattcccaaggccgagacctatcgccaggcctacgccgagctgccggtcgcgcgcagcggctacccctccttcgagcgagcccggcaggtggtcgatcgcctgctcgcgccgacttcgtcctga

SEQ ID NO: 319084 - DNA, 219 bp, Pseudomonas aeruginosa
atgaaacgtcgcagcccacgccattacgcccgcaacaccgccctggccaccctgggtctgtacgccatcctcatgctggtcgtgttgagcctcgtcgccggcgccgaaagcgccaggaacgccacaccggacaacgacaccgccacgaccttctccaaccagatcggccaggccctgccaggcctgctctcggggttgaacagtcgacgcgccggttga

SEQ ID NO: 319085 - DNA, 240 bp, Pseudomonas aeruginosa
atgagaaggcaaacacggaaattctggatcgtcgccgccctggcgatattgaccaatggctactcgctactcggcctcgcccaaggctcggcaggcgcactggcgcgcaccatcgaatgcaaccaggcgatggtccgcgcgctggcggccaacctggcgctgaagctgcagagcggcaccccgccggcacgcccgcagcgctggatcccggagcgcttcatcctcgactgcccggcctga

SEQ ID NO: 319086 - DNA, 723 bp, Pseudomonas aeruginosa
atgtcgctccgcatctgtatcctggaaaccgatatccttcgtcccgagctgatcgagcgctacgaaggctacggccggatgttccagcaactgttcgccaagcaaccgatcgccgccgaattcgtcatctacaacgtggtggaggggcgctatccggcggacgacgagcgcttcgacgcctacctggtgaccggcagcaaggccgactccttcggtcccgacccgtggatccagaccctgaagaccttcctcctggaccgctacgagcgcggcgacaagctcctcggcgtgtgtttcggccaccagttgctggccctgctgctcggtggcaaggccgagcgcgccagccagggctggggcatgggcatccaccagtaccagttgaacgaacgggccgactggatgagcccggcgctgccggacctgaccctgttgatcagccaccaggaccaggtcacccggctgccggaaaacgcgcgggtgatcgcttccagcgacttctgtccctatgccgcctacgccatcggcgaccaggtgctgtgcttccaggggcatcccgagttcgtccacgactactcccgcgaactgctcgaactgcgccagcagcacctgggcgaggaactctatcgcaagggggtcgatagcctggcgggggaccaccagggcaccgtcgtcgccgaatggatgatgcgtttcgtcgcgcgccagccgaccggcgcctga

SEQ ID NO: 319087 - DNA, 372 bp, Pseudomonas aeruginosa
atgttgctcaaggcagtacgtaacggactgggtcaggcgattatcctcgccgacttcgtcagccgcccccgcaagctgcagcgcagcaccgaggcccaggccgaggtcgagcgggcgctgcggaacctgtcgctctaccagttccgtgcctgtccgttctgcgtgaagacacgccgcgccatgcaccggctgaacctgccgatgcaactcaaggacgccatgaacgatccgcaggcccgccaggctttgctggaaggcggcgggaaggtcaaggtgccgtgcctgcgcatcgaggaaaacggccaggtgcgctggatgtacgaatccagcgagatcatcgcctatctggaaggtcgtttcgccaacgcctga

SEQ ID NO: 319088 - DNA, 999 bp, Pseudomonas aeruginosa
atgatgagacgacaggcttccgtgttgctgctggtatccatggtatcggcgaccgtcttgccggttttcgcccgtgcgccgggcgagcgcgagccgtcctgcgccgcgacgagcatcgtcctgccagcgggggcccggtatcccaacggcatcgcccatgccgccgatggaacgctgtacgtcggcctggtcaccagcgggcgcatcctgcgcaagcctcccgggggcgagtgggaaaccttcttcgccggcagcctggcgatcttcgctgccaccgcgctgcggctggacgagccgcgtggcctgctctggggcaattcgccggacttcctacccgctggccggcgccggccgcatggggtgttcgccctggatctcgcgaccggtgccgtgcgccgatatctgaccctgcccggcgacgggatgggtaacgatctcgcggtggcgccggacggaacggtctacctgagcgaaacccgggatggcagcctgatgcggctgcggcccggggaaccggcgttccaggtgttgctgcgcgacagccgcctggccggccccggcggcctgggcgcggcgggcatcgtccgggtggacgacgacaccctgctggtcggcaacttcggtagcggggcgatccatgtcgtcgaaggggtcgccacgcgtccgcggctgcgcgagatggagctgccccgaacgctggagaatccggacggcatggcgctggctccggacggctcgctgatcgtgctggagaacgccatccgcagcggcgccggcaaggtgctgcggatcgccgagccgctcgctccagggcggcgcggcatcgaagtgatacgcgagggcctggagtcgccggtcaacctgaccgtcaccggacagggttgcgcctatgtcagcgagtcccgcattcgccaccgcctgttgccggggcgcgagggcgaggtgccggcgcgtttcctgatccaccggctgcccctggacgcggccgggggcggttga

SEQ ID NO: 319089 - DNA, 972 bp, Pseudomonas aeruginosa
atgcagcatgtccgtcttggcaacagcggcctgaaagtctcccgactctgcctggggtgcatgacctatggcgatccggcgtggcgtccatgggtgctggacgaggaacgggcgcgtccgttcattcgcgaggcgctggaagccgggatcgacttcttcgacagtgccgatatctattccaccggcgagagtgagcggatcctcggacgcgcgctcagggacttcgcgcagcgcgaggacctggtaatcgccaccaaggcgttctttcccatgagcgacaggcccaacgcctgcggcttgtcgcgcaagcatctgcttgccagcgtggatgcctcgctgcggcggttgggtacggactacctggatctcttcgtgatccatcgcttcgatccggaaaccccgatcgaggaaacctgcgaaaccctcgacagcctggtgcgtgccggcaaggtccgttacctcggcgcctcgtcgatgccggcctggcgcttcatgaagatgctcgccttccagcgccaccacggcctggcgcaattcatctcgatgcagagccagtacaacctgatcgttcgcgaggacgaggaggacctcgttccgctgtgccgggaagaggggatcgcgttgacgccctggtcgccgctggcgcgtgggctgctggccggagcgcgaagcgccggcacgctgcggacccggacggacgaacaggccccgcgctggtacggcggcagggaggaagtcgagtcgacccttggcgcgttggagaaactcgccgctgcccgcgggcttccaccggcgcaactcgccctggcctggctgcttggccggaacggtgtcgccgcgccgatcgtcggcctgtccaggccgcatcacctcgaggatgccctcgcggcgctgacgctggacctcgccgaagaggagtgcgccacgctggaggcgccgctcacggtgcgcgcccggaccccgcgctggtag

SEQ ID NO: 319090 - DNA, 915 bp, Pseudomonas aeruginosa
atgaagaagcccgatctcgccggtctcgccgccttcgtcgccatcgctcgcgaacgcagtttccgccgcgccgccgccaccctcggcgtaaccccgccgacgctcagccacaccctgcgcgaactggaaacccagctcggcatccgcctgctcaaccgcaccactcgcaacgtctcgccgaccgaggccggcgagcacctgctggcacacctggacccggcgttcgaagacatcgccgccgcgctggacagccttaaccgctttcgcgaaacgcctcacggcctggtacgaatcaacgcaccgcgaaacgccatcggtctcgtcctcgcgccacgtttcggcgaactggcccgcgactatcccggcatcaccctggaagtggtggcggacgagggtttcgccaatatcgtcgaagccggtttcgacgccggcatccgcctcggcgaagacctccagcacggcatgcgcgccgtgcgggtcggcccggacctgcgcttggccatcgtcgcgaccccggcctacttccgacggcaaggcaggccgggtagcccggaggaattgctcggccaccgttgcatcggctggcgcaaggtgtcttccggagagctttacaaatggcaattcagcaagggcacgaaagcgctttcggtggccgtgagcggaccgctggtcctcgacgacccgcgcctgatgctacaggcggcgctggccgatgtcgggattgccttcgccatcgaggaggaagtcgccgagcacctcgccgccggccgcctggaacgggtcctggcggattggtgcgccccctttcccggtttccatctctattatccgaaccgccgcaaccacccggcggcgttgagcaccgtgatcgacctgctgcgctaccccggcgaggaacacccaggtcccgcgtag

SEQ ID NO: 319091 - DNA, 2145 bp, Pseudomonas aeruginosa
atgactgacgctatccgttacgaaaaaggccaggacaacgtcgtcgtcctgaccatggacatgcccgggcagagcgccaacaccatgaacggtgtctaccgcgaggcgatggcgaagaccatcgcgcggctggaggcggagaaagaggggatcgccggcgtggtgctgacctcggcgaagaagaccttcttcgccggcggcgatctcaacgagctgatcaaggtcaccaaggccgacgccccggccttctaccagggcatcctcgaactcaagggccaactgcggcgcctggagaccctcggcaagccggtggtcgccgcgatcaacggcgctgcgctgggcggcggctgggagatctgcctggcctgccaccaccgcatcgccctggacaatcccggcgtgcagctcggcctgccggaggtgactctcggcctgttgccgggcggcggcggggtggtacgtatggtgcgcctgcttggtctggagaaagccctgccgtacctcgccgaaggcaagaaggtgcgtccggcggaagcgctcaaggccgggctgatccacgaactggccgacagccccgaggaaatgctggagaaggcccgcgcctggatcctcgccaacccggcggcgaagcagccctgggacagcgccggctacaagattcccggcggtacgcctgccagtcccaacgtggcgcagatgctggccatcgcaccgtcggtgctgcgcgacaagaccaagggttgcttcccggcgcccgagaagatcatgtgcgcggcggtggagggcgcccaggtcgatttcgacaccgcgcaactgatcgaggcgcgctatttcaccgagctgaccaccggccaggtggcgaagaacatgatcggcaccttctggttccagctcaacgagatcaacgccggcaagtcgcggccgcaggggtatccggtgcgggcgacgaaaaaggtcggcgtgctcggcgccgggatgatgggcgcgggcatcgcctacgtatcggcggcggccggcatcgaggtggtgctcaaggacgtctcgctggaagcggcggagaagggcaaggcttattcggccaggctgctggacaagaaagttgcgcgcgggcacctgtccgccgagaagcgcgacgccttcctcgcgcggatcgtgccgagcgtcagcgaagccgacttcgaaggctgcgacctgatcatcgaggcggtcttcgaggaccgcgcgctgaaaggcaaggtcaccgccgaggccgagaaacatgccctggccgatgcggtggtggcgtccaatacctcgaccctgccgatcaccggtctggcccaggcggtggcgcggccggagaagttcatcggcctgcacttcttcagcccggtggacaagatgccgctggtggagatcatccgcggcgaaaagaccagcgacgaaaccctggcacgcggtttcgactacgtgctgcagatcaagaaaacgccgatcgtggtcaacgacagccgcggcttcttcacctcgcgggtattcggcaccttcaccaacgaaggcatcgccatgctcggcgaaggcgtgagcgccgcgatgatcgacaaccaggcgcgccaggccggtatgccggtggggccgctggcgatttccgacgaagtctcgctgagcctgatgacccacatccgcaaccagaccgcccgcgacctcgaggccgagggcaaggctctgccgacgcaccccgcgttcgccgtgatcgacctgatggtcaatgagtacaagcgcccgggcaaggcggccggcgccggcttctacgactacccggcgaacggcaggaaacatctctgggcggaactcaagagccgcttcgagaagcccgatgcgcaaatatccgccgaggacgtacgcgaccgcctgctgttcatccagtctatcgagaccgtgcgttgcgtggaggagggggtattgcactccaccgccgacgcgaacatcggctcgatcttcggtatcggtttcgccgcctggagcgggggcgccttgcagttcatcaaccagtacggcctgaaggacttcatcgcccgcgcccaatacctggtcgaacagtacggcgagcgcttcgagccgccggcgctgttgctggagaaggcggcgaagggcgagctgttctga

SEQ ID NO: 319092 - DNA, 1206 bp, Pseudomonas aeruginosa
atgaccgacgcattcatttacgacgccgtgcgtactccccgcggcaagggcaagaaggatggcgcgctgcacagcgtcaagccggtgaacctgatggccgggctgttgcgcgcggtccagcggcgcaacgacctggataccgcccaggtcgacgatatcgtgctcggctgcgtgacgccggtgggtgaccagggcgccgatatcgccaagaccgcggcgctggtggccgactgggacgaacaggttgccggcgtgcagatcaaccgtttctgcgcctccggcctggaggcggtgaacctgggggcgatgaaggtacgctccggcttcgaggacctggtcctggtcggtggcgtcgagtccatgtcacgcgtgccgatgggctccgacggcggcgcctgggcactggatccggaaaccaacctgcacaccagcttcgtcccgcaagggatcggcgccgacctgatcgccaccctggaaggcttcagtcgcgccgatgtcgatgccttcgccctgcgctcccagcagaaggccgccaaggcccgcgccgaagggctgttcggcaagtcgctggtgccggtcgccgaccagaacggcatcgtcctgctcgaccacgatgagttcattcgcgccgactccaccctggaagggctcgccgcgctcaagccgagtttcgagatgatggggcagatgggcttcgacgccaccgcgctgcgcaagtacagccaggtcgagcgcatcgagcacgtgcatacgccgggcaacagctcggggatcgtcgacggcgccagcgccatgctcatcggctccgaggccaagggccgcgaactgggcctgaaggcgcgggcgcggatcgtcgctaccgcggtgacctccaccgaccccaccatcatgcttaccggccccgcgccggcgacccgcaaggccctggccaaggccggcctgaaggtggaagacatcgacctgttcgaagtcaacgaggcgttcgcttcggtggtgatgaaattcatgaaggacatgggcgtggcggaaagcaaggtcaacgtcaacggcggcgccatcgccatgggccacccgctcggcgccaccggctgcatcatcctcggcacgctgctcgacgaactggagcggcgcaacctgcgctacggcctggccaccctctgcgtaggtggcggcatgggcatcgccaccatcatcgagcgcgtgtga

SEQ ID NO: 319093 - DNA, 888 bp, Pseudomonas aeruginosa
gtgctcgccgagttgttcgccgtgatggcgcccgtgctgttcggcgccggtgtcggttatgtctgggtccgtctcggacacgcctatccgaccgagttcgtttcgcgcatcgtgttcaacatcggttcgccatgcctgatcctcgccaccctggcgcatacccgggtggacctgcatagcttcggccggatggccctggccagcgcgctgatctgcgtctgcatggctgcgctgggctgggcggcggcgcgcctcgggcgccaggagtggcaggtgctggtgccggcctacagcttcccgaatgtcggcaatatgggcctgccggtgtgcttgtatgcgttcggcgaggcggggatgaccctggcggtggcgttctacctgatcatgtcgatcggcaacttcagcctcggcgtgttctggatgagcggcgagcgctcctggcgctcgctgctgggcaatccgatcctgctcagcgtgctactggccttgttgttgatggggctcgacctgcaactgccgcgctggatggcgaataccgtcgacctgatggccgggctgaccattccgctgatgctgatcaccctcggcgtgtccctggccagcatccgtccgcggcaactgggcaatggcttcttctatggcggcctgcgtcttctgctgggggcgctggtgggctggtcggtggcgctggcgttgcaattgccgccgctggcgcagggggtgctggtggtgcaatcgtcgatgccggtggcggtgttcaactatctctacgccttgcgcggcaatcgttcgccggatcaggtcgccagcctggtgctgtgttcgaccttgctttcgttcgccttcattccgctgctgctgacctggtggctgcctgcgctgcgctga

SEQ ID NO: 319094 - DNA, 822 bp, Pseudomonas aeruginosa
atgcctgtcactctcccgcgcctggcgttgctaggtgccctgctcttccctgtggctgccgcctgggccgccgagctccgcctggaactgccggggggcacgcagacctggagcagcgaagaactgctcaggcatccgcaggcccgcgacctggacatcccggccgacgtcgcctaccgccggaacatgcgctaccgcgccgtgccactggcggccttgttgaaaggcgtgcatcccgaagaccatttgcaggccgtggccagcgatggcttcgccgccgagttgccggccgccccgctgctcgccgaacagggctcgcaagcctggctggcgatagaggatccgcagcgcccctggccgccgttgggcgccggcaagccgtccgccgggccgttctatctggtctggagcaaacccgaggaaaaacgcatcggtccggagcaatggcccttccaggtcgtccgcatccgctatcagccccctctggccgaacgcttcccggccctgctgccggccgccgacgccagcgcggaagtgcgcgccggcttcgccgtgttccagaagaactgcctggcctgccaccgtctcaacggtgccggcgacgcccagttcggcccggacctgaacctgccgtacaaccccaccgagtacttccagccgcaattcctctcccgctacatccgcgacccgcaggcgctgcggcaatggccacaggcgaaaatgccggcgttcccggaacgggtgatcgacgaccaggagttgcgccagctgatcggctacctgcgccacatggccggccgcaaagcgggcgctgccggctga

SEQ ID NO: 319095 - DNA, 732 bp, Pseudomonas aeruginosa
atgacctactgtgtcgcgatgcacctggccgacggcttggtgttcgcctccgattcgcggaccaacgccgggatcgaccatatcgccaccttccgcaagctgttcaccttcggcacgcccggcgagcgcctgctggtggtgcagacggccggcaacctggcgacctcgcaatcggtgatcaacctgctgcagcagcgcatccgccgggacggcgccagcctgctcaacgtgccctcggtctacgacgccacggcgctgatcgccgagaccacccgcgaggtgatggcccgcgacggcggcaatctggccggcaataccgacctgagctgctccttcctggtcggcgggcagatcgccggcggaccgccggcgctgtacagcatctacccccagggcaacttcatccaggccacgccggacacgcctttcctgcaactgggcgaaagcaagtacggcaagccgatcctcgaccgcaacctgactttcgacacgccgctggagcaggccctgcgctgcgcgctggtgtcgttcgactcgacgatccgcagcaacctctcggtgggcatgccgctggacctgctggtctaccaccgcgacagcctgatcctgccggagggctaccgggtcaccgaggacgacgcctatttcagcgccatccgccgccagtggagcgccggcctgcacgacttgctggagcgcctgccgtcgccgccctcggcgtacaacatctga

SEQ ID NO: 319096 - DNA, 801 bp, Pseudomonas aeruginosa
atgagactctcgatcacccacgacaccacctatcgctacgaagaccgggtgcgcgccagcatccagtacctgcgcctgaccccgcaggacagcgagcgccagcacgtggtcgattggcgcctggacctgccgcgcccggcgcggccgctgcgcgatccgtacggcaacatcctgcacgtcctgaccctggacgaaccgcatgagtcggtcctgatcgccgcccacggcctggtcgagatcgatgaggagcgcgaggtcgagcacgatcgccagtcgccgttgccgttcctgcgcagcacccgcctgaccggcgccgatgccgagatacgcgccttcgccgaacgcgccatgggcggccgcaaggaccgcggcggcctgctcgacctgatgcatgcgctgcacgagcatatcctctaccagccgggggcgacccgcgtcgacagcaccgccatcgaggccttcggcgcacgcgccggggtctgccaggaccatgcccatgccttcctcgcctgcatccgcagccagggtgtgccggggcgctatgtctccggctacctctacaccgaggacgacacgcacctggccagccatgcctgggccgaggcctggctcggcgacggctggtacagcttcgacgtgaccaaccggctcggccgtccggagcgccatctcaagctggccgtcggcctcgactacctggatgcctgcccggtgcgcggcttgcgccgtggcggcggttgcgagcagatgcatgcgcgggtgctggtcagcgcgccgctgctgcaggtgcagcaacagtga

SEQ ID NO: 319097 - DNA, 954 bp, Pseudomonas aeruginosa
atgctcagccggaccgcttccgacctgtactggatgtcgcgctacctggaacgcgcggagaacctcgcccgcatgctcgacgtcagctactcgctgtcgctgttgccgcaggaccgcaacggcggcggcctggacgaactggccatgccgctgctgatcaccggcaccctcgacgcctacctggagcgccacggcgaactggccgccgagcgcctgctgagtttctttgccctcgacccggacaacccggcgagcatctacagctgcctggctgcagcgcgcgccagtgcccatgcggtacgcgggcggatcaccctggacatgtgggagaacatcaacgccacctggctggaaatgcgcggcatcgccgccgagggcatcctgcgctatggcatcagtcgtttctgcgaatgggtgaaggaccgctcgcacctgttccgcggcgcgaccttcgccaccagcatgcgcaacgatgcgttccgcttcatccgtctcggaaccttcatcgaacgcgccgacaataccttgcgcctgctcgatgcgcgctaccagacccagggcgaagcggcgctcgccggggcggacgagggcaccgcgcgcggctactaccagtggagcgcgctgctgcgggcgctatccgccttcgagggctacatcgagctgtaccgcgcctcgcccaacgcgcgcaacatcgccgaattgctgctgttgcgcgaggacgtgccgcgttcgctgctgtcctgcatcgaggaactgagcgagatcctttccggcctgcccggtgtcaacggccggccggcgcagcgcctggccgccgagctggaggcgcgggtgcgctacaccggcatcgacgaggtgctggagcagggcctgcatacctggatcaccgactacatcctgctggttcgccagttggccaacgccattcacagctcctacctggaggccgcatga

SEQ ID NO: 319098 - DNA, 1413 bp, Pseudomonas aeruginosa
atggcacgcatgttttacgacgagatgcacgatgctggcggcgaatgccgctcgcattatcgggaattcgctcgctggctggccgacacccctgaagagcaattgctgcaacgccggcgcgaagccgacctgctgttccaccgcgccggcatcaccttcaccctgtacggcgacgagcagggcaccgagcgcctgatccccttcgacaccatcccgcgcagcattcccgcggcggagtgggcgcacatcgaggccggctgcatccagcgcgtccaggcgctgaacctgttcctcgccgatctctaccacgaacagcgcatcctcaaggccggggtgattcctgccgagcaggtcctggccaacgaccagtaccaactggcgatgcagggactggacctgccgggcaacgtctacgcgcacattgccggggtcgacctggtccgcgacggcagcggcaactactacgtgctggaggacaacctgcgcacgcccagcggtgtttcctacatgctggaaaaccgcaagatgatgatgcgcctgttccccgagctgttcgtccgccagcgcgtggcgccgatcgaccactacccggacctgctgctcgacaccctcaagcgggccagtgacgtcgaatcgccgagcgtggtggtattgacgccgggacgtttcaacagcgcctacttcgaacacgccttcctcgcccgcgagatgggcgtggaactggtcgaaggcgccgatctgttcgtccgcgacgagcgggtctacatgcgcacgacggccggaccgcaaccggtggacgtgatctaccgaaggatcgacgacgccttcctcgacccgctggcgttcaacccggattcgctgctcggcgtgcccggcctgctggccgcctaccgggccggcaacctggtgctggccaacgcgatcggtaccggggtggccgacgacaagtcgatctacccctacgtgccggacatgatccgcttctacctcggcgaagacccgctgctgcacaacgtgccgacctggcaatgtcgcaagccgaaggaactggcgcacgtcctggcgcacctgccggagctggtggtgaaggagacccaggggtccggcggctacggcatgctggtcggaccggcggccagccgggaggaaatcgagctgttccgcgagcgcctgaaggctcgcccggaggcctatatcgcgcaaccgacgctgtccctgtcgacctgtccgaccttcgtcgagagcggcgtcgcgccgcgccatatcgacctgcggccgttcgtcctgtctgcgccggatcgggttcgcctggtgcctggcgggctgacccgggtggcgttgcgcgaaggctcgctggtggtcaattcgtcccagggcggcggcaccaaggacacctgggtggtggaggaataa

SEQ ID NO: 319099 - DNA, 699 bp, Pseudomonas aeruginosa
atgagcgatattctgatcctgacccatgccgagttctgtccgccaggccatctgggtgccgtgctggcggcgcgcggcctggacttccgcgtgatccgcgccgacctcggcgaactcgccggtctcgacgtcgaacgcccgcgagcggtggcgatcatgggtgggccgatgagcgtcaacgacgacctgccctggttgcgcgacgaactggcgctgctgcgtcgcttcatcgagcggcgcatcccgctgatcggccattgcctcggcggccagttgctggcccgcgccctgggcgcgacggtgcggcaccagccctacaccgaaatgggctggcagcccatgcagcgggaaagccgcgacagtccatggctggccgggctgccggagcgcttctcgatcttccagtggcacggcgatgccttcgacctgccgcagggcgccgagcgcctgctgtccagcccgtggtgcgagaaccaggggttttcctggggcgatcacgtactcggcctgcaaggccatccggaaatgaccgaggaactggtgcggcgctggatcgccggctggccgcacctgctcgatccctcccagcccagccagcaatccgccgaggacatgctggccgggttgcctgccaaggttgccgggctgaatcgggtggccgagggtttctaccgtcattggctgtcgctgatcgattga

SEQ ID NO: 319100 - DNA, 342 bp, Pseudomonas aeruginosa
atggaaaagcccttctcggatgatgtcagcgtgaatgtcctgcgtcgcatgaaagaaggcggcttcgacttcgcgcgcatccatcccatcgacttcttcgccatctttcccagtgagcgggaggcccgccaggcagcgggccagtttcgcggcgagtcgctcagggcccaggtcgtcgctcgcgacgatggctcctggaacctgcaggtcagcaaggtgatgtacgccacccatgccgccatcggtgccttcgaacacgacctggaggaagtcgtggtgccgctgggcggcgtgctggacgggtggggcgtgacccaggaggtcacttcgctgcgtccgtga

SEQ ID NO: 319101 - DNA, 2058 bp, Pseudomonas aeruginosa
atgcttatcagcagctacaaccaggttcttgtcgccttttccctgattgtggccatcctggcgtcctacaccgctctcgacatggccggccgggtgaccctggcgaaaggccgcgaggcgctctcctggctgatcggcggcgctttcgccatgggcttcggcatctggtcgatgcatttcgtcggcatgctcgccttcagcctgccgatcccgctcggctacgacctgggcctgaccctgctgtcgctgctactggccgtcggcagttcggccttcgccctctggctggtgtgccaggcggaactcccctggcaacgcctggcgctgggcgccctgctgatgggcagcggcatcgccgccatgcactacaccgggatggccgccctgctgatgatgccggggatcgtctacgacccgctgtggctcggcctctccatcctgatcgcggtgatcgcctccggcgccgcgctgtggatcgccttccgcctgcgccatggcagccggcgcatcgtcctggtccgggccggcgccgccctggtgatgggctgcgccatcgtcggcatgcactacaccgggatggccgccgcgcagttccccctgggcagcttctgcggcgccgccggccgaggcatcgacaacggctggctggcggtgctggtcatcgtgatcaccctggcggtgatcgccatcgccctgatcgtctcggtgctggactcgcgcctggaggcacgtacctcggtgctcgccacctccctcgcacgagccaaccgcgagctgatccagttggccctgcacgacaacctgaccaagctgcccaaccgcatgctcctcgacgaccgcctggagcaggcgatccagcaggcgatccgcgacgatcgccggttcgccgtgctgttcatggacctggacggcttcaaggcggtcaacgatgcctacggccatcacctcggcgacctgttgctgatcgaagtcgccgagcgtatccgcgccaacgtccgcgcccaggacaccatcgcccgcctcggcggcgacgagttcgtcctgctgatcgaggcccgcgagcccgccgacgccgcgaccctggccgagaagctggtgaagcggatcagccagccgtaccagatatcccgccacgaggtgcggatctcggcgagcatcggcatcgcgctctaccccggcgacgggcagacccgccacgaactgatgatcaatgccgacgcggcgatgtatcacgccaaggatcagggacggaacggctactgcttcttcgagagttcgatgaacgccaacgcccaggaacagttgcaactgctccatgacctgcgccaggccctggagcgccggcagttggtcttgcactaccaacccaaggtactggcgccgaacggaccgatggtcggcgtggaagcgctgctgcgctgggagcatccgcaacacggactgatcccccccgaccagttcctgccgctggcggaaaaaaccggcctgatcgtgcagatcggcgagtgggtgctcgacgaagcctgccggcagatgcgcctctggctggacggcgggcatgcggagtggaacatcgcggtgaacctttcggccttgcagttcgcccatgccggcctggtcgactcggtgcgcaacgcactcctgcgccacagcctggagcccagccacctgatcctcgaggtgaccgaatcgaccgccatgcgcgatgccgatgccagcctggtgatcctcgagcagttgtcggcgatgggcgtcggcatctccatcgacgacttcggcaccggctactccagcctgctctatctcaagcgcctgccggcgagcgaactgaagatcgaccgtggcttcatcaacgagctggcccacgacagcgacgacgccgcgatcgtctcggcgatcgtcgccctcggccgcacgctgaacctgaagatcgtcgccgagggcgtggaaaccgaggcccagcaggagttcctgacccgcctcggctgcaattcgctgcaaggcttcctgctcggcaggccgatgccggccgagcagttgctcgccagcgtcgcctga

SEQ ID NO: 319102 - DNA, 2295 bp, Pseudomonas aeruginosa
atgaacaggctgtgtgtactggggcttctcatcgggctgagcgggagcccggcactggcggctggccagggcgaatccggcaatccaccggctaccgacaaggagcgtttcatcgccagcctgatggctcgcatgagcaacgcggaaaagatcggccagctacgcctggtcagcgtcggcgccgaccatcccaaggaggcgctgatggcggacatccgcgccggcaaggtcggcgccatcttcaataccgtgacccgcccggacattcgcgccatgcaggatcaggtccgccatagccgcctgaagatcccgctgttccatgcctacgatgtggcccacggccaccgcaccatcttccccatcagcctcggcctcgccgccagctgggaccccgaggtggtcgcccgcagcgcgcggatctccgccctcgaagccagcgccgacgggctcgacatgagcttctcgccgatggtcgacatcacccgcgacgcgcgctgggggcgggtctcggaaggcttcggcgaagatacctacctgacctcgctgctgtccggcgtgatggtccgtgcctaccagggctccaacctggccgccccggacagcatcatggcggcggtcaagcacttcgccctgtacggcgcggccgaaggcggccgcgactacaacaccgtggacatgagcctgccgcgcatgttccaggactacctgccgccctacaaggccgcggtggacgccggcgccggcgcggtgatggtctcgctgaacaccatcaacggcgtgcccgccaccgccaaccgctggctgctgaccgacctgctgcgccagcagtggggcttcaaggggctgaccatcagcgaccatggcgcggtgaaggaactgatcaagcacggcctcgccggcaacgagcgggacgccacgcgcctggcgatccaggccggtgtcgacatgaacatgaacgacgatctctactcgacctggctgccgaagctactggcggccggcgagatcgaccaggccgacatcgatcgcgcctgccgcgacgtgctggcggcgaagtacgacctcggcctgttcgccgatccctaccggcgcctgggcaagccggacgacccgccgttcgacaccaacgccgagagccgcctgcaccgccaggccgcccgcgaggtggctcgcgaaggactggtcctgctgaagaaccgcgacggcctgctgccgctgaagaagcaggggcggatcgcggtgatcggcccgctggccaagagccagcgcgacgtcatcggcagttggtcggcagccggcgtgccacgccaggcggtaaccgtctaccagggcctggccaatgccgtcggcgagcgtgccaccctgctctacgccaagggtgccaacgtcagtggcgaccaggcgatcctcgactacctgaacagctacaacccggaagtcgaggtcgatccgcgctccgccgaggcgatgctcgaggaggccttgcgcaccgcgcgcgacgccgacctggtggtcgccgtggtcggcgaatcgcagggcatggcccacgaggcctccagtcgcaccgacctgcgcatcccggccagccagcggcggctgctgaaggcactgaaggccaccggcaagccgctggtgctggtgctgatgaacggccgaccgctgtcgctgggctgggagcaggaaaacgccgacgcgatcctggaaacctggttcagtggcaccgaaggcggcaacgccatcgccgacgtgctgttcggcgagcacaaccccagcggcaagctgaccatgtccttcccgcgctcggtgggccaggtaccggtctactacaaccacctgaacaccggccggccgatggaccacgacaaccccggcaaatacacctcgcgctatttcgacgaagccaacggcccgctctacccgttcggctacggcctcagctacaccgagttcagtctctcgcccctgcgcctgtccagcgaacggctggcccgcggcgacaccctggaagcgcgggtcacgctcagcaacagcggcaagcgcgccggcgccacggtggtccagctttacctgcaggacccggtcgccagcctcagccgtccagtgaaggaactgcgcgggttccgcaaggtaatgctggagcccggcgaatcgcgggagatcgtcttccgcctcggcgaggcggacctgaagttctacgacagccagctcaggcacacggccgagccaggcgagttcaaggtcttcgtcggcctggactcggcgcaaaccgaaagccgcagcttcaccctgctctga

SEQ ID NO: 319103 - DNA, 645 bp, Pseudomonas aeruginosa
atgcttccatttgttgaactagacgccagtcgcgtacggctggcccccgggcaggccctgttgcgcgcccgcgactaccaggactacctcagcgccaaccgcctggtggaagcggcacgcgagcgtgccgccgaaatcgagcgcgaggcccacgaggtttaccaggagcagaagcgcctgggctgggaggccggactggaggaggcgcgtctgcgccaggccgggctgatccaggaaacgctactgcgctgcaatcgctactaccggcaggtcgatcgccagcttggcgaagtggtgctgcaggcggtgcgcaaggtgttgcgccactacgacgctgtcgagctgaccctggcggccacgcgcgaggcactggcattggtgagcaaccagaagcaggtgatcctgcacgtccagccggaacagctggtcgcggtgcgcgagcaggtcgcccgggtgctcaaggatttccccgaggtgggctacctggaagtggtcggcgatgcccggctggaccagggcggttgcatcctggaaaccgagatcgggatcatcgacgcatcgctcgacagccagttggcggcgttgcaggccgcattgacggagggcgtggcgcggagcggcgaggaggaaggggacgccggttga

SEQ ID NO: 319104 - DNA, 621 bp, Pseudomonas aeruginosa
atgccattgacggcctaccagttgcgcttctgcccggcccgctacatccacgagtcgcacttgcccgcggtattgctgcggttgctgccggcgctgccggactggcggcgacagagcgttctcaacgcctggctgctggagcagctggaactggactgcgcgttccgcatgcccgcgcaactgggcgggctggccctttacccgcaggcggcgctggaacggaccctgggctggctcggcgcgctactgcacggccaggccttgcggcaggtgctggacggtgcgcgggtacggcgcatccgcgcgcagatcggcgaacagggccagcgcttctgcctggagcagctcgacctgctcatcggtcgctggccgcccggctggcagcgggccttgccggaaaacccggaagacggctatttccggcgctgcggcctggctttctggctggccgcctgtagcgatgccgactgcggtttctcgcggcgcctgcgcctgcgcctggaggccatgccggccccggcggactggaccttcgacgaacaacggcgatccctggcgcggaccctgtgcctgaaggtcgcccgacaagcgagcgatgaatgcttccatttgttgaactag

SEQ ID NO: 319105 - DNA, 735 bp, Pseudomonas aeruginosa
gtgaaaggtctgtcgcgcatggcgctcctggcgctggtcctggcgttgggcgggtgcaaggtcgaactctataccgggatcagccagaaggaaggtaacgagatgctggcgctgttgcgttcggagggcgtttccgcggacaagcaggcggacaaggatggcaccgtgcgcctgctggtggaggaatcggatatcgccgaggcggtggaggtgctcaagcgcaagggctatccgcgggagaacttctccacgctgaaggatgtgtttcccaaggacgggctgatttcctcgcccatcgaagagcgcgcgcggctcaactacgccaaggcccaggagatttcccataccctttccgagatcgatggcgtgctggtggcgcgggtccatgtggtgctgccagaggagcgcgacggactgggcaggaagtcctcgccggcatcggcctcggtgttcatcaagcacgccgccgacgtgcaactggatgcctacgtgccgcagatcaagcaactggtgaacaacggcatcgaaggactcagctacgaccgcatcagcgtggtgctggtgccgtcggccggggtccgccaggtcccgctggcgccacgcttcgagagtgtcttctcgatccaggtggcggagcactcgcgcggacgcctgctcggtctgttcggcctgctgctggcgttgctgctggcgagcaacctggcgcagttcttctggcaccggcaacggggctga

SEQ ID NO: 319106 - DNA, 339 bp, Pseudomonas aeruginosa
atggatatctctcggatgggcgcccaggcgcagatcaccagtctcgaagaactctccggcggcccggccggcgcggcccacgtcgccgagttcgaacgggcgatgggcggtgccggcagcctgggcggcgacctgctcagcgaactggggcagatcagggagcgtttcagccaggccaagcaggagttgcaggtggagctgtcgacgcccggcgacgatcccaacagcctgatgcagatgcagtggtcgctgatgcgcatcaccatgcaggaagagctgatcgccaagaccgtcgggcgcatgagccagaacgtcgaaaccctgatgaagacccaatga

SEQ ID NO: 319107 - DNA, 432 bp, Pseudomonas aeruginosa
atgagccgcatcgacacgccgccgggattcgccgtctatccgtcggccagtccaaaggcggcgaacctgccggctgtcgatcaggtgctggctttcgagcaggccctcggcggcgagccgccggcggccggacgccgcctggccgggttggagaacggcgctctcggcgagcgcctgctgcagcgctttgcccagccgctgcaagggttggaggcggaccgcctggagctgaaggcgatgctccgtgcggaactgccgctggggcgccagcagcaaacctttctcctccagttgctcggtgcagtcgagcatgcgccgggcggcgaatacctggcgcaactggcgcgtcgcgaattgcaggtgctgatcccgctcaacggcatgctcgacaacctcgtgcgcaacagccacaaactcgacctggagtcatga

SEQ ID NO: 319108 - DNA, 348 bp, Pseudomonas aeruginosa
atggacacttcactgatacgcgaattggcggaactggcgctggccggcagcgggcagcactgccacgaagaggcgctgtgcatcgccgagtggctggagcgcctcggacaggacgaagcggcgcggctgatccggatttccagcctggccaaccaggggcgctatcaggaagccctggccttcgcccatggcaatccctggccggcgctggagccctggttcgccttgtgcgagtggcacctggggctgggcgccgcgctggaccgcaggctggccgggctgggcggcagcagcgatcctgccctggccgacttcgccgccggcatgcgcgcccaggtgcggacatga

SEQ ID NO: 319109 - DNA, 258 bp, Pseudomonas aeruginosa
atggcgcagatattcaaccccaacccggggaataccctcgataccgtggccaatgccctgaaggagcaggccaacgcagcgaacaaggacgtcaacgacgcgatcaaggccttgcaggggaccgacaatgccgacaacccggcgctgctggccgagctgcaacacaagatcaacaagtggtcggtcatctacaacatcaactcgacggtgacccgtgcgctgcgcgacctgatgcaaggcatcctgcagaagatctga

SEQ ID NO: 319110 - DNA, 204 bp, Pseudomonas aeruginosa
atgatgacagccttggaaacgcgactgtcggtcgctgacggcacgcatgccgcagcgctccggcagcgtctgcaggcggcgctggcggagtgtcgccgggaactggccagaggcgccggcccggagcgtttccagttcctgcaacagcaggcccgggccctcgaaggcggtctcggcattctttcgcagctcacagaggactaa

SEQ ID NO: 319111 - DNA, 1299 bp, Pseudomonas aeruginosa
atggcctggaagatccgcttctacagcgggctgaaccagggcgccgaagtctcgctcggagagggccgggtggcgcttggcagcgatccgttgcaggccgacctggtgttgctcgacgagggcatcgcggcagtccacctggtgctcgaggtcgatgcccagggcgtgcgcctgctggagtgggcggagggctgcgagcctcgccaggacggccaggcgcaagtcgccggagcgatcctgcaggcgcttgccgggcagacctgcggcccgctgcgctgggcattctgcgacccgcagcggagttttcccgagcgtttccccgaagccgaggtgcagaccgcgccagtgcgccgcaagtcgtccgcccgtgccggcggggcctggctgctcggcgtcagcctggcgctggcgctgtgtctgctgggcatgctcgtcgaaccctggtcggcccgccagcacggcatggccggcgaggagcccctggcgaaggtgcgcgcctacctgcgcgagcagggcatgagcgaggtggatgtgcagcgccagggcgacagtctcctgctcggcggctacctggaggacaacgcccggcgcctggcgctacagcgctacctcgatggcagcggcgtggactaccgactggaagcacggagcatggaagacattcgccagggcgtggatttcatcctgcagaaattcggctatcggcagatcctcagcagcaacgcggacaagcctggctgggtccggctcaacggcgaactggcggaacaggacgaacgctgggcgcggatcgacgcattgctggagtccgaggtgccgggcctgctcggggtggaaaaccaggtccgggtggccggctcgcacctgcgccgcctcgagcgcctgctggcggacgccggcctcgaccggcaactgagtttccgcgagcgcggcgaacgcatcgagttgagcggcacgctcgacgaggtccagctcagcgccttctaccgcctgcagcgcgagttccagcaggaattcggcaaccgcccgagcctggagctgctcagtcgcggcaagcgcgccagcggcgacgaactggagttcacgattcgctcggtgtcgctggggcgggtgccctatgtagtgctcggcgacggccagaaatacccggtgggcgcctcgacatcccgcggtgtgcgaatcctcgccatcgagccggagtcgatcctggtggcccgcggcaagcagcgtttcatcatcaatctcaaaggggaggtgctccatgatgacagccttggaaacgcgactgtcggtcgctga

SEQ ID NO: 319112 - DNA, 1803 bp, Pseudomonas aeruginosa
atgcgccgcctgctgatcggcggactgctggcgctgctgcctggcgcggtcttgcgcgcgcagccgctggactggcccagcctgccttacgactatgtggcgcagggcgaaagcctgcgcgacgtgctggccaacttcggcgccaactacgatgcctcggtgatcgtcagcgacaaggtcaacgaccaggtcagcggtcgcttcgacctggaaagcccgcaggccttcctgcagttgatggcctccctctacaacctcggctggtactacgacggcaccgtgctgtacgtattcaagaccaccgagatgcaatcgcggctggtgaggctggagcaggtcggcgaggccgagctgaagcgcgcgctgaccgccgccggtatctgggaggcgcgcttcggctggcgtgccgacccttccgggcggctggtgcacgtgtccggtccggggcgctatctcgaactggtcgagcagaccgcccaggtgctggagcagcaatacaccctgcgcagcgaaaagaccggcgacctcagcgtggagatcttcccgctgcgctatgcggtcgccgaggaccgcaagatcgagtaccgcgacgacgagatcgaggcgccgggcatcgccagcatcctctcgcgggtgctcagcgatgccaaggtggttgcggtgggcgacgagccgggcaagctgcgcccgggaccgcaatcgagccatgcggtggtccaggcggaaccgtcgctgaacgcggtggtggtgcgcgaccacaaggaccggttgcccatgtatcgccgcctgatcgaagccctcgaccggccctcggcgcggatcgaggtcggcttgtcgatcatcgacatcaatgccgagaacctcgcccagctgggcgtcgactggagcgccgggattcgcctgggcaacaacaagtcgatccagatccgcaccaccggccaggatagcgaggagggcggcggcgccggtaacggggcggtcggcagcctggtggacagtcgcgggctggatttcctgctggccaaggtcaccctgttgcagagccagggacaggcgcagatcggatcccggccgaccctgctgacccaggagaatacccaggcggtgctcgaccagagcgaaacctactatgtgcgggtcacgggcgagcgggtggccgagctgaaggcgatcacctacggcaccatgctgaaaatgacgccgcgagtggtgactctcggcgatacgccggagatcagcctcagcctgcacatcgaggacggcagccagaaacccaatagcgccggcctggacaagatccccacgatcaaccgcacggtgatcgataccatcgcccgcgtgggccatggccagagcctgctgatcggcggcatctaccgcgacgaactgagccagagccagcgcaaggtaccctggctcggcgacattccctatctcggcgcgctgttccgcactaccgcggacaccgtgcgccgctcggtgcggctgttcctcatcgagccgcggctgatcgacgatggcgtcggccattacctggcgctgaacaaccgtcgcgacctgcgcggcggcctgcttgaaatcgacgagttgtcgaaccagagcctgtcgttgcgcaagctgctcggtagcgcccgctgccaggcgctggcgccggccagggccgaacaggagcgcttgcgccaggccggccagggttcgttcctcacgccctgccggatgggtgcgcaggagggctggcgggtgaccgacggcgcctgtcccaaggacggcgcctggtgcgtcggcgcggagcgcgggaattag

SEQ ID NO: 319113 - DNA, 423 bp, Pseudomonas aeruginosa
atggatcatctgttgagcggattggccactcgcctgggccaagggccctttgttgccgatcggacgggttcgtaccacctgcgcatcgacggacagagcgtcctgttgctgcgccagggcgacgacctgctgctggaaagcccgctggagcacgcccccctggacccgcagcgcgaccagcaggggttgctgcgggcgctgttgtcgcgggtcgccagttggagccggcgctatccccaggccatcgtcctggatgcggacgggcgcctgctgttgcaggcgcggctgggcctcgacggcctcgatcccgagcgactcgaacgggccctggccgcccaggtggggctgctcgaggcgctggcgccggagctggagccgctgccccgcgggttgccgccgcaggctccggtgtggcgtccctga

SEQ ID NO: 319114 - DNA, 831 bp, Pseudomonas aeruginosa
atggagcaggaagacgataagcagtactcccgagaagcggtgttcgctggcaggcgggtatccgtggtgggctcggacgcccgctcgcggggtcgggtgccgggttacgcatcgagcagtttgtatcgtgagtccggaatcatcagtgcgcggcaactggcgttgctgcagcggatgctgccgcgcctgcggctggagcaactgttccgctgcgagtggttgcagcagcgcctggcgcgcggcctggcgctggggcgcgaagaggtgcggcagattctcctctgcgcggcgcaggacgacgacggctggtgctccgaactgggcgaccgggtcaacctcgccgtgccgcagtcgatgatcgactgggtcctgctgccggtctatggctggtgggaaagcctgctcgaccaggcgatccccggctggcgcctgtcgctggtggagctggagacccagtcccggcaactgcgagtcaagtccgaattctggtcccgcgtggccgagctggagccggagcaggcccgcgaggaactggccagggtcgccaagtgccaggcgcgcacccaggaacaggtggccgaactggccggcaagctggagacggcttcggcactggcgaagagcgcctggccgaactggcagcggggcatggcgacgctgctcgccagcggcgggctggccggcttcgagccgatccccgaggtcctcgaatgcctctggcaacctctctgccggctggacgacgacgtcggcgcggcggacgccgtccaggcctggctgcacgaacgcaacctgtgccaggcacaggatcacttctactggcagagctga

SEQ ID NO: 319115 - DNA, 897 bp, Pseudomonas aeruginosa
atgcctctccgctcggcggggcattcaaggtacgacgggaagtgttggggttcttataatatgcaaggagccaaatctcttggccgaaagcagataacgtcttgtcattggaacattccaactttcgaatacagggtaaacaaggaagagggcgtatatgttctgctcgagggcgaactgaccgtccaggacatcgattccactttttgcctggcgcctggcgagttgcttttcgtccgccgcggaagctatgtcgtaagtaccaagggaaaggacagccgaatactctggattccattatctgcccagtttctacaaggcttcgtccagcgcttcggcgcgctgttgagtgaagtcgagcgttgcgacgagcccgtgccgggcatcatcgcgttcgctgccacgcctctgctggccggttgcgtcaaggggttgaaggaattgcttgtgcatgagcatccgccgatgctcgcctgcctgaagatcgaggagttgctgatgctcttcgcgttcagtccgcaggggccgctgctgatgtcggtcctgcggcaactgagcaaccggcatgtcgagcgtctgcagctattcatggagaagcactacctcaacgagtggaagctgtccgacttctcccgcgagttcggcatggggctgaccaccttcaaggagctgttcggcagtgtctatggggtttcgccgcgcgcctggatcagcgagcggagaatcctctatgcccatcagttgctgctcaacagcgacatgagcatcgtcgacatcgccatggaggcgggcttttccagtcagtcctatttcacccagagctatcgccgccgtttcggctgcacgccgagccgctcgcggcaggggaaggacgaatgccgggctaaaaataactga

SEQ ID NO: 319116 - DNA, 414 bp, Pseudomonas aeruginosa
atgctgttgccgctggcgttgctgctcggcggttgcgtcagccagcccgcgccgatgtcgccgaaggtgacggtgggtggttcggtgggcggcgtttccctgcaggcgcgccaggcgcaactcaggctgcgcctgtatgccgtcgttcagggaaggatgcaaacgattgccgagcggcgctaccgggtgtccgggttgccgttgcgctatgcgttcgatctggaggtcgacaggttggagggcgaggcattgtacctgcgtaccgagctttcctgggtgggcgtcgcggcggtccaggcgagtgcctggcaacaggtggcggcgggcgtcgatgagcgggtccggctggttcggcgcgactgttttccgaattgtacggccgctcgcccggaagaaagatctggcaacgattga

SEQ ID NO: 319117 - DNA, 246 bp, Pseudomonas aeruginosa
atgaaaatcgaatcgatttcgccggtgcagccgtcccaagacgctggagccgaggcggtggggcatttcgaggggcgttcggtgacccgcgcggccgttcgcggcgaggaccgttccagcgtggccgggctggcgcgctggctggcgcgcaacctggctggcgatccgcgcagcgagcaggccttgcagcgcctcgccgacggcgacggcacgccgctggaggcgcgcacggtccggcgcaggtga

SEQ ID NO: 319118 - DNA, 438 bp, Pseudomonas aeruginosa
atggatttaacgagcaaggtcaaccgactgcttgccgagttcgcaggccgtatcggtttgccttccctgtccctcgacgaggagggcatggcgagcctcctgttcgacgaacaggtgggcgtcaccctgttgctgctcgccgagcgcgagcgtctgttgctggaggccgatgtggcgggcatcgatgtgctgggcgaggggatctttcgccagctcgccagcttcaaccgccattggcaccgtttcgatctgcatttcggcttcgacgagctgaccggcaaggtccagttgtatgcgcagattctcgcagcgcaactgaccctcgaatgcttcgaggcgaccctggccaacctgctcgaccacgccgagttctggcaacgcctgctgccgtgcgacagtgatcgcgaggcggtcgctgcggtcggcatgagggtttga

SEQ ID NO: 319119 - DNA, 888 bp, Pseudomonas aeruginosa
atgatcgacacgcaatattccctggcggctacccaggccgcgatcccctccgagccgatcgctcccggcgccgccgggcgttccgtcggcacgccgcaagcggctgcggacctgccgcaggtgccggccgcgcgggccgaccgggtcgaactgaacgctccgcgccaggtgctcgacccggtgcgcatggaagcggccggcagcgagctggacagcagcgtcgagcttctgctgattctcttccgcatcgcgcagaaagcgcgcgagctgggcgtgctccagcgcgacaacgagaaccagtcgatcatccacgcgcagaaggcgcaggtggacgagatgcgcagcggcgccacgctgatgatcgccatggcggtgatcgctggcgtcggcgcattggcctcggcggtggtcggcagcctcggcgcgttgaagaacggcaaggccatcagtcaggagaagaccctgcagaagaacatcgatgggcgcaacgaactgatcgacgcgaagatgcaggcgcttggcaagacctccgacgaggatcgcaagatcgtcggcaaggtctgggcggcggaccaggtgcaggacagtgtggcgttgcgtgcggcgggccgtgccttcgagagccgcaacggcgccctgcaggtggccaacacggtgatccagtccttcgtccagatggccaacgcctcggtccaggtgcgccagggcgaatcgcaggcgagcgcccgggaaggagaggtcaacgccaccatcgggcagagccagaagcagaaggtcgaggaccagatgagcttcgatgccggcttcatgaaggacgtcctgcagctcatccagcagtacacccagagccataaccaggcctggcgtgcggcggccggagtggtctga

SEQ ID NO: 319120 - DNA, 1173 bp, Pseudomonas aeruginosa
atgaatccgataacgcttgaacgcgccggactgccctacggggtggccgacgccggggatatcccggcgctcggcaggccggtcgcgagggatgtcgagagtctgcgggtggagcgcctggcggcgccggccgcggcttccgcgagcggcacgggggtggcgctgacgccgccgtccgcagccagccagcagcgcctggaggtcgccaatcgtgcggagatcgccagcctggtgcaagcagtgggcgaggatgtcggactggcgcggcaggttgtgctggccggcgcttcgacgctgttgtccgccggcctgatgtcgccgcaggcgttcgagatcgagctggcgaaaatcaccggcgaagtcgagaaccagcagaagaaactcaagctgaccgaaatcgagcaggcgcgaaagcagaacctgcagaagatggaggacaaccagcagaagatcagggaatcggaagaagccgcgaaagaagcccagaagtccggtctggcagccaaaatctttggttggatcagtgcaatagcttcgatcatcgtcggcgcaatcatggtggcaaccggcgtcggcgcggccgcgggtgcactgatgatcgcgggcggtgtcatgggagtggtctcccagtcggtacagcaggcagccgcggacggattgatcagcaaggaagtgatggaaaagctcggcccggcactgatgggtatcgagatcgccgtcgcgctgctggcggcggtggtcagcttcggcggctcagcggtcggcgggctggccagactgggagcgaagatcggcggcaaggcggccgagatgaccgccagcctggcgagcaaggtcgccgacctgggcggcaagttcggcagtttggccggccaatcgctgtcgcactcgctgaaactcggcgtgcaggtttccgacctgaccctggacgtcgccaacggcgcggcccaggccactcattcgggattccaggcgaaggccgcgaaccgccaggccgacgtgcaggaatcgcgtgccgacctgaccaccctgcagggcgtgatcgagcgcctgaaggaagagctgagccgcatgctggaagcattccaggaaatcatggagcggatcttcgccatgctccaggccaagggtgaaaccctgcacaacctgtccagccgaccggcagcgatctga

SEQ ID NO: 319121 - DNA, 507 bp, Pseudomonas aeruginosa
atgaaccagcaagcgaccccttccgacaccgaccagcaacaggcgctggaggccttcctgcgcgacggcggcaccctggcgatgcttcgcggactcagcgaggacaccctggagcagctctatgcgctgggcttcaaccagtaccaggcgggcaagtgggacgacgcgcagaagatcttccaggcactgtgcatgctcgaccactacgacgcccgctactttctcggcctgggcgcctgccgccagtccctcggtctctatgagcaggccctgcagagctacagctacggcgcgctgatggacatcaacgagccgcgctttcccttccatgccgccgagtgccacctgcaactgggtgatctcgacggagccgagagtggcttctactcggcccgggccctggccgcggcacagccggcgcacgaggccctggccgcgcgtgccggcgccatgttggaagccgtaaccgcgagaaaggatcgaacatatgaatccgataacgcttga

SEQ ID NO: 319122 - DNA, 885 bp, Pseudomonas aeruginosa
atggaagtcagaaaccttaatgccgctcgcgagctgttcctggacgagctcctggccgcgtcggcggcgcctgccagtgccgagcaggaggaactgctggccctgttgcgcagcgagcggatcgtgctggcccacgccggccagccgctgagcgaggcgcaagtgctcaaggcgcttgcctggttgctcgcggccaatccctccgcgcctccggggcagggcctcgaggtactccgcgaagtcctgcaggcacgtcggcagcccggtgcgcagtgggatctgcgcgagttcctggtgtcggcctatttcagcctgcacgggcgtctcgacgaggatgtcatcggtgtctacaaggatgtcctgcagacccaggacggaaagcgcaaggcgctgctcgacgagctcaaggcgctgaccgcggagttgaaggtctacagcgtgatccagtcgcagatcaacgccgcgctgtcggccaagcagggcatcaggatcgacgctggcggtatcgatctggtcgaccccacgctctatggctatgccgtcggcgatcccaggtggaaggacagccccgagtatgcgctgctgagcaatctggataccttcagcggcaagctgtcgatcaaggattttctcagcggctcgccgaagcagagcggggagctcaagggcctcagcgatgagtaccccttcgagaaggacaacaacccggtcggcaatttcgccaccacggtgagcgaccgctcgcgtccgctgaacgacaaggtcaacgagaagaccaccctgctcaacgacaccagctcccgctacaactcggcggtcgaggcgctcaaccgcttcatccagaaatacgacagcgtcctgcgcgacattctcagcgcgatctag

SEQ ID NO: 319123 - DNA, 297 bp, Pseudomonas aeruginosa
atggacgacatgaacgaatacaccgaagacaccctgcgggcgaccgtccaggccgccgaactggcgattcgcgacagcgaggaacgcggccgcctgctggcggaaatgtggcaaggcctggggcttgccgcggacgccggcgagctgctgttccaggcgccggagcgagagctggcgcgagccgccgaagaggagctgctggccgaactgcggcgcatgcgcagttcccagccgacgcagggcgagcagggtacccggccgcggcgtccgacgccgatgcgtggcttgttgatctga

SEQ ID NO: 319124 - DNA, 435 bp, Pseudomonas aeruginosa
gtgagcgccgatccgctgattccctggtttctcgcccgcggcctggcggtgcgtccgcattgcctgcgcgacacctcgatcgcgctcggctggcaggtcctggcccatggctgcgaactggcctggcgctgcgacggcgagcgggtctggatcgtgatgttgcgtcggcggcaggcgcgcagcggattggccaatccattcgccgcgctgtacctgctggcggaggccacgctcgatacgctggggccgcgccagcgtctctacggcaaggtcctggcgctggccggcagcccactgcctggcgagcgcatggcgcgcttctatcgccgctggaccggcgccgccgagcccgccgacggctggttcgagctggaggccgggcgggtggtgacgcagcgaagcctgcgaaaacgacaaaaacccgaccgtgcctga

SEQ ID NO: 319125 - DNA, 2121 bp, Pseudomonas aeruginosa
atgaacgacctgagcgggcttctcggccgggtcggcgagcgcaaggacatcctgctggtggtgttgctgctggcggtggtgttcatgatggtgctgccgttgccaccgctgctgctggacatcctcatcgccgtcaacatcaccatctccgtggtcctgctgatgatgtcggtgtacatcggctcgccgttgcagttctcggtgttcccggcagtgctgctgatcaccacgctgttccgcctggcgctgtcggtgagcaccacgcggatgatcctgctgcaggccgacgcggggcagatcgtcaacaccttcggcagcttcgtggtcggcggcaacctggtggtgggcatcatcatcttcctgatcatcaccatcgtgcagttcctggtgatcaccaagggtgccgagcgggtcgccgaggtcagcgcgcgcttttccctggatgccatgccgggcaagcagatgagcatcgacggcgacatgcgtgccggcgtgatcgatgtcaacgaggcgcgggcgcggcgcgcggtgatcgaaaaggaaagccagatgttcggctccatggacggcgcgatgaagttcgtcaagggcgacgccatcgccgggctgatcatcatcgtcgtcaacatcctcggcggcatcgccataggcgtcacgcagaagggcctgagcaccgccgacgcgctgcaactgtacgcggtgctgaccgtcggcgatggcatggtctcgcaggtgccggcgttgctgatcgccatcaccgccgggatcatcgtcacccgggtgtcttccgacgagtcggcggacctcggcagcgacatcggcgaacaggtggtggcgcagcccaaggcgttgctgatcggcggcctgttgctggtactgttcggcctgattcccggtttcccgaccctgaccttcctggctctcgcgctgctggttggtggcggcggctacttcatgctctggcgccagcgggcccaggccagcgccggttcccgcgacctgccggcgttgctcgcgcagggcgccggagcgccatcggccaaggcgcgtggcaaggctggcggcggcaagccgaaggccgggcgtctcgccgagcaggaagaattcgccctcaccgtgccgttgctgatcgacgtcgatgccagcctccaggaacgtctcgaggcgatgtcgctgaacgaggagctggtgcgggtacgacgcgcgctgtacctggatttcggcgtgccgttcccgggtatccacttgcgcttcaacgaagcgatgggcgatggcgaatacctggtgcagctacaggaggtcccggtcgcgcgcggatgcctgcggccgggctggttgctggtgcgcgaacgcgccgcgcagctggaactgctcgcggtcccccacgagccggcagagctgcaggtgccgggagaagaggcgagctgggtggagcaggcgcaccaggatcgcctggagcgttccggctgtgcctgcctgggcctggagcaggtgctcacctggcacctgtcccatgtgctgcgggagtacgccgaggatttcatcggcatccaggagacgcgctacctgctggagcagatggagcagggttacggcgagctggtgaaggaggcgcagcggatcgttcccctgcagcggatgaccgagattctccagcgcctggtcggcgaggacatctcgatccgcaacatgcgggcgatcctcgaggcgatggtggagtgggggcagaaggagaaggacgtggtgcagctcaccgagtacatccgcagcagcctcaagcgctacatctgctacaagtactccagcggcaacaatatccttcccgcctatctgctggaccaggcggtggaggagcagatccgcggtggcatccgccagaccagcgccggcagctacctggccctcgacccggcgataacccaggccttcctcgagcgcgtgcggcagaccgtcggcgatctcgcgcagatgcagaaccggccggtgctgatcgtttccatggatatccgccgctacgtgcgcaagctggtggagagcgactatgccgggctgccggtgctgtcctaccaggagctgacccagcagatcaacatccagccgcttggcaggatcgtgttgtga

SEQ ID NO: 319126 - DNA, 330 bp, Pseudomonas aeruginosa
atgacgttgaaaccgacgcaacagcgcctgttgctgatgctgggctggctgcacctgcaatgcggccagccgcgacgcgcccaggtgttgctggaggccttgctgagcgttgcgccggagcgccgcgacgggcgccgcgccttgctcctggcgttgctccagcaaggcctcggcgagcccgccgtgcgcctgtgccggcagttgcaggaggatggcgaggaggagcccggtctgtggcgttgcctgagccgtgccgaacagctcgccgggcgtctcgacgcggcgcgtgccgcgcacgcccgggcgctggagctggaggcgcgggaatga

SEQ ID NO: 319127 - DNA, 366 bp, Pseudomonas aeruginosa
atgagccgggtcggtgcctggcacatcggcatcgaacgactcgacctggcgcatgccgagccgttcgcgccgcccctgccggagcgccatctgctggcgcccgacggccggccggtggagacccacgtcgccagcctgtatcccgcgcagcaggcgcaacagcgcctgttcgactacgcccggccccagctggagttccacggcctgctgcgccccggcgacttccgccaggcgctgcgcgatctccgcctggccctcacgctgccccgccagccagccctgcaggctgcggcctgcctgctcggcgagcgcgacgaagacgagcgactgctgcaaatggccctgaacctgttgcacaaggtatga

SEQ ID NO: 319128 - DNA, 372 bp, Pseudomonas aeruginosa
atggactgggttgagctggccgtcgcgcagttctgccaggacctgcgggtgagcgtaccggcgccgctggcgcgcgtggtgcaactggatttcgaggacagcggcaccttgcagctggaacgccatggcgaacagttgtcgctctggctggcctgtgacctggcctggcaccaggcctatcgcggcaccctgcgggcgttgcgcctgtgccatgcgcgcgcggccgggagcctgccgctgcgttgcgcctggagcggcgaatcgcgcctgctgctgtgcatcaccctggaagcccggcaggtcggcatcccgacgctgcaccaggccttgcaggcgctgcgctcggcgcgcagcgaagtgctcgccgcatga

SEQ ID NO: 319129 - DNA, 279 bp, Pseudomonas aeruginosa
atggcatacgggccttctgaattgaccggcgcagtcatcgccttgctcgagaagcgctgggtcggcgtcgccgaggtgcaggcgttgctcgagccgttgccgctggccgacgtcgcccggcagatccatttcttccgcgaactgaagcgtctctaccgcctgttgccggtcgaagtgttcggcgacgacgagcagcgccagaatcttttgaatgcctgccagatggcactcgacctggcgatcgagcgcgaagaggagcagcggcatggactgggttga

SEQ ID NO: 319130 - DNA, 633 bp, Pseudomonas aeruginosa
gtggcggcgccgacgccgccggcaagcgccgccgcgtcggccggcggcgacctgctgcaagcgttcctgcgcggcgccggcatgacccagttgaaggtcgacccggccggcgccgaagcgcagatggaagccatcggccgcagctatcgcggcctggtggaaggactggtggacgtgctgcgcgcgcgggccagcctgaagggcgagttccgcatggcgcagaccatgatccagccggtgcagaacaacccgctgaagttcgcgccgaacgtcgacgaggccatgctgctcctgctgcgccgcgacaaccaggcgttcatggcgccggatcgcgcggtggccgacagcttcgaagacctcaaggcacaccagctggcggtgatggccggcgtgcaggccgccatccgccacctgctggcgcgcttcgaaccggccgcgctggaagcccgcttcggcaagccggccgggctttccggcctgctgccgggggcccgccaggcacagaactgggacagtttcaccgagctgtacgcgaagatcctgcgcgaggcggaggacgacttccaagagcttttcggccgcgaattcagccgcgcctacgaggaacacagcgctcgactacggcgttcctga

SEQ ID NO: 319131 - DNA, 465 bp, Pseudomonas aeruginosa
atgcagaaactgatcgtcgcgctgttcgggctgctgctcgccgcctgttcgtccagcccgccggaaaccccgccgacccgggtggtgatctggctccacgccgcaccgaacctcaacccgtccgccgccggccaggcggcgccgctgcgcctgcggctgtacgagctgaagaaagacaccgcgttcggccgcgccgactacttcgccctcaccgacaacgcccagtcgaccctcggtggcgacctggtggagcaggacgagttcctcctgcgtccgggcgaggaacggcgcatcgaacgcacgctcgacgagcagacccgccagctcggtttcgtcgccgcctaccgcgacctcgaccgcgccacctggcgccaggtcctcgacgtgccggggcaacgcaccagccatctcgacatcacgctcggcgcgcaggccatcggcatcgtcgcgcgtcccgcgccctga

SEQ ID NO: 319132 - DNA, 1335 bp, Pseudomonas aeruginosa
atgtcctggaataaccgcgtggtgtggtccgaaggcatgttcctgcggccacaacatttccagcagcacgaccgctacctggaaaccctggtggatggccgctgccgctcgctcctggcgggcggctggggcttttccgagctgaagctggacgatgccctgctgacccagggcaagctggccatcgtcagcgcccgcggcgtgctgccggatggtacgccgttcaacatccccgccgacgatccggcgccggcgccgctgaatgtcgaggaaagcctgcgcgatggcatcgtctacctcggcctgccgctgaagcgggtcggcacccgcgacacggtagaggagggcgaggccctcggcggcgcccgctacgtcagccaggtgcaggaagtgcgcgacgacaatgccgccttcgagagccgcgccccggtggccctgggcagccaggcgttccgcctgctgaccgagcgcgacggcctcggcgaatacgccgcggtgggcgtcgcgcgggtccgcgagaagcgcgcggaccaggccctgagcctggacgaggactacctgccgccggtgctcgacattgccgccgcgccgcccctggcgtccttcgccaaggagctgctgggcctgctccaccagcgcggcgaagccctcgccgggcgggtggtggcatccagcgccgggggcgcctcggaaatcgccgacttcctgctgctgcaactggtcaaccgcgccgaggccctcaccggtcacctgtcccgcgtgcgcccgctgcacccgcaggagctgtaccgcgaactggtggccctggccggcgagttctgtaccttcaccgccagccagcggcgtcccgaggagtacccggtgtacaaccacgacgacctggccgccagcttcgccccggtgatgctcgccctgcgccaggcgctggcgacggtgatcgacgccaaggcgatcgccatcccgatcgtcgagaaggcctacggcgtgcacgtcgcgatgctcagcgaccgcagcctgatcgacaacgccagcttcgtcctggtggtgcgcgccgacgtccccggcgagagcctgcgcgggcacttcccgcagcaggccaaggtcggctcggtggagcacatccgcgacctggtcaacctgcaactgccgggtatcggcctgctgccgatgccggtggcgccgcggcagatcccctaccacgccggctccacctatttcgaactggaccgcggcagcgcgcattggaagcagctgacgcactccggcggcttcgccttccacatcgccggccagttccccgggctgaacctggccttctgggccattcgaggataa

SEQ ID NO: 319133 - DNA, 1350 bp, Pseudomonas aeruginosa
atgcctcccatcgacgatcccttcggcaccccggccggcggcggcaacggaagcccgcccgacgaccgcaccatgatcatgccgcgtcccggcggccgcgccccggaaccggccggcggcccccgcggcggcgatccctacacgccgccgccgatggccagcctggcgccgctgagcggccgcggcgacggcctcaacccgctggagcaggccgccggcccactgctggcgatgctcacccgcctgcgcaacaccatcgcccatccggcgccggccagcctgcgcgcgcaactgctcggctacctgcgccagttcgaggagaaggcacgccaggccggcgtggcgccggacgaagtgatgctggcgcgctacgtgctctgcaccgccctcgacgaagcggtgctcagcacgccgtggggcagcaccagcgactggggcaagcagagcctgctgatcaccctgcacaacgaggcctggggcggcgagaaggtcttccagttgctcgaacactgcctgcagaacccgcaccagcgcctgcacctgctggagctgctgtacctgtgcaccagcctcggcttcgaaggccgctaccgggtcatgcacgacggccgcagccaactggaggcgctgcgcgagcgcaccgcggcggtgatccgcagcacccgcggcgagtacgagcacgaactgtcgccgcactggcgcggcctcagcgtgatgcgcgaccgcctttcgcaatacctgccgccgtgggtcggtatcgccatcggcctggccttgctgctggccttgctgttcggcctgcggatgaagctggccgccgacgccgagccggtgttcaagcgcatccacgccatcggcgagatcccggtgcaggccatcgaccgcccggcggtgcagccgcgggtgatcgagcggccacgcctggcgcgcttcctcgccgacgacatcaaggcccagcgggtggcggtggaggacgccgtcgaccgctcggtggtgaccatccgcggcgacgagctgttcgccagcgccagcgccagcgtgcgcgacgagttccagccgctgctgctgcgcatcgccgacgccctgcgcaaggtcaagggccaggtgctggtcaccggccatagcgacaaccggccgatcgccacgctgcgctacccgtccaactggaaactgtcccaggcccgcgcccaggaggtcgccgacctgctcggcgcgaccaccggcgacgccggccgcttcaccgccgaagggcgcagcgacaccgagccggtggcgaccaatgccagcgccgaaggccgcgcacgcaaccgccgggtggaaatcaccgtattcgcggagggcgcgcaatga

SEQ ID NO: 319134 - DNA, 3534 bp, Pseudomonas aeruginosa
atgaaaggcttcctcaacttcttcgcgcgctgggtggtgccggtgctcggcctgctcgccctgagcctgatcatctggttcctcggcccgctgctgcgcctgggcaactacgaaccgttggcctcggcgaccagccgctgggtgctgatcgtcctgctgttcctggtctggatcggcttccgcgtgctgcgcatcgtgcaggcccggcgcaacgcggcgaaggtcatgcagagtctcgccgaggtcagcgcgccggacgccgccagcgtcgccaccgccgaagagctggcgaccctcaagcaacgcatggacgaggccctggccctgctcaagcgggccaagttgggcggcagcgagcggcgcaacctgtacgagttgccctggtacgtgatcatcggcccgcccggttcgggcaagaccaccgcgctgatgaattccggcctcgacttcccgctcgccgcgcagatgggcgccggggcgatccgcggggtcggcggcacacgcaactgcgactggtggttcaccgacgaagcggtgctgctggacaccgccggccgctataccacccaggacagccacgcccaggtagacaaggccgcctggctgggcttcctcgacctgctcaagacccagcgcaagcgccgccccatcgatggcgcgttcatcaccatcagcctttccgacctgctgctgggcagcgacgccgagcgcgccgcccatgcccaggcgatccgcgcacgcatccaggagctgtaccagcagctcggggtgcgcttcccgatctacgtgatgctgaccaagttcgacctggtgccgggcttcatggagttcttcgacagcctgaaccgcgaggaacgcgcgcaggtctgggggatgaccttcgccctcgacgacggcaagagcgcggaaggcccgctggcggtgttcgacagcgaattcgccctgctcgaacagcgtctcaccgcgcgcctggtggaacgcctgcagcaggagcgcgacccggcgcggcgcgacctggtctacggcttcccgcagcaattcgccgccctgcgcgaatgcctcggcgagttcctcaacggcgtgttcaagcccaacccctacgaggaacgcccgctgttgcgcggcctgtacttcaccagcggaacccaggaaggcagtccgatcgaccgcctgatcggcagcatggcgcagtcgatgaacctcgaccgccagcacctggcgcggcagaccggaaccgggcgcagctacttcatcgagcggctgttccgcgaagtggcgttcggcgaacgcggcctggtcggcaccaacccgaaggtcgagcgccgccgcaagtggctgaccatcggcgcgctgagcgccaccgcgctggtggtgctggcggtgacggcggtatggatcgccagctaccgcgccaaccagagctacatcgccgcggtcgaccagcgcgtcgacccgctggcgcgcggcatcgagtcgctgagcccggcccagcgcgacgtcctggccgtactgccacagctcaacgcggtgcagaatctcgccggcgacgcgccgagctgggccgaaggctacgggctgtaccagggcgacatgctcggcgaggagtccgccagcgtctaccgcaagctgctgatcgcggtgttcgccccgcgcctggtgacccgcatcgaggaacagttgcgctccggcggcagcagcgatttcctctacgagggcctgaaggcctacctgatgctcggcagcccggaccattacgacgccgacttcatcaaggcctggatcagcctcgactgggaacgcaacctgccgcgcgacctctcgccggaacagcgccaggcgctgcacgcgcacctcgacgcgttgctcgaacgacggccgccgtcggcgcgcctggaccaggacctggtcgaggacctgcgccgccagttgcagcaactgccggtggcgcagcgggtctacgaccgggtcaagcggcagaggctgcccaaggacgtgcccgacttccgcatcagcgacgccgccggccgcgacgcgccgctggtgttcgcgcgcaagagcggcaagccgctcaccgacccgctcagcggcttcttcacctaccgcggctatcgcgaggtgttcctcaccgccagcctcagccaggccggcaccatcgccgaggaacagtgggtgctcgggcgcgacctgaacgatgccggcgatgccgccaacctggccctcgacgtgcgtcgcctgtacttccaggactacctgcggcagtgggacgacctgctcgccgaccttaccgtagtgccgatcaccaatgtcacccaggccgccgacgtgctgcgcattctctccggaccgacctcgccgttccgcaagctgctcgaggcggtggcccgcgagaccgacctgcagaagggcgaccggctggtcgccgcgcaagtgaagaaggccgccgacggcaccgtggacaagctcaagcagcgcctcggctcgctggtcggccaggaggaggagcaaggcgcccgcgaacagccgcagcaggccgacagcgacccgatcagcgcccacttcgccgaactcaacagcctggtcagcaagggcgagggcggcaacgaaccggcgccgatcgacagcctgctggaggacatgaacgcgctctacgtacaggtcagcgccatggccggagccagcggcgactcgctgctcggcgacgccaagaaccaggtggccgccgccgcctcgcgcgttgccctcagcgccgagcgccagccgccggtggtccagggactggtgaagaacgtggtcaactccaccaccagcagcatgatgggcagcgtgcgcaaccagctcaacgcggcctggatcagcgacgtggtcagcgtctaccggcagtccctggccgggcgctacccgatcgccgccggcagctcgcgcgacgccaccctggaagacttcggccacttcttcggtgccggtggggtgatggacagctacttccgccagtacctgcaaccctacgtcgacacctccgccagcacctggcgctggcagcccggcgcggcgcagaagctcggcatcaatcccggcgtgctgcacaccttccagcgcgcggcagcgatccgcgacgccttcttccgctccggcggcatgcagccggcggtgcgcttcgaactcaagccggtgaccatggacgcggcgatcagccagttcatcctcgacctcgacggccagcagctgacctacgaccacggccccagccgcccggtggcgatgcagtggccgagcgccaacggcctcggcgtggtccgcctgacggtgacgccgccgcccagcagcggccgttccggcctgaccctggaaggcccctgggcctggttccgcctgctcgaccagtcggacctggaacgcggcaactcgccggaccgcttcaccctgcggctgcgcatcgacggctccagcatcgcctgcgagctgcgcgccagcagcgccttcaaccccttcaagagccgggtcgtgtccggcttcagcctcccggagcgcctttga

SEQ ID NO: 319135 - DNA, 681 bp, Pseudomonas aeruginosa
ttgaacagcgtcggtttctacggcaagctggccggccgcggcgatttcgtcagccgcggcctgccgaacaccttcgtcgaaccctgggacgcctggctggccagcggcatgcgcgccagccaggacgagctcggcgcggcctggctcgacgcctacctgaccagcccgctgtggcgcttcgccatcgcccccggcctgctcggcggcgaagcggtgaccggagtggtgatgccgagcatcgaccgggtcggtcgctatttcccgctgaccgtcgcctgcctgctaccggcgaacgccgacctcggcgggctggtcggcggcgacgacggctggttcgaacaggtcgagagcctgctgctctccaccctcgaaccggaggccgaggtcgaggccttcgagcaggcggtggcgcagctcccggcaccgccctgcggaccgcgcatcgaacaatcgctgatcagcggcaacctgctgcgcagcgaagcggtgaccccggcgcagcgcctcgccgcgctggcccagcacgcctgcgacggcgccagccactggtggggacgcggctcggcacggatctccgccggcctgatgcgctaccagggcctgccgccggcgccggcgttcggacgattcctcaccggagagggcgaggtgatcccgctctttcccggcatacccggttaa

SEQ ID NO: 319136 - DNA, 729 bp, Pseudomonas aeruginosa
atggtgcccaactcagtcagctactacaggtcggccagctacagccacgtcggcatggtccgcaaggtcaacgaagacgccagtctcgacgcccccgaggcgggactctgggtggtcgccgacggcatgggcggccacgccgccggcgacttcgtcagcagcctgatcgtcgataccctgcggcgcatcccggcggcctcctcgctaccggcctatgtcggcgcgttgcgcaccggcctcgcccaggtcaacgagcgggttcgccaggaggccggcctgcgtggcgtcagcgtgatgggcagcaccctggtactgctcgccgcgcgcggcaaccaggcgagctgcctgtgggccggcgacagccgcctgtaccgcctgcgcggcggcgtgctggaagccatctcgcgggaccacagctacgtccaggagctgctcgacaacgcattgatcagcgaggaagaggcgcgccaccatccgcgcgccaacgtggtcacccgcgcggtcggcgtgcacgagcaactggaactgtcggaagccgcgctgcacgtgctgcccggcgacagcttcctgctctgcagcgacggcctcaacaagaccgccgacgacagcgaactgcgcgacgtgctcagccacagcgatccctatgcggtggtccgcagcctggtccacctgggcctgacccgcggcgccccggacaacatcacggccctggtggtcagggccttctga

SEQ ID NO: 319137 - DNA, 2922 bp, Pseudomonas aeruginosa
atggacatagaacttccgggattcgacatcgaacgcgagctgggcgaaggcgccatggccacggtctacctggccacccagcgctcgctgcagcgcaaggtggcgctgaaggtgatggccgcggcgctggccgccgacccgagcttcgccgaacgcttcctgcgcgaaggtcggaccctggcgcggctgtcgcacccgaacacggtgaccatccacgacatcggcaacgtcggcagttgctactacatggccatggaatacctgcccaacggcacgctcaaggagcgcatccagcagggcctcgatcccgagctgggcctggtctacgtacggcaggtggccgccgcgctcggctacgcgcactcccagggcctggtgcatcgagacgtgaagccggccaatatcctgttccgcgccgacggcaccgcggtgctctcggacttcggcatcgccaagtcgatcgaggacaatacccagttcacccaggtcggcttcgccgtcggcacccccagctacatgagcccggagcaggcccgcgggcaggagatcgacggccgcgccgacctctacgcgctgggcgtggtgctctacgagatcctcaccggcaagctgccctacaacggcaaggattcgctctccaccgccctggcccacctcaccgagccgctgccggaactgccgatcgaacagggccgctaccaggacatcctgcgccagttgctggccaaggacccggccgagcgcttcccaaccgccggcgcgctgatcgccgccctcgaccgcctggcgccgagcgccctggaagccacccagatccgtccgctggcgacgccgcagggctcgccgcgagcgagcaacccgccgccggccgaacccgcgcccatgccgcccgccgacctcggcggcctgcaaccggtatcgatccagttgccgccggtcacgcccagcgccggcggcgccacgccgcccccgcctccgccatcgcaagcggcgaaaccgccatcgcccccgccgcctccgctgccaccggcgaagccgcgtgaacaggacggcggcgagcgtccgctgctgatgccaggcaagaagaccctgttccagcgcgtcctgaccaaacccggcgcggccatctccgccgaggctggcggcccgccccgggccggcgcggtgccggccttctcggtgctctacgtgtacgcccgcaagcaggtcggcggcagcccctggctgcgcgtcggcgcctccagcaacggcgagggcgacggctggctgccggccagcgcggtgagcgactggaagcagagcctggtgctgaagttcaccgaacgctccggccgcgcgccggtgatgttcctcaacagcgccgagcaggtcgagcgcctgctcggcgatacccgcgcagcgcgcgacaccctgacccaggcggtggaccacaagggcgatccgcaggtggtcgcggtcgagcccaacgaccgggcgatcccccaggaccagttctacctgctgccgatcttcgactcgaaggaaagcttcgacgccgacggccagccggcgcagttgctggaggtcgcctcgatcgaccccggcggcagcgccgcggcaccccaggcgccgggccaggccgggcagggcggcgccagcggcgcggcgagcgacaccttccgcaccggcatcgtcctggtggtggacacctcggtgtcgatgcagccctacatcgaccgcgtgcgcgaggtgatcgacggcctgcagcggcagatcggcgagcgcggcgacctggacaaggtcagcttcggcctggtcggtttccgcaacaacaccgacaagacccccggcctggaatacgtcagcaagaccctggtgccgctgcaaccgggcaacgacgcgcagcgcttcgccgagttgagcagccaggtgcgcgccaccgacgtctccagccactcgttcaacgaagacgccttcgccgggatcatgcaggcggtcgacgaaatggactggtcgccctacgccgggcgcgtggtgctgctggtcaccgacgccggcgcgctgcgcaagaacgacccgctcgggcgcacccagatgaacgaggccgaggtccgccaggcggcgctgcgcaagggcgtgaagatctatgccctgcacctgcgcaccccggccgggaagaacaaccacggctacgccgagcagcagtaccgcagcctcaccgccgacgccaacccgaagatcgccgacctctacatcccggtggccggcggcgaggtgaacgccttcggcaacacggtgaaggagatcggcacggtgttcgccgacctggtccacgacgccggcaaccgcaagccgcaggcgccgcgcttcgacgccgcgccaagcgtggcgagcaagtcggcggccatcggctacgccatgcagatggaattcctcggtcgccgcgacccggtgcgcgcgccgcaggtcgtcaccgcctggaccgccgaccgtgacctgaccaacccggcgctgccggcgttccaggtctgcgtgctgctgagcaagctgcaactcaacgaactgcaacagtcgctgaaactgatcgtcgacgcggccaagcgcacccagacctcgcccaaggacttcttccaggaaatcgccagcgccagcgcctacatgagccgcgacccggcgcaactggtgaagggcagcaacctggcacagagcggcgtgctcggcgaatacctggaaggcctgccgtaccgcagcaagtcgctgaacatgacccaggacctctggctgtcgctgagcgtcgccgaacagcaggacttcatcgacgaactggagtcgaagatccgcctctacgaaaccttccacaacgacgtcgccaactgggtccggttcggcgacgccgacgccggcgacgcgctgtaccgcgtgccgctgtcgacgctgccatga

SEQ ID NO: 319138 - DNA, 720 bp, Pseudomonas aeruginosa
atgatcctgcgcctgcacgaggtcgcccgcagccacggcgccggtcgccagcgctaccgcctgcgggtgccggcgctggaattgcgcgcgggtcgccagctggccatcgtcggccccagcggctgcggcaagagcaccctgctcgacctgctggcgctggccctggcgccggacccgggcgggcgcttcgaattcctcgccggggaacgcccgcaggacatcgccgcgctctggcgcgacggccgccaggaccgcttggcggcgctgcgccggcagcactgcggctacgtgctgcaaagcggcgggttgctcgaattcctcgatgtgcggcgcaacatcggactgccctgcgcgttgctcggcgccccatccgccgagcgcgtgcaggcgctggccgatcggctggaaatcggcgaccagctggacaagaaaccggcggcgctgtcggtcggccagcgccagcgggtcgccatcgcccgcgccctggcgcatgcgccgcgcctgttgctggccgacgagccgaccgcggcgctcgacccgctgaacgccgaacgggtgatgcgcctgctggtggagcaggcccgcgagcgcggcgcctgcaccgtggtcgccacccacgacgaacgcctggctcgcgccgccggcctggaagtcctggccatccgctggcaacgcgaggccgacgacagcgtcggcgcctgcctcgaggaagttggctga

SEQ ID NO: 319139 - DNA, 1200 bp, Pseudomonas aeruginosa
atgcgcgccggcctgctgctctcgctggcctgggccgactatcgcggcgaggcgcgcctgtcgctctgcgcgatcttcgccctggcggcggtgatcaccccgctgctggtgctgttcggcctcaagtacggcctggtcagcaccctcaccgagcggctggagcgcgcgccttctgtgcgcgagatcattccggtcggcggcgcccgctaccgtgccgaggacatcgccgccctggccgcacgcgcggacgtcgccttcgccgtgccgcgcacccggcagatcgccgccaccgccgacctcagcggcgtcggcgagaccgccctgagcgtcgagatgattcccagcgccgctggcgacccgctgctggccggcctgccgcaacccgaccggccgacccgcgtggtgctcagccacggcgccgcggaaaaactcggcgcccagcctggcgagcgcatcgtcgcgcgcatcggccggcgcatggatggccaggcacagagccagcgcctggagctggaagtgctcgcggtgctgccgcaggagcgtttcgcccgcgacgcgctgttcgccccgctggccctgctggaagccgccgaggactatcgcgacggtcgcgcggtggccgcctacggctggccggggaaggccggcgagaccccgcgcgcacgcatctacccgggcttccgcctgtacgcccgagacctcgatgcggtggaagggctgcgccggcacttcgtcgcgagtggcgtggaagtcgccacccaggccgaggccatcgcccaggtgcgcagcctcagccgcaacctcggcctggtgttctggatcgtcgccgcgctggccatcggcggtgccttcgccgccatcgccgccagcagcctggccgccgtcgaacgcaagcgccgcgccctggcggtgctgcgtctgctgggcttcccgaccgccgcgctggtcggcttcgtcatgctcctggcgctgttcagcgccgtcttcggcctgttcctcgccgggctgctgtacgccgccacggccggcgcgctgaaccacctgttcgacaaccagagcggcgagttcgtctgccgcctgctgcccagccactacctgacggcgctgctcgccacgctgctgtgcagcgtcctggccgccgccagcggcggctggcgcgcggcgcggatcgaagccgcagagggattacgcgatgtttga

SEQ ID NO: 319140 - DNA, 1689 bp, Pseudomonas aeruginosa
atgtttgagaaagccattcttccgctcgccctcggtgcctgcctggcatttgccgcgccggcctgggccgaaggcgactcgccggacaatcccaagccgctggccgacgacgtcgccctggtcttccggcatgtctacgtactcgccgaaggcgccctcgacgatcgcgaggtcaacctcggctacgccttcaacgaaggcgaggcgggctaccagcagtcgttcatctccggctaccggcgcgactacgtgaacggccagttcagcctcgccgacctggcaccggcctggcagcagaagctctccgccagcctgccgaagcctgccgccggcaccccgctgaagccgatgctgtacttcatcggcaagtacgaggtgaccgcccgccagtacgccgcggtgatgagccaggcggccgcgctctccggccagggcgaggcgccggcctgcgacgtgccggacgggatggccgcgcggctgcccaaggtcaacctctcgcgcttcgacgccgaacgcttcggcgcggtgtacagcgcctggctgctgaagaaccacccggaactgctgccggtcagcggccgcggcaagaatcccgaggacggcggcatcggcttcgtccgcctgcccaccgaggtcgagtgggagttcgccgcgcgcggcggccaggcggtaagccgccaggaactggaaggccggctgttcccgcgcaaggtcgagggcagcgaccaggaaggcccgctgggcgactgggcggtgtacaaccaggtcgccggcggcaccgggcaggccgcgcgactgttgccggtagggatgaagcggccgaacccgctgggcctgttcgacgtgatcggcaatgccgcggagatggtccaggagtccttccaactggtccacgccggtcgccggcagggcacatatggcggtttcgtggtgaagggcgggaactatctcgaaggcgagatgactctattcaccgggatgcgccgcgaatacccgctgttcgccgccgacggcagcgaacagcgcaacgagaccaccggtttccgtgtcgccatcggcgcgctgtccgcgccgcgctcgcgctatcccgagctgttcgcccaatggcagaaggaaggccgactagcggcattgaccgatgccatcgatgacgctcaagatcccaccaagcaattggacggaatcattgccgccacccgcgacccgcagatgcaggcgcagttggcccagataaacgaggaactcaagcgtaacgtttcgttgatcgcccggcagcgcgaagaggccgccggaaacctgatacagtcggcggcactggtcgccgagacgatcaacaactacaacatacgcctgaccaacctcaagaaggacagggagaaagccgtggcagccagggatcaggcgaccgcccagctctatgccggcgccatcgccaacgggcgcagcgccctcgatggcgcattggccatctacatcgacaacctcgccaccggcacccgttacaccgacgcggtgatccaggcgcagttccagcgcatccaggaagaactcaatcgcaacccggttctgggcaagagcctggtcaagcgcgcgaccctgttcgtcaaacacgtcggagattatcgccagcagcaccgggccgagccggaggcggtattgacggaattgctcgcgtccagcgggcgttga

SEQ ID NO: 319141 - DNA, 915 bp, Pseudomonas aeruginosa
atgagccaacccagcgaaaaccgtttgatcacctcggcgcgctacgcgctctgcctgttgaccgccagcggcgtgctgctcagcggctgcgccagcagcggcgtcggctcggtcgcccagaccacccgcgcggaatactacccgtcctgctacgagccggtgtcgcacctgcgcagcaccgataacgcagtgcgcaattcggccatcaccggcgccattaccggcggcctcctgggcggcctggccggcggcctggccagcgacgagaaccgcggccgcaatgccgccctcgctgccgcaggcggcgccctggccggcggcgcggcgggctactacatggagaagcagaagcagatcagcgatgaccgcgcgcgcatcggctcctacggtaccgacgtcgaccgcagcaccgtcgagatcaaccgtagcgtggcctacgccaagtcggcgcaaagctgctaccagagccagttcaaggctctgctcgacggtcgcaagaacaagtcgatcaacgaagccgaagggcgcaagcgcctggccgagatcgtcagcggcctgcaggagaccaacgccttgctggtcgccgccaacggccgtgccggcgagaacatcagcaactacacccaggcctacgagaaagacctgcagcaggtcggcgtaccgcgcgccgaggtgaccaaggtcgccgaggccgagaaccgcgccagcactacgaaaggcggtaacaagcccaagaccggcagcaatcccaaggtgccgaaggaagcggtcgccaccgagcagaccatccgcaaggcccaggacgcgcaaagcgaaggcaacaaggtggcctcccagggccagggcatgatccgggaggtctgcaacagcccggacatgggcgactgggcgccgccgagctgcgccaaggcctga

SEQ ID NO: 319142 - DNA, 1059 bp, Pseudomonas aeruginosa
atgagcgctcccctgcccccgcgcggtcgcggtaccgccagcaaccccctcaaccgcttcgccccgacccacagcgaggccttcgacgatggctgggagcaggacgtgccgccgatccagctcaccgaggtgcgcgaggagatcgcccgcacggtgatctcccgcaaccagtcgccggacctccctttcgatcgttcgatcaatccctaccgtggttgcgagcatggctgcatctactgctatgcgcggcccagccatgcctattgggacctctcgccggggatcgatttcgagacccggctgatcgccaagagcaacgtcgccagcgcgctggagcaggaactgagcaagcccggctatcgctgcgcgccgatcaacctgggcgccaataccgacccctaccagccgctggagcgcgaacgccgcctgacccgccaggtgctggaggtgctgctgcgcttccgtcacccgctgaccatcgtcaccaagggctcgctgatccttcgcgacctcgacctgctgcgcgaactggcggagcagaacctggtggcggtgatgatcagcctgaccaccctcgacgacgagctgaagcgcattctcgaaccgcgcgcggcggcgccctcggcgcgactgcgggcgatccgcacgctcagcggcaacggcatcccggtgggcgtgctctgctcgccgatgatcccgatggtcaacgacatggagctggagcgcctgctccaggcggcgcgggacgccggcgcgcgcagcgccgcgtacatgctcctgcgcctgccgcgcgaagtcggcccgctgttcgaggaatggctggcggcgcactacccgcaacgcgccgagcatgtgatgagcctggtccgccaatgccgtggcggcgaggtctacgacagccgcttcggccaccgctttcgtggccagggaccgttcgccgacctgctggcgcagcgtttcgcggtggcgatgaagcgcctcgggctggaccgccgcgagggcttcgggctggattgcagccggttcgccgtgccgggggcgcagatggcgttgttctag

SEQ ID NO: 319143 - DNA, 276 bp, Pseudomonas aeruginosa
atgagcccggcgatcaccaggaagcgcttcatcgccggggcggtctgcccggcgtgcagcgaacaggacaagatccagatgtgggaagaggacggcgtgccgcaccgcgaatgcgtggcctgcggctacgccgacacgctcaacgcccagggccagtcgatcccgaaggagctgggtacgcgggtcaaccagaacgcgccgaagccggccaacccgaaggtgcagtcggtgcagttcttccccaatcccaagctgaagaagaagcccgacgcctga

SEQ ID NO: 319144 - DNA, 2046 bp, Pseudomonas aeruginosa
gtgagcgcgaatccccttctgcaggcctacgacctgccgcctttctcctccattcgcccggaacacgtgaagccggccatcgagcggatcctcgccgataaccgcgccgccatcgcccgcctgctggaaacccagcgcgagcagccgacctggaagggcctggtgctggcgatggacgaactcaacgaccgtctgggcgccgcctggagtccggtcagccacctcaacgcggtgtgcaacagcgccgagctgcgcgaggcctacgaggcctgcctgccggagctgtcggcctactccaccgagctggggcagaaccgcgccctgttcgaggcctacgaggcgctggcgaagagccccgaggcggccggcttcgacgtggcccagaagaccatcctcgaacatgccctgcgcgacttccgcctgtccggcatcgacttgccggcggacaagcagaagcgctatgccgaggtgcagtcgcgcctgtccgagctgggtagccgtttctccaaccagctgctcgacgccacccaggcctggaccaagcatgtcaccgacgaagccgcgctggccggcctgaccgattcggccaaggcccagatgaagcaggccgccgaggccaagggcctggacggctggctgatcagcctggagttccccagctactacgcggtgatgacctatgccgatgaccgcgccctgcgcgaagaggtatacgccgcctattgcacccgcgcctccgaccagggcccgaacgccgggcagaacgacaacggtccggtgatggaagagatcctcgacctgcgccaggagctggccggcctgctcggcttcgccaactacgccgagctgtcgctggcgaccaagatggccgagtccagcgaccaggtgctcagcttcctccgcgacctggcggtgcgcagcaagccgttcgccgcccgcgacctggagcagctgcgcgcctacgccgccgagcagggctgcaccgaattgcagagctgggacgccggctactacgccgagaaactccgcgaggcgcgctacagcgtgtcccaggaggcgctgcgtgcctacttcccggtggacaaggtgctttccggcctgttcgccatcgtcgagcgcctctacggcatccagatccgcgaactgcacgatttcgaacgctggcacgccgacgtacgcctgttcgagatcctcgagaacggcgagcacgtcggccgcttctacttcgacctctatgcccgcgccaacaagcgcggcggtgcctggatggacggcgcccgcgaccgccggcgcgacgcccagggccggctgatcgacccggtggcctacctggtgtgcaacttcaccccggcggtgaacggcaagccggcgctgctgacccacgacgaggtcactaccctgttccacgagttcggccatggcctgcaccacctgctgacccgcgtcgagcatgccgccgcctccgggatcaacggggtggcctgggacgccgtcgagctgcccagccagttcatggagaactggtgctgggaaccggaaggcctggcgctgatctccgcccactacgagaccggcgaggcgctgccgcaggacctgctggagaagatgctggcggcgaagaacttccagtccgggatgatgatggtccgccagctggagttctccctcttcgacttcgagctgcacgccacccacggcgacggccgcagcgtgctgcaggtgctcgagggcatccgcgacgaagtggcggtgatgcgtccgccggcgtacaaccgcttcgccaacagcttcgcgcacatcttcgccggcggctacgcggccggttactacagctacaagtgggccgaggtgctgtccgccgatgccttctcgcgtttcgaggaagaaggcgtgttcaaccccgataccgggcgtgccttccgcgaggcgatcctggcccgcggcggctcccgcgagccgatgctgttgttcgtcgatttccgcggtcgcgagccgtccatcgacgccctgctgcgtcactccgggctggtcggggaggccgcatga

SEQ ID NO: 319145 - DNA, 543 bp, Pseudomonas aeruginosa
gtgaccattcgttcctaccagggcaaaacgccactgctcggcgagcgggtcttcgtcgatccctcggccgtgctcgtcggcgacatcgagatcggcgccgacagctcggtctggccgctggtggtgatccgcggcgatatgcaccgcatccgcatcggccagcgcagcagcatccaggacggcagcgtgctgcacatcacccacgccggccccttcaacccggacggttttccgctgagcatcggcgacgaagtgaccgtcgggcacaaggtcctgctgcacggttgcagcatcggcaaccgggtgctggtggggatgggctcgatcgtcatggacggcgcggtgatcgaggaccaagtgatcctcggcgccggcagcctggtgccgccgggcaaggtgctggagagcggcttcctctacgtcggcagcccggcgaagaaggcccgtccgctgagcgacaaggagcgcggcttcttcacctacaccgccggcaactacgtgaagctcaaggacctgcacatcgccgaggactaccatgcgtga

SEQ ID NO: 319146 - DNA, 666 bp, Pseudomonas aeruginosa
atgcgtgacgccacgctgcgctacccgaacatcctcttcgatctcgacggcaccctcaccgacccacgcgagggcatcacccgctcggtgcagttcgccctcgcccgcctgggcatcgacgagccggacctggcgcgcctggaacacttcatcggccccccgctgttgcagtgcttcatgcagacctacggcttcgacgaagcgcgcgcctgggaggcggtgaaccactaccgcgagcgcttcagggtcaccggtctctacgagaaccgcgtgttcgacggcattcccgagctgctcgaagccctggtcggacgcggccacacgctctacgtcgcgaccagcaagcccggcgtgttcgcccgcgagatcgcccgccacttcgccttcgaccgtcacttcaaggcgatctacggcagcgagctggacggcacgcgcacgcacaaggacgaactgatccgccatctgctcgacagcgaaggcctggcagcggagcattgcctgatgatcggcgaccgcatgcacgacctgctcggcgccagccgcaacggtgtcgcctgcatcggcgtcggctacggcttcggcagcgaagacgaactgcgcgcgcaccagccgacccattactgcgccgacctcgccgccctgcggcaggtattggaatcccactga

SEQ ID NO: 319147 - DNA, 984 bp, Pseudomonas aeruginosa
atgaccgacaatcccttcgccacccccaccgccccggtgcagccgccggccagagaggtgcccgccaccacccagccctatgcgttcatcgcggtgctggcgctggtcacctgcctgtccttcgccgtaagcctgggcatccagtggtacaacgacatcggcgagatccgccagcgtttctccgagcacctgcaactgatggcgccgcactggttcaccggcctggtgttctacgcggcggccaacctgctggtgctgcatgcctaccgcgagaagcggcagctcgtcgagttccgcccgctggcgctgctgctgatcggctacggtctgctcaacctggtctgcggcatgctcgccgggatcggcctggcaccgctgacgctgccgttctaccagtgggtgacggcgcaatccagctacggcgtctggctgatggcgttcaacgaagcgatgagctgggtctacctgctcctgggcagcctgctgccgttggggctggtgctgctcggcagccgggtgaactcgccgcgcctggccgaaggggaagaagcccgcgtcgctgcctggcaggtcgccctgggcgccgcgctgtgtttcgccacgctgtgtttcaagctgatgcagttccttccctacgccctgctgcgctacgacgagccttggctatacggcctgtacctgagcggcgtggcgttgcccgcggcgctgctcttcggcgccgtctgcacgcgcctgccggcgcgcctgcaacgcttcgccgccggccgcgcgctgctgctcgcggtggtcgccatgctgctctggagcgtcgcgctgctggcggtcggcggggggctggcgctgctgatgatcctcggcctggcgcccgctggcatcggctatacgctgctggtggcgctgctcggcgtcggcctgttggcgctgctctggccgatcggccggctggccacgcgctggtgctacgccgaccagctcgccgcctga

SEQ ID NO: 319148 - DNA, 1128 bp, Pseudomonas aeruginosa
gtgctggtagggcggcgggcggtccgcgtgctgtgctatgttccgcccatgccacgccgccttcgccatccgcttgctgaccttcgactgccccgttgggttccctgcctggcgctgttggcgctgagcggttgctcgaccgtctcctactacgggcaactggccagcggccagttcgccctgctgcgcgcccgcgagccggccgccgcggtgatcgccgacccgcagcgcgacgcgcgcttgcgcgaacgcctggcgaaggcggaaaaggcccggcaattcgccagcgaacgcctcggcctgccggacaaccgcagctatcgcctgtacgccgatatcggccggccctacgtggtatggaacgtgttcgccaccccggagctgtcgctgcagccggtcacccattgcttccccatcgccggctgcgtggcctaccgcggctactacagcgaggccgccgcgcgcgccgaggcggcgcgccagcgggcgctcggcgacgacgtctacgtcggcggggtgcaggcctactcgaccctcggctggttcgacgatccgatcctcagcagcatgctgcgctgggacgacgaacggctggcgaccttgatcttccacgaactggcgcaccagaagttctacctgcgcgacgacaccgccttcaacgaatccttcgccaccttcgtcgaacaggaaggtacccgccagtggcgcgagtatcgtggactgccgccggcggacggccgcgaggagaagcgccgcgagcagttcaccgcgctggtcctggccagtcgtgcgcgcctcgaagcactttatgccgggccgttggacgatgccgccaagcgtgccggcaaggctgccgaattccagcgcctgcgccgcgagtacgcggcgctgagccagcgcgaatggggtggcgagtcaccgttcaaggcctggatcgacgcgccgttcaacaatgccaagctgcttcccttcggcctctacgaccaatgggtggcggcgttcgccgtgctgttccgccaggtcggcggcaactggccggcgttctatgcgcgggtccgtgcccttggccagctccccctggcggagcgccaggcggcgttgcagcggctggccgccgcagcgccctga

SEQ ID NO: 319149 - DNA, 417 bp, Pseudomonas aeruginosa
atgcgtacgctgctgcttgccggtggcctgctcgtcctgagcggctgctcactgctgatgcccacccccgacccgaaccgcgcctgggtcgacctcgatacccagcccgacgccgatctcgccgccgtggaagtcgacgacaagagctgggaccgcacgcgctacttcgaggtcgatcccggcacccgcgaactcacggtgcgctaccagttcaccgtcgacccgaccaacatcggccccgtggacagcccgctctggcgcgattgccagctcaacctcaagttcaaggacttcagcgccggccagcgctaccgcctggaggccgggcacatcggcttccgtccctgggcgaagctctacgaccaggacaacagggaactggcgcgcggccgcgagggacgctgcgcgaaggtctga

SEQ ID NO: 319150 - DNA, 438 bp, Pseudomonas aeruginosa
atgcgtccactcacccgtctcgtcccgctcgcgctgctgctcctcgccggctgcgccggaccgctgccgcagccggacccgcagatggcctgggtcgagctgcgcagcgcgccggccaacaccctgctggccgagcgcctggacggcgagcggttgagcgacgggcgctacttccaggtcactccgggacgccatgtgctggaggtacgcttccagtacgaactctatggcggttccggcggcgggggcggcggcttcggcgagccggtgcagatcaactgctaccagcaggtggtctatgacagcttcgaggcgggccggcgctatcgcctggaggtgcgcccgcaattgcgcagggcgctggcgctactgagcgacgagcgtggcgaggtggtcgcccgttcgaacttccagaccagccgctgcccgccgtactga

SEQ ID NO: 319151 - DNA, 234 bp, Pseudomonas aeruginosa
atgaaaaccatcggactggggattgccaccttgctgttcagcgccacggcgctggccgcgccgaagccgtgcgaggaactcaaggcggagatcgagaccaagatccagtcggccggggtgacctcctacaccctggagatcgtgcgcaacgacgaagtcagcgacccgaacatggtggtcggcagttgcgagaacggcaccaagaagatcatctaccagaagaacgacgactga

SEQ ID NO: 319152 - DNA, 426 bp, Pseudomonas aeruginosa
atgaagaagacggcatcggcggtctggcaaggcggcctgaaagacggcaagggcaccctttccaccgaaagcggcgcgctcaaggacaacccctatggcttcaatacccgcttcgagggcgcaccgggaaccaacccggaagagctgatcggcgcggcccacgccggctgcttcagcatggccctgtcgatgatgctcggtgaggccggcctgaccgccgaacgtatcgagacccgcgccgaggtcaccctcgacaagcagtccgacggtttcgccatcactgccgtgcacctggtgctcagggcgcgcgtgccgggggcggacgcgcagaccttcgagcagatcgccaacaaggccaaggccggttgcccggtatccaaggtgctcaacgcgaagatcagcctggacgccagcctcgacggctga

SEQ ID NO: 319153 - DNA, 705 bp, Pseudomonas aeruginosa
atgaacgacctcaccctgcattacctctacgatccgctctgcggctggtgctacggcgcctcgccgctgctcgccgccgcccgcgaggtgacgggtctggacgtacgcctgcatggcggcggcatgatgaccgatgccaaccgccagccggtcggcgccggcctgcgccactacgtgatgccccatgacctgcggatcgcccaactgaccggccagccgttcggcaaggactacttcgacggcctgctgcgcgacaccagcgcggtattcgactcggccccgccgaccgccgccgtgcttgccgccgaagcgctcgacggcctcggcgcggcgatgctggcgcggatccagcgtgcccactacgtcgagggccggcgtatcgccgagcgtccggtgttgctcgagctgggtgccgaactggggcttggcgagggcttcgccgaggcgttcgacgcctgcgccggcgagccgctgcgcgcgcacttcgccgacagtcggcggctgatgaaccgtctcggcgccgctggcttcccgaccttcgccctggagcgcgacggccgcctgcaggtgctcgacaccgggcgctacctcggccagccggacgactggcgggctctcctcgaaacgcagctgtgccttgccggcggcagcggtgccgtgggcggggccgcggcgccgctctgccgcatcgacggttgcgcctga

SEQ ID NO: 319154 - DNA, 888 bp, Pseudomonas aeruginosa
atgtcgcgccatggattgcttcgttccctgttcgccgccgccgccctgctgggtgccgccggcgtcttcgccgccagcgccgaaccgctgcggctggaggtctacaaccccggcgagaaggcgatcttcgccgtgtcctcggaactgctggtgggccagcgcgaggcgatgctgatcgacgcgcagttctcccgcgccgacgccgagcaactggtcaagcgtatccaggccagcggcaagaccctcagcactatctacatcagccacggcgacccggacttctacttcggcctcgacgtgctgaaggccgccttccccgaggcgaagatcctcgcgacggcgcagaccgttgcacacatccaggcgaccaaggacgccaagctggcctactgggggccgatcctcaaggacaacgcgccgacgtcgctggtggtgccggagccgctgaagggcgaccagttgaagctggaaggccatgccctgaaggtggtcgacctgaaggggccgagcccggaccgcacggtgctgtggattccgtcgctgaagacggtggtcggtggcgtgctggtggaatccggttcgcacgtctggaccgccgatacccagacccaggcctcgcgccaggcctgggtggcgatgctcgaccggatcgaggcgctgcaaccgcggcgcgtggtgcccggccatttcaccggcgaggagccgaagggcctggacggcgtgcgcttcacccgtgactacctgaaggccctggaagccgaactgcccaaggccagggattccgccgcgctggtcgaggcgatgaagcgccgctacccgaacctgccgggcgaggaaggcctggagctgagcgccaaggtgctcaagggcgagatgcagtggccctga

SEQ ID NO: 319155 - DNA, 921 bp, Pseudomonas aeruginosa
atggaccgcctgaccgccacccgcgtcttcgtcgaagtcatcgacagcggcagccagaccgccgccgccgagcgtctggacatgtcccgggcgatggtctcgcgctacctcgccgagttggaggagtgggtcggcgcacgcctgctgcaccgcagcacccgccgcctgagcctgaccgacgccggcgcggagctgttgccacagtgccgcgagatgctcgccgtggccgacgccatgcaggccaccggccagacccgccgcgacagcccgcgcggcactctgcgcatcaccagcagcctgtccttcgcccaggcctggctgacccgtgccgccgccgccttcgtcgagcgctacccgggcaccgccatcgacctgcaggtcaacagccaggtggtcaacctggtggaggagcgcatcgacctggccctgcgcatcgccaaccagctcgaccccaacctgatcgcccgccgcctcggcgaatgccgctcggtgatctgcgccgcgccggactacctgcgccgccacggcaccccgcggcgcccggaggacctggcgctgcacaactgcctgacctactcctacttcggccgcagtctctggcagttcgagcgcgacggcgagccgaccagcgtgccggtgggtggcagtctcagcgccaacgaatccaccgtgctgctggaggccgccgccgccggtgccgggatcagccagcagccgctgtactcggcagccccgctgatccgtagcggacgcctggtggcgctgctgccggagtggtcgccgcaggtgctcggcatccacgcggtgtacgcctcgcgccggcagatgccgccggcgctgcgggcgctgctggacttcctggtcgaacggatggcggccgatccgcactgggacgaggcgggccccctggcgctggcgtga

SEQ ID NO: 319156 - DNA, 507 bp, Pseudomonas aeruginosa
atgtccctgtcgatctaccaggcttcgatcccgaccttcctgcgcaccctcggcaacctctcggcgatcctgaagaaagccgccgcccacgccgaagcgaagaacatcgatccgcgcatcttcatcgacgcccggctggcgccggacatgttccccctggcgcgccaggtgcagatcgccagcgacgccgccaagggcgccggcgcgcggctggccgggctggaagtgccgagctacgcggatacggaaaccaccttcgacgaactccaggcacgcatcgctcgcaccgtcgagttcctcgagggcatccgcgaggaacaactggacggcgccgaagagcgcaacgtgaccctcaaggtgcgcggccaggagatcagcttcaacggccgcgacttcctcttcggcttcgccctgcccaacttcttcttccacgtcaccaccgcctacgccatcctccgccacaacggcgtcgaactgggcaagatggacttcctcggcggcgcctga

SEQ ID NO: 319157 - DNA, 549 bp, Pseudomonas aeruginosa
atggatcggaaaaccctcgacgacaccagcaagttcctcagctatgtccttcgccaccagcccgaggccatcggcctgacgctggacggcgaaggctgggccgacatcgacgccctgatcgccggcgcggcgcgggacggccgcgccctcgaccgcatgctgctcggcgcggtggtcgagaacaacgacaagaagcgcttcgccctctccgccgatggccagcgcatccgcgccgtgcaaggccactcgcatgccgcggtggccatcgcctacgcccccgcggtcccgcccgcagtgctctaccacggcaccgccagccgcttcctcgactccatccgcgagcgcggcctggttcccggcagccgccaccacgtccatctctccgcccgccgcgccaccgccctggaagtcggccgccgctacggcagcccggttctgctggaaatcgacgcgcgcgacatgcatctggccgggcacctattccaccaggcggagaacggcgtctggctgaccgagcgggtacccgtgcggttcatccgcgaggcttga

SEQ ID NO: 319158 - DNA, 429 bp, Pseudomonas aeruginosa
atggaccttcgccccagccacgtgcatgtgttcccacccagccgcgacctcccggccgcaaccagtccgcaccgcgaaaccctgctgcgcagcggctgcgcctggaacggctcgctctacctcggctatccccttggccagccgcagctcaccgtgcagcgcctgagcctggccgcccacgaacgcctggactggcaggtccatccgatgcccagcgcgctttacgtgctcaagggcgaactgcgcctggagacccgcgacggagcccagagcacgcgggtgctggaaggcgaggcggcgggttgcctgatgaacatcatccatcgcctgatagccggggccgaaccggtggaagccctgctgttccatgccggcgtggaaggcatgccggtggggctcggcgaacgcggcgaaatgcccgacgcctga

SEQ ID NO: 319159 - DNA, 1833 bp, Pseudomonas aeruginosa
atgtgcggtctcgcgggttgggtggattacacgcgcaagctcgacgacgaatttccggcgatcttcgccatgaccgatacgctcgccttgcgcgggccggatgccgagggcatctggaagcaccgcaacgccctgctgggtcaccggcggctggcggtcatcgacctcagcggcggcgtgcagccgatgtcctatcgctttcccaccggccaggaggtcaccctcgtctacaccggcgaggtgtacaaccacgatgccctgcgcgagcggttgcgccgggccggacatgagttccgcacccgcagcgataccgaggtggttctgcacgcctatctgcaatggggcgagcgttgttgcgagtacctgaccgggatgttcgccttcgccgtcttcgatggccgcgacggccacctgctgctggtgcgcgaccgcctgggcatcaagccgctgtattacgcgcggcaccgcgagggactgctgttcggctcggagatcaagtccatcctggcgcatccggaattcgccgccaggctcgacgcggtcggcctggtcgacctcctgacgctgtcccggggcacttcgcagacgccgttccgcgaggtccaggaactgctgcccggccacctgctgtcctggcgtcccaattcccaggcgaagttgcgccgctattgggaggtacgccgccaggagcatgccgacgacctgcagagcaccgtgcagcgcacccgcgaactggtcacccgcgccctgggggcgcaattgcacgccgacgttccggtgtgttcgctgctatcgggtgggctcgattcgaccgccctgaccggcatcgcccagcgcatcgcgaaggcggagcacggcggcgacatcaattcgttctcggtggacttcgtcggccaggccgagcagttccgcagcgacgacctgcgtcccgaccaggaccagccgttcgccctgctggccgcgcagtacatcggcagccgtcatcgcaccgtgctcatcgacaatgccgaactggtctgcgaacgagcgcgcgaagaggtattccgggccaaggacgtaccttccaccttcggcgacatggatacctcgctgcacctgatgttcggcgagatccgccggcattccacggtggccatctccggtgaaggcgccgatgagctgttcggtggctacggctggttccgcgatccgcaggcggtggctgcggcgcgcttcccctgggcctccagggtgcgcctgccggccggcttcatcgacgccggtttcaaccgccgctgcgatctcctccagtaccagcaggccagctacgacgatgggctgcgccaggtcgaacacctggccggcgacagcccggaggagcggcggatgcgcgagttcagccacctgcatctgaagcgctggatggtgctgctgctcgaacgcaaggatcgcctgagcatgtgcaacggcctggaggtgcgggtgccctacaccgaccatgagctggtggagtacgtctacaacgtgccctggtcgatcaagagccgggacggcgaggagaagtggctgctcaagcgggcctgcgccgactatgtcccggaagccgtgctcaagcgccgcaagagcccttatccgacttctgccaacctcggctacgagcgtttcctgcgcgggagcgtgcggcgcctgctggaggacgcggcgaacccggtgttcggcatcgtttcgcgagagttcctggccgccgaactggagcatccggaggggtacttcaacacccaggtgagccgccacaacctggagaccgcactggcgctggaaggctggctcaggttgtacgggctctccgcctga

SEQ ID NO: 319160 - DNA, 138 bp, Pseudomonas aeruginosa
atgaagaaagtactgttggctgtgttcctgctctgtggcttctctcttaccgcccaggccgcgtgcccggttttcggcccgtccgaggacccgtgcagcgggccggtgttcggtccgtcgacctgcgaatgcccttga

SEQ ID NO: 319161 - DNA, 141 bp, Pseudomonas aeruginosa
atgaaaaggaagatgctggcggcttcgctgctgctgtggatgttctcgctgacggcgcaggcggactgcgcggtgctcgggccgggggaagatccctgcgcgggcccggtgctgggaccgaccgtctgcgagtgcccgtga

SEQ ID NO: 319162 - DNA, 1632 bp, Pseudomonas aeruginosa
atgcgctacgccctggccgtctcggcagccctgctgcccggcgccggctgggccgccaacggcgacctcgccggcgcccgcaagccgcccagcgtcgcctgctcctggaaccgcgaggcagcgttgtcctacgaggagcgccggctcgacacgccgctgccgttcagcggcgccaacgtcgtcacccatgaccagacgccgctggccgagcgcatcgtcaagggcgccggcttcgacggcttcgaaccggccttcgccaagcgcctgtgcgccgccgacggccgcaccccggtcagcagctacgccaaggcactgaagctggtcaccgaagagggccgcgcgctgtggcgcgccgccgtcgaccgggcccaggggcgccgcgccattcccgccggcgcgctgccggccagcgatgaccgcatgctctactggacgcgcctctacatgacccgcaccctgcgccagtgggcgccatccttccacctcggcaaggcccaggcccaggcgctgcaatggcgcttcgaacgcgcctcgcgcggacagctggacatcgacctgccacgccgctacgccgccgacggctcgcgctaccggcggatgatcatcagcggcttcgacgtcttcaccctgggcactcccgggacggcgaacaccggcctgcgcaacggcaacccctcgggcgccaccgcccttgcgctggacggccgcgagttcaggctggccgacggcagcctgctgcgtatcgaggcctacctgttgccggtcagctacgacccgttcaaccgcggcatgcaggaagacaccctgggcccctggttccgccccggcccgcgccgggtcgacgcctccatcaccatcagccagggcggcgccaaccagttctggctggaggcctggaacggccgcttccacggctcctccgccggcaacgacggcatcgtctactgccccgccgacagcgctttgcccaactacgtgcttcccctgggcagcgtgaccaatcccggcaccgcgccgatttccctgcggggctccggctgcaatatcaacccgccgcgccgctggctcggctacgacagcgccagccgctggcggcagaacctgccggcacagttctccaaggcctcgctgccggtccgccagttgctcgccgccgatacctggcgcggcatcgagcggccgccgggcgctaccagccaggccgcggaaggcttcgacgtcacctggcacaccaactacgacttcttccccgattgcgccaacccgcgcaccgaaaacgtgccgaccaacggggtgatgaacgccatgcccgatccctccctggtgctcccgccgaaccgacggatctgcgcgcgcaacggcggtggcggcgactacctgtccaacgagagcgcctaccgcaacacggtgctgcgcgacgcgttccgcctggagattcccgccgggcacatccatgtcccggtgatgaacaactactacaccggcgtaccggcgagcggcggcggcgcgcgcaacgacaacgccatcagcgacgcccgctacgaggcctaccgcagcgccatcgtggcgcagacccgggcgctgctggtgggcgtcggcaacgccctggcgcagggggcgcaagcggactag

SEQ ID NO: 319163 - DNA, 384 bp, Pseudomonas aeruginosa
atgagcttcgcgcagaatctcctacgcctacgccagcagaacgccctgacccaacggcagatggccgagcgactgggcgtcaccgtgagccagttgcggcacttcgaaaccaagggcgggcacccgtcgctggtggtgctgcaaaccatcgccggacgtttcgcggtgcccctcgactggctggtctgcgagcgcagcgagcggcaggcactaccggaagacctgcgcctgcagttcgaggccatcggccgcctgcggctggacgagcggcgcgccatccgggcgttgctcgacgacctgatccgccagtacatggccaagcgcaacgcagcggccaagcccctcccggcggcttgcaccgaggccacggagacgtccccgtag

SEQ ID NO: 319164 - DNA, 666 bp, Pseudomonas aeruginosa
ttgaaactcgcccgactgtccggcctggtggccggtttcaccctgctggccctgctcggcggctgcgcgccgaccaagagcgtcgactactcggcgttcaagcaggccaagccgcgctcgatcctggtcctgccgccgctgaacgagtcgcccgacgtgaaggcgacctacagcatgctctcgcaggtcacctttccgctggccgaggccggctactacgtagtgccggtggcgctggccgacgagaccttccgccagaacggcctgaccagcgccggcgacgtgcaccaggtgtccccggccaagctgcgcgagatctatggcgccgacgcggcgctgtacgtcacggtgagcgactacggcacgcgctacatggtgatcagcagcgcgaccatcgtcaccgccagcgccaagctggtcgacctgcgatccggcaccaccctgtggaccggctcggcgaccgcctccagcgaggaaggcaacggcggcaacaacggcggcctggtgggcatgctgatcaccgcggcggtcaagcagatcatcaacagttcggtggaggacgccggttatccgatcgccgggatgaccagtgcgcgcctgctctcggccggccagccgggcggactgttgtacggcccgcgctcgccgaggtacggcagcgactga

SEQ ID NO: 319165 - DNA, 354 bp, Pseudomonas aeruginosa
atgagcaagacgatcacatggacggcggcgctgctggggagcatggcgctggccgggtgcagcggaccgaagacgctgtaccagtgggagggctaccaggcccaggtccacgaatacttcaagggtgaatccaaggaggcccaggcgcaggcgctggaagccgacctcgagaagatccgggcgaagaacggcgcggtaccgccgggctaccacgcccagctggggctgctctattccagcatcggcaaggacgaccagatggtccgcgagttcgagaccgagaaggcgctgtttcccgagtcggcgacctacatggacttcctcctgaacaacgcccgtggaggtgcccgttga

SEQ ID NO: 319166 - DNA, 687 bp, Pseudomonas aeruginosa
atgagtcacagcgccaagaaagcactactgccgctcctcgccgtcgccaccctggccggcctggcgggctgcgccaccgagacctccaccgcgttgccggtacagcaggtcgagagcgtcaaccgaccctacagcggcgtgcgttcgccgattgcggtaggcaagttcgacaaccgctccagctacatgcgcgggatcttttccgatggcgtcgaccgcctcggcggccaggccaagaccattctcatcacccacctgcagcagaccaatcgcttcaacgtgctggaccgcgacaacatgagcgagatccagcaggaagcggcgatcaagggccaggcccagcgcctgaagggtgccgactacgtggtgaccggcgatgtcaccgagttcggccgcaaggaagtcggcgaccgccagctgttcggcatccttggccgcggcaagtcgcagatcgcctacgccaaggtggcgctgaacatcgtcaacatctctacctcggaggtcgtctattcgacccagggcgctggcgagtacgccctgtccaaccgcgaggtgatcggcttcggcggcaccgccagctacgactcgaccctcaacggcaaggttctcgacctggccatgcgcgaggcggtgaacaagttggtcaacgcggtcgatagcggggcctggaagccacagaaccaataa

SEQ ID NO: 319167 - DNA, 1374 bp, Pseudomonas aeruginosa
atgcatattcaatcatctcagcagaacccgtctttcgtggctgagttgagccaggccgtggccgggcgcctgggacaggtcgaggcccgccaggtggccactccccgggaggcgcaacaactggcccagcgccaggaagcaccgaagggcgagggcctgctctcccgcctgggggccgccctcgcgcgtcccttcgtggcgatcatcgagtggctgggcaaactgctggggagccgtgcccacgcctccacccaggcgccgctctcccgtcaggacgcgccgcctgccgccagtctctcggccgccgagatcaagcagatgatgctgcaaaaggcactgcccctgaccttgggcggacttggcaaggcgagcgagctggcgactttgacagcggagaggctggcgaaggatcacacgcgcctggccagcggcgacggcgccctgcgctcgctggccaccgccctggtcgggattcgcgatggcagccggatcgaggcttcccgtacccaggctgcccgcctgctcgaacagagcgttggggggatcgcgctgcaacagtgggggaccgcgggcggtgccgccagccagcatgtactcagcgcaagcccggagcaactgcgcgaaatcgccgtccaactgcatgcggtaatggacaaggtcgccctgttgcgccacgcggtagagagcgaggtaaagggcgagcctgtcgacaaggcgctggcggatggcctggtggagcacttcgggctggaggcggagcagtacctcggcgaacacccggacgggccgtacagcgatgccgaggtgatggcgctcggtctttataccaacggcgagtaccagcacctgaatcgttccctgcgtcaggggcgagagctggatgcgggccaggcgttgatcgaccggggcatgtctgccgcgttcgaaaagagcggaccggctgaacaggtcgtgaagaccttccgcggcacccagggcagggatgccttcgaggcggtgaaagagggccaggtcggccacgacgccggctatctctccacctcccgggaccccagcgttgccaggagcttcgcgggccagggcacgataaccaccctgttcggcagatccgggatcgatgtcagcgagatatcgatcgagggcgatgagcaggagatcctctacgacaaggggaccgacatgcgcgtgcttctcagcgccaaggatgggcagggtgtgacccgtcgggtgctcgaagaggccacgctgggggaacggagcggccacggcgagggactgctcgatgccctggacctggcaaacgggacggatcgttcaggcaagccccaggaacaggacctgcgcctgagaatgcgcggcctcgacctggcctga

SEQ ID NO: 319168 - DNA, 132 bp, Pseudomonas aeruginosa
atggatatcggcggcagcgacgggctcttggtggacggcgcaccgccgtgcgggcgcctcggggtcgtctgctgctatggtgcgcacaggcacgtcgccatcctctctcccggcgaatggaatcgagcatga

SEQ ID NO: 319169 - DNA, 1254 bp, Pseudomonas aeruginosa
atgacgctttccctggatctgttgttgagcctgtgcacggccctggccatcggcctcctgatcggcgccgagcgcggctggcaggagcgcgaccacgaagatgcgcggcagatcgccggaatccgcaccttcagcctggccggcctgctcggcggcttcgccaccctgctcgcgggcgaactgggcagcgcagtctgggtagccttgctgctggccctcgcggcgctggccgtggccggctacgtgagcgatgtcaggcgtggcggcgaccagggcatgaccaccgagatcgccctgctgatgaccttcctcctcggcagcctcgccctcaccgaacagcgcctgctggctgccgccggcggcatcgtgctgaccctgctgctgagcctcaaggacaagctccacgccctgctgaagcgcctgaccgccgaggagctatcgggcaccctcaagctgctgttcatttccgtggtcctgctgccggtgctgcccaaccagggctatggtccctgggcgttcttcaatccctacctgacctggtggatggtggtgctgatcgccgccctcggtttctccgcctacctggccatccgcctgatcggctcgcgcaagggcctgttgctgaccgcggtgctcggcggcctggtgtcctccacggtgatgaccctgaccctggcgcgcctgcgcgagcgcatgcccgacgccctgttggcgtgcgccctgctggcgacctcggcgctgatgttcccgcgcatcctcgtcgagatcggcgcgatccacccggccttgctgaaggaactggccctgccattcgccgccaccaccctcgtctaccttggcggcacgctgttccacgccctgcgcggcggccgcgccagccaggaggcgcccgacgagccaggcctgcgcaaccccttcgaactgctcccggccatgcgtttcgccgccctgctgagcgcgatcctgctgttggtggaggtcggccggcggctgttcggcgacgccggcatctatgcggtcgcgttgctctccggcctcgccgacgtcgacgcgatcaccctgtccctggcccgcgcggcgcagggcgaactcgatccaggcgtggccagccgcggcatcgcccttgccgccctgagcaacagcctggtcaaggccggcctggtcgtgctggtgggcggcaagcggctggccctgcaaacgctgcccttcagcctggcggggctgctggtaggagcgctgctgatcctgttgtga

SEQ ID NO: 319170 - DNA, 396 bp, Pseudomonas aeruginosa
atgccggtactggctctgagactcaccgccctggcggcccttgtgatcagcgtgtcggggtgcgtcatggaggcctatggcagtcgcgcgcgtagcgatgcgcaatcctggatcggcttgccgatccaggacgtgatcaagcgcttcggcgagccggaacgcgtgacgggggatgccgccaggcagaaatacgtgtggaaggagtacgagaactatagccacgactacgactacacctactacgagcagggccatggcaatacgcccaacagctcggtcctgaaccagaagaccggcacggccaaccagagcggctattacacctgcatctacgagttctttgccgacgcctcgggcagggtggtcgatgcgaccgcgcggggtgagtgccgctag

SEQ ID NO: 319171 - DNA, 693 bp, Pseudomonas aeruginosa
atgcctaggcagaggcgagtggttttactgaactatccgctttacgtggtccagcgggaacacaatcggcaagtggtattcgccgaggacgaggactaccagcgttacctctccgatctacgggacctcaaggatgcctttggtatcaaggtctacgcattttgcctgatgaccaaccatgtccatctgctcttggcgcctggtgattcgctgtctggcttggcgcaactgatgaaaacgctggcggcgcgcacgacacgatatcggaatcgcttggagggccgttccggaacgttgtgggaaagtcgctataaatcgagtgtcgtacagagcgatgcctacctgctggcgtgttgccggtacatcgagctgaaccctgttcgggcgcggatggtggacgatgtggtggcctatccctggtcaagttatgggctgcgggcggattggttgaaggagccaaactggttggatatggatccctgcttcattgagctaggtcagacggccgaagagcgatatcggcgatacgtaacgttcgtgaaagaggcgataccggccgaggaattgaagctgattcgcgaggcggttcagcgtggacaactgacgggcaatcaacggttcgtggacgagatcgagcgggaagccggggtgagaatagagcggcgtgggcaagggcggccgagattagagtag

SEQ ID NO: 319172 - DNA, 10518 bp, Pseudomonas aeruginosa
atggacatccgcagcccgctgaaccagtgcatcgccctgtccctggccggcatcctgttcctcaacccgatcgtcgccgcggcggcggggctggcgctggacaaggccgccggcggcaacaccggcctgggccaggcgggcaacggcgtgcccgtcgtcaatatcgccacgcccaacggcgccgggctgtcgaacaaccatttccgcgactacaacgtcggcgccaacgggctgatcctcaacaacgccaccggcaagacccagggtacccagctcggcgggatcatcctcggcaaccccaacctcaagggccaggcggcgcaggtgatcctcaaccaggtcaccggcggcaaccgcagcaccctggccggctacaccgaggtggccgggcagtcggcgcgggtgatcgtcgccaacccgcacggcatcacctgccagggctgcggcttcatcaacacgccgcgcgcgaccctcaccaccggcaagccgatcatggacggccagcgcctggagcgcttccaggtggacggcggcgacatcgtcgtcgaaggcgccgaactgaacgtcggcaacctcgaacagttcgacctgatcacccgcagcgccaagctcaacgccaagctctacgcgaagaacctcaacatcgtcaccggccgcaacgacgtccaggccgacagcctgcaggccacgccgcgcgccgccgatggcagcgagaagccacaactggcgatcgacagctcggcgctgggcgggatgtacgccggggcgatccgcctggtcggcaccgagcagggcgtgggggtgcggctggccggcaacatggccgccagcggcggcgacatccgcatcgacgccagcggcaagctgagcctggcccaggcctccagccagggcgacctgaagatcgcggcccaggccgtggagctgaatggcaagacctacgccggcggcagcgccgagatccgcagcgcggaggaactggtcaaccggcagagcctggcggcgcgcgaacgcatcgcgctggaggcggcgcatatcgacaacgccggggtgatcgaagccggcgtcgagccagacgagcggcgcaacgcccgcggcgacctcgagctgcgcagcggcaccctgcgcaacgccggcagcctggtggccagccgcgcgctggaagcgaaggcgagccaggcgctggacaaccagggcggcagcctgaagggggcgaccgtccgggtcgacgccggacacctggacaaccgtggcggcaagctgctcgccgagggcgaactgcgggtcgaggcgagcagcctggacaaccgccaggacggcctgttgcagagccgggaccgcgccgtggtcaagacccgtggcgatctcgacaaccgtggcggccaggtgatcggcctgaacgacctggaggtcggcgcggcgacgctcgacaacggccagcaaggcctgctcggcagccagcagtccacccgcgtcagcgcccaggcgctggtcaaccggggggacggcgaagtctccggcaagcgcgtcgaggcccgcgtcggcagcctcgacaatcgcggcggcaagctgatcggcgacgacctgctggtggtcgccagcggtgccatcgacaaccgcctcggcttgttctccgcggccaaccgcctcgacctgcgggcgcgcagcctggacaacagcggcaagggcacgctgagcagccggggcggcctggaggtcagcctcggcggcctgctggacaaccgcgatgaaggcaacctgctcagccagggcgcgcagcgcgtgacggtggggcaactggacaaccgcgccggcggcctgctgtcgagccgcagcgagttgaacgtccacggcgccagcctggacaaccgtggcggcgtgctggtggccgacgccggcctgagcgccacgggaggcgccttcgacaaccgcgacggcggcagcgccagcggcaaggctggcgtgcgcgtggaggtcgccagcctgcgcaacgaccagggtggcaagctgctcagcgatggccgcctggacctcgcagcgaacgccgtcggcaacgccggagggcgtatcgccgccaagggcgacctgcaggcgacgcttggcagcctggcccagcaaggtggcgaactggtcagcgaaaagaccctgaaggtcgcggccgacacgctcgacaacagccagtccgggctgatcgccgcgaatggcggcatcgctatcgaggcgcggcaggtcgacaaccgcgccggcgagatttccagcacctcgaaggtcgccgtgaacgcccgcgagcaactggacaaccgcggcggcaaggtcatcggcgacagcggcctgcgcctcaccgtgcagcgcctgctgaaccaggccaagggggtgctggccgggcgcgacggcctgagcctggacggcggcgaactgttcaacggcgacggcggtcggctcgacagccagaacagcctgagcgtgagcctcggcggcgtgctggacaaccagggcggcgcgctggtcagcgaaggcagcctgacggcgcgcgccgcgcgcctggacaaccgtggcgggaccttctccagcgccggtgcgctggcgctgaccagccaggccgcgctggacaaccagggcggcaggctgctcagcgatgccggcgtgacgctgcagggcgccagcctcgacaacagccgttccggcgtgatcagcgccaagggtgcggtggatatccgcaccggcgtgctggacaacagccgcaacggcggcatcggcagcaacgccggcatcaccctggtggccgcccggctggacaacggccagcagggccgggtcagcgccaagggcctgctcgacgccaacctgaaaggcctcgaccagcgcggaggcggcgtcctggtcagcgaaaccggcgtcaccctcgacctcaatggcggcacgctagtcaaccgcgacggcggcctgatcgccacgcccggcgcgctgctgctgcgccagctcggcgcggtggacaacggcgccggcggggaaatctccagcgaccgcgccttcaccctcgccgccgccagcctggacaaccgcggcgggcgcctgatcggcgccgacagcctgaccctgcgcatcgcccaggccctggacaacagcctggccggggtgatctccggcaccgccggcctggacatcgcggccgctcgcctggacaacagcgccaagggcaccctggccagccgcgccggcatcgacctgcgcgtcgacggcgcgctggacaaccacgccgaaggcaccgtctccggcgcccgcctgacgctcgccagcgcctcgctggacaacagcggcaagggcctgctctctggcgacgccggcctgaccgtcgtcactggcgcgctggacaacgccgagggtggccaactgatcagccagggcgtgctggacgtcagcagcgccgacctcgacaaccgtggcggcgccctcagtggcaagcagtcgctgcgcctgagcgccgccaacctggacaaccgtggcggcctgctcaccagcgacggcgaactggaactgacggcagggcgcgtcgattccgccgacggcggcgaaatctccgcccggggcgacctgcgcctgacggtcgagcgcctggtgcaacgccagggccggctggtcggcgagcgcggcgtcagtctcgacctgcggggtggcgacctggataaccagggcggcctgatcagtgcccgcggcccgctgagcatcgagcggctgaacgtcctcgacaaccgccagggcggcgagatttccagccagcagggcttcgagctgctggccaggcgcatcgacaacggccagcaggggcgcatcatcagcgccgggaaactgcgcctggacgccgacgcgctgggcaacgccggcgccggcctgctctccggatggcagggcctgacggtgacaggcgggagcctggacaacagcgccggcggcaccctttcgagcaaggacggcgagctggccatcagcctcggcggcgcgctggacaaccacggccagggcgccctggtcagcaagggcgcgcaacggatcgacgccgccagcctggataacgcccagggcatcgtctccggcgaaagcgacgtgaccctgagcatcgccgggaagctggacaacggccagggcggcctggtctcggcgcagcgcgcgctgagcttcgagcgcgacgatacgctgctgaacaacgccggcggccggatcaacggcggcagcctgctgctcaagggcgccagcctggataacagcgacggccagttgatcagtcagggccggctcgacgccatcctcggcggcgccctggtcaacgccggcgcggcgcgcctggccagcggcggcgacctgctgctgcgcagcgccagcgtcgacaaccgcggcggcaagctggtcagccaggggctgctggagatcagcgccggtagcctcgacaacagcgcctccggcaccctcgccagccaggccggcatgagcctgcgcctgggcggcggcgccctgcgcaaccagcaggacggcctgatcttcagccaggccggcgccctcgaggtgcaggccggcagcctggacaaccgccagggcacgctccaggcccagggcgacaaccggctgcgtatcggcggcgcgctggacaaccagggcggccgcctggacagccgggccggtaacctcgacctgcagagcggcagcctcgacaacggcgccggcggcgtgctcaacagcgccaagggttggctgaagctggtcaccgggctgttcgacaacagcgccggcgtcacccaggcgcagtcgctggaaatccgcgccgggcaaggcgtgcgcaaccagcagggccatctctcggcgctgggcggcgacaaccgcatcgtcaccgccgacttcgacaaccagggcggcggcctctacgccagcggcctgctcagcctcgacggccagcgcttcctcaaccagggcgcggcggcgggtcagggcggcaaggtcggcgccgggcgcatcgacttcagcctggccggcgcgctggccaaccgcttcggccagttggaaagcgaaagcgagctgcacctgcgcgccgccgcgatcgacaacagcggcggcagcctgcgcgccctcggccgcagcggcagcacgcggctggtcgctggcggcctgaacaacgcctacggcgtgctggaaagcgccaaccaggacctcgacctgcaactgggcagcctggccaacgccggcgggcgcatcctccacaccggcaacggcaccttcggcctggattccgggcaggtgatccgcgccggcggcgaactgaccaccaatggcctgctggacatccgcgccagcgaatggaccaacagcagcgtgctgcaagccggacgcctgaacctggacatcggcaccttccgccagacggccgagggcaagctgctggcggtgcagtccttcactggccgcggcggcgactggagcaacgacggcctgctggccagcgacggcagcttgcgactcgagctgagcggcggctaccgtggcaacggccgcgccaccagcctcggcgacttcgccctgaacgccgccagcctcgacctcggcaacgccgccagcctcgccggcggcgccaatgtcacgctcggcgccggcaacctgctggtcaaccgtgggcggatcaccgccgccggcgacctcgtggccagcgccgcgagcctgaacaactacggcaccctgggcggcggcggcaacctgcgattgaacgcgcccgccctgctcaacgagcgcgggttgctgttcagtggcgccgacatgaccctgcgcgccggcgacatcaccaacctctacggggatgtgtacagcctcggcaggctggatatcgcccgcgacgatgccggcaaccgtgccgccagcctgcgcaacctttccggggtgatcgagagcggcaaggacttcagcctgcgtgccagcctgatcgagaaccgtcgcgccgtgctggaaagcaagtcgggcctgtacaccgcgaagatggagcagaccgcctgcatcgaaggcgtcaacgcgggcgactgcagcggcaagcgcaacgccatctggaccatcacccagcgcgacaagaccgaggtcaccgccagcagcgccatggggcaactgctggccggaggcgacttcgccatcgacggcggcaccctgaacaacctttccagcctgatcggcagcggcggcaacctcaccgccaacctcgaagtcctcgacaaccagggcctggaaaccggcgagctggaaaccatccgcgtgctgcgtaccgctcgcggcggcgatatcggcggcatcgatcagaagtcgcgcaacttcaccaacctctactggtaccagagcgccaatttcgacccggcgcgcgcgggcgagatccccgccgcgctcaacgcgatcctcagcgactggtccttcgagtacgaattcccgagcaaggggccgaccccgatcagcagtggcgaccagtcctacgcagcggtgatccaggccgccggcgacgtcacggtcaatgccagcacgcgcatcgacaacggcgtcacccgccccggctacaccttcgtcggcagcggccgccaggtgggcgacagcgcggtgggcggcagcggggtttcggtggtcgtgccgctgacctcgcaactgccgcccgacctggcgcggcgccaggtcaacccggtcaccctgcccggcttcagcctgccccagggcgacaacggcctgttccgtctcagctcgcgcttcgccgaggacggcaatggcagcgccgcgctcggtgccggcgccgaccgcacccagggcggcagcggcgtctcggtcggccagcagggcgccggcaacgtcgccggtacctggcagggccagggcgtgcgagtcgacggcctggctggcgcggccaacgtccagggtcagggcggcagcacgctcggcggtagcctgccgggcgtcgcccgggtccagggcgtgcccggcaacgccacgccgagcgccagccacaagtacctgatcgagaccaacccggcgctcaccgaactgaagcagttcctcaactcggactacctgctcagcggcctgggcatgaacccggacgatagcaagaagcgtctcggcgacggtctctacgagcagcggctgatccgcgacgcggtggtggcgcgcaccggccagcgctacatcgacgggctgagcagcgacgaggcgctgttccgctacctgatggacaacgccatcgcttacaaggacaagctccagctgcaactgggcgtgggtttgagcgcggagcagatggcggcgctgacccacgacatcgtgtggttggaagaggtcgaggtgaacggcgagaaggtcctcgcgccagtggtctacctggcccaggcggagggtcggctggcacccaacggtgcgctgatccagggccgcgacgtgaagctggtgagcggcggcgacctgcataacgtcggtaccctgcgcgcgcggaacgacctctcggcgacggccgacaacctcgacaacagcggcctgatcgaggccggcaagcgcctcgacctgctcgccggcgactcgatccgcaaccgccagggcggggtcatcgccgggcgtgacgtgagcctcaccgcgctgaccggcgacgtgatcaacgaacgcagcgtgacccgctacgacagcgcgctcgacggccgcacctgggagcgcagcttcgccgacagcgccgcgcgggtggaggcggcgaacagcctgaacgtccaggccggacgcgacatcgccaacctcggcggggtgctgcagagccgcggcgacctcagcctcgacgccggacgcgacgtcaccgtcgccgccgtcgaggaccgccagggccagacccgctggaacacgtcgcggctacagagcgtgacccagctcggcgccgaagtcagtgccgggcgggacctgaacgtcagcgccgggcgcgacctcagcgcagtggccagcgccctcgaagcgcgccgcgacatcgccctctccgccgggcgcgacgtgaccctggcggcggcggcgaacgaggagcatgcctacagcaagaccaggaaggtcacctaccaggaagacaaggttgcccagcaaggcacccgcgtggacgccggcggcgacctggcgatcaatgccggacaggacctgcgcctgatcgcgagccaggccagcgccggcgacgaggcctacctggtggccggcgacaagctggaactgctggccgccaacgacagcaactactacctgtacgacaagaagaagaaaggcgacttcggccgcaaggaaacccggcgcgacgaagtcaccgacgtcaaggcggtgggcagccagatcagcagcggcggcgacctcaccctgctcagcggcggcgaccagacctaccagggcgcgaagctggaatcgggcaacgacctggccatcgtcagcggcggcgcggtgaccttcgacgcggtgaaggacctgcaccaggagagccatgagaagagcaagggcgacctggcgtggcagtcgtcgaagggcaagggccagaccgacgaaaccgtgcgccagagccagatcgtggcccaggggaatctggcgatcaaggccgtggaagggctgaagatcgacctcaagcatatcgaccagaagaccgtgagccagaccatcgacgcgatggtgcaggcggatccgcaactggcgtggctgaaggaggccgagcagcgcggggatgtggactggcgcatggtgcaggaggtgcacgatagctggaagtacagtaactcgggcatggggccggcgacgcagatcgctgtcgccatcgcggcggcagccatcggtggcatggcggcagcgggagcgctcagtggtgcaggagtgggtgccagtagcttcgccatgggcgcaggagttggtgcggcaggaagcctgtcgggcacggcagcggtcagcctgatcaacaacaagggcgatctcgggaaggtgctgaaagacagcttcagtagtgacagtctgaagcagattgctattgcgagcctgaccggggggctgacggctgagtacttcgacgggattcttcagaccaagactgatccgcttactggaaaggtcacggtagacctcagcagcctatctggtgttggtcgcttcgctgccaatcaggcgatgcagaacgctacatccactgtactgagccaggccttgggccagggcgggagcctgaacgaggcgctgaagagcgcgctctacaacagtttcgcggcggcaggtttcaacttcgtcggcgatatcggccaggaatacagcctgaagccaggcgatccttcgatggtgaccatgcacgccctgatgggtggcctggcggcgcaggtcagcggtggcgatttcgccacgggcgccgcggcggctggcgccaatgaagcgctggtggccaagctagaccaggccttcaagagcttgagccctgagaaccgtgaagccatggtcactatggggtcgcaattggttggtgttctggctgcggcggtacgcgatcctgatgtgacaggcaaagctctggaaagcgctgcttgggtagcgaagaactcgacgcaatacaacttcctcaaccatcaggatgtggccgatctggataacgccttgcagaaatgcaagtcccagggaaattgccgtcaggtagaggaagagttcaaggcgcgtagcgacgagaaccggcggaggttgaatggctgcgtggctgcgggtaattgcgcggagattcgtgcggagatcgatgcggggtctacggctctcaacgagctggtggcccggcaggaaacagctaatccgggaggaagtgacagcgatatagcctacggtttcctgatgggccgaaacgtcgtcgactggacgacggctggtcagttgcacctggagcagaccgccaacctctggtggaacggcaatccacagtggcagaaggaagtcggtgcatacctggaccagacggggttcaatccgttcggaatcggcgttccggcaatgggcggtgccgctggcaaggtatcggccaaggcgctcatgaatgcgctgaaggcgggagagttgcccaaaggagaggtggccccaggaaaggctaatctgcctaccattggggcgttggcggatgctgaggcggggatgccttatacgcatccaataaaaacaccttcaaatgagactgctcgacttttagcttcatctcaagaaccttataaaggtgggcagtcaattacaaatgctggcagggccgttactaagcatcctgagtactttggattcagttcaacacaggaactacggaagatgtaccggacagactctcagattaatgagcttgctggaaaggcaataaatgaaatactccagagtggagtgaagagtagtggcgccgggggaagatatccgggaggctggataacttatacattaccagacggtcgggctgctagttggggtggggatggtaaatttattggatttagaggggtgcaaaaatga

SEQ ID NO: 319173 - DNA, 1689 bp, Pseudomonas aeruginosa
gtggctctccatcgcctggcctttatcttcctgtgcctgccgctcatggccagcgccgcccccttcacctcccccggtgaccgcgacctgatccgcgaccgccagcagcgcctgctggacgaacagcgcaagcgcctggaggaactccagcaactgcccggcaagggagcgcccgccgctgcggatgcctccggcgacgacgagcgctgcttcgagatccgccgcatcgagctggaaggcgccgggcacctcgacgaaagcgcgcgtcgccaactgctggcgccctaccaggggcgctgcctgggcgtcggccagttcaatgcgctgctcaaggctgtcaccgaccattacctggatcgcggctacgtcaccacccgtgcctacctgccacagcaggacctggcctccgggaccctgcgcatcatcgtcgtcgaaggccgcctggagggcctggacagctccgcgctggccagcccgcgcgaactggcgatgagctttccgggcaggaccggcgagctgctcgacctgcgcgagctggagcaactggtcgaccagttgagccgcctgccgtcgcgccaggtgcaactggagctggtgcccggcagcgaggtcggcggcagccgggtgcgtctcaagggcgagcgcgacaagccctggcgggtctccgccacgcgcaacaacgacggcgacgtcagcaccggcgagcagcagatgggcctgggcctggactgggacagcccgctgggcctggccgaccagctcaacctgcgcgccaaccgcgacgcggtgaccgaccgctggcgccattccgacagccagagcctgttctacagcctgccctggggctggtggaccttcacctacggctacagccagagcgactaccgcacgcgcaacgaggccagcggcttccccttcaagctcgatggcgacagccgcagccatcagttccgcgccgaacgcgtgctgcaccgcgacggcgtgagcaagaccgccatgagcctggggctcagccaccagcgcaccaacaactatgtcgaagacacccgcctggaagaccagagcacgcggatcaccgagacccagctcggcttcaaccacggccggcggatcggcagcggtttcgtcaacctcgacctcggctggcagcagggcatcggcgcccttggcgcgcagggtcgcggccacccgcacgcgggcgatccgcatgcgcgctacgacaagtacagcctgaccctcagctacctgcagccgttccagctatggggcgagcgcttcagcttcgacagcctggccaccgggcagaggagcgaggacgtgctgttcagcccgcagcgcatcagcctcggcggcaacagctcggtgcgcggcttcaaggaccagaccctgaccggcgacagcggcggctactggcgcaaccagttgcgctggcggcgcgcggtggagtgggcgccgctgcggccctggctgcaggaatacggcgtggccttcgcctacgacgtcggcgtgatccgccacgaccgctacaacgacggcgccagcgggcgcatgagcggcaacgccatcgaactggatgcccgcggccgctatttcgccgccagcgtcggcttcgcccgctcgctggagcggcccagcgccatcgagcggcgcgagcacccgatctatttccgggtcgacgcgttcttctga

SEQ ID NO: 319174 - DNA, 222 bp, Pseudomonas aeruginosa
atgaagaagttgatgttggcagtcggcctgtttgccgtggcgggcagcgcattcgccgccaagccctgtgaggaactgaaagccgagatcgatgcgaagatcaaggccaacggcgttcctgcctacaccctggaaatcgtcgacaagggcagcgtcaccgacaagaaggtagtcggcacctgcgacggcggcaccaaggaaatcgtctaccagcgcggctga

SEQ ID NO: 319175 - DNA, 216 bp, Pseudomonas aeruginosa
atgtccaatcaccacacctacaagaagatcgaactggtcggctcgtccaagaccagcatcgaggacgccatcaacaacgccctcgccgaagcggcgaagagcatccagcatctggaatggttcgaggtggtggatacccgcgggcacatcgagaacggcgccgtcggccattaccaggtgaccctgaaagtagggttccgtatcgccaatagctga

SEQ ID NO: 319176 - DNA, 888 bp, Pseudomonas aeruginosa
atgagccgcgacctcccttccctgaatgccctgcgcgctttcgaagccgctgcccggttgcacagcatcagcctggcggccgaggaactgcacgttacccatggcgccgtgagccggcaggtgcggttgctcgaggacgatctcggggtggccctgttcggcaaggatggacgcggcgtaaaactcaccgattccggcgttcgcctgcgtgacgcctgcggcgatgcgttcgagcgactgcgtggcgtctgtgccgagctgcgccggcagaccgccgaggccccgttcgtcctcggcgtacccggcagcctgctggcgcgctggttcatcccgcggctggaccagctcaaccgtgccctccccgacctgcgcctgcaactgtccaccagcgagggcgagttcgatccgcgtcgtcccggcctggacgccatgctctggttcgccgagccgccctggccggcggacatgcaggtcttcgaactggcgcccgagcgcatgggtccggtggtcagcccgcgcctggcgcaggaaaccggcctggcccaggcgcccgccgcgcggctgttgcaggagccgctgctgcataccgcctcgcgaccccaggcctggccggcctgggccgcgagccaggggctggcggcggaggcgctgcgctatggccaggggttcgagcatctctactacctgctggaagcggcggtggcgggcctcggcgtggccatcgccccggaggcgctggtccgcgacgatctcgccgcaggccgcctggcggcgccctggggcttcatcgagaccgatgcgcgcctggccctgtgggtaccggcgcgcctgcacgatccgcgtgccgggcgcctggcgcaatggttgcgggagcagttggcaggctga

SEQ ID NO: 319177 - DNA, 1209 bp, Pseudomonas aeruginosa
atgacttcctatcgcaacggccccgacgccaagggcctgttcggccgcttcggcggccagtacgtcgccgagaccctgatgccgctgatcctcgacctcgcccgcgagtacgagaaggccaaggacgacccggcgttccaggaggaactggcctacttccagcgcgactacgtcggtcggccgagcccgctgtacttcgccgagcgcctgaccgagcactgcggcggggcgaagatctacctcaagcgcgaggagctgaaccataccggcgcgcacaagatcaacaactgcatcggccagatcctcctggcccggcgcatgggcaagaaacgcatcatcgccgagaccggcgccggcatgcacggcgtggccaccgccactgtcgccgcgcgtttcggcctgcagtgcgtgatctacatgggcaccaccgacatcgaccggcagcaggccaacgtcttccgcatgaagctgctgggcgccgaggtgatcccggtgaccgccggcaccggtaccctgaaggacgccatgaacgaggcgctgcgcgattgggtgaccaacgtcgatagcaccttctacctgatcggcacggtcgccggcccgcatccgtacccggcgatggtccgcgacttccaggcggtgatcggcaaggaaacccgcgagcaactggccgagaaggaagggcgcctacccgattcgctggtcgcctgcatcggcggcggctccaacgccatgggcctgttccacccgttcctcgacgacgccggggtgcagatcgtcggcgtggaagccgccggccacggcatcgacaccggcaagcacgcggccagcctgaacggcggggttcccggcgtgctgcacggcaaccgcaccttcctgctgcaggacgcggatggccagatcatcgacgcacactccatctccgccggcctcgactatcccggcatcggcccggaacacgcctggctgcacgacaccggccgcgtcgagtacacctcgatcaccgacgacgaagccctggaggccttccacacctgctgccgcctcgaaggcatcatcccggcactggaaagctcccatgccctggccgaggtcttcaagcgtgcgcccagcctgcccaaggagcacatcatggtggtgaacctgtccggtcgcggcgacaaggacatgcagaccgtcatgcaccacatgcaacaggagtcgaaagcatga

SEQ ID NO: 319178 - DNA, 807 bp, Pseudomonas aeruginosa
atgagccgcctgcagacccgcttcgcccagctcaagcaggaaaaccgcgccgccctggtgaccttcgtcaccgccggcgacccggactacgcgtcttccctggaaatcctcaaaggcctgccggcggccggagccgacgtgatcgaactgggcatgccgttcaccgatccgatggcggacggcccggccatccagttggccaacatccgcgccctggacggcggccagaccctggccaggacgttgcagatggtccgcgaattccgcagcggcgacagcgagacgcccctggtgctgatgggctacttcaacccgatccaccactacggcgtcgaacgcttcatcgccgaggcgaaggaggtgggagtggacggcctgatcgtggtcgacctgccgccggagcacaacgaagacctctgccacccggcccaggccgccggcctcgacttcatccgcctgaccaccccgaccaccggcgaccagcgcctgccgacggtgctagaaggcagttccgggttcgtctactacgtgtcggtggccggcgtcaccggcgccaacgcggcgaccctggaacacgtcgaggaagcggtggcgcgcctgcgccggcataccgacctgccgatcggtatcggcttcggcatccgcagcgccgaacacgccgccgcggtcgcgcggttggccgacggcgtggtggtcggctcggcgctgatcgaccggatcgccaaggcccgcgacaatgcccaggcggtcaaggatgtcctcgccctgtgcggcgagctggccgaaggcgtgcgcaacgcacgctga

SEQ ID NO: 319179 - DNA, 624 bp, Pseudomonas aeruginosa
atgagtaaggtgctgatcgtcgatgatcatcccgctatccgcctggccgtgcgcttgctgttcgagcgcgacggtttcaccatcgtcggcgaggccgacaacggtgccgaagccctgcaggtagcccgcaagaagtctcccgacctggccatcctggacatcggcatccccaagatcgacggtctcgaagtgatagcccgcctgaagtccctgaagctggacaccaaggtcctggtcctgacccggcagaatccggcgcagttcgccccgcgctgcctgcaggccggcgccatgggcttcgtcagcaaaagggaaaacctctccgagctgctgctcgccgccaaggccgtgctggccggctacatccacttccccaccggggcgttgcgcagcatcaaccagcagagccgcgacaacgaggcccgcatgctggaaagcctttccgaccgcgagatgaccgtgctgcagtacctggccaacggcaataccaacaaggccatcgcccagcagctgttcctcagcgagaaaaccgtgagcacctacaagtcacgcatcatgctgaaactcaacgcccattccctggccggcctgatcgatttcgcccgccgccacgagctgatctga

SEQ ID NO: 319180 - DNA, 366 bp, Pseudomonas aeruginosa
atgcgaacgttcgacctgaccgccgccctgggcgaccgcgccaaccaaccggagatcagccgcctgctcgtcgcgcagctgatgaccagcaacaacgaagacacccgcaagctgcggcgcgcccaggagcgcgagcagacccaggaactcaacgagctggcgcaccgcctggcgggcatggcctcgctgatccacgcccacgccgtggaacgcgcctgccaccaactggagatcgcctgcggcgaaagctccgtgcgcaagctcgccgatgccgtcgacgacctggtgacggcactgggcgagctgcaatgcgaactgcacgactggatgacgatgaccgcgcctcaaggcacggcgaagtcatag

SEQ ID NO: 319181 - DNA, 378 bp, Pseudomonas aeruginosa
atgaacgagtattccaccccccgcatccagggcttccatgctcacgtctatttcgatgcgcagagcatcgagcgagcccgcgccctttgcgaagaggcggcgcggcgctttccgctgaagatggggcgggtccatgagcggccggtagggccgcatccggactggagctgccagctggcgttcgctcccgaggtgttcggcgagctggtgccctggctggctatccatcggcaggacctggtggtgttcatccacccggtcaccggcaacgatctgctcgaccatcgcgaccgagccatctggatgggagccattcgcccgctggacctgtcgatcctggacgaaggcccgcaacgctatgacttcgccgtgccttga

SEQ ID NO: 319182 - DNA, 900 bp, Pseudomonas aeruginosa
atgccgctgtccctcgacctgctccgggtattcgagtccgccgcccgccagctcagcttcaccgctgccgccgaggagctggggaccacccagcctgcggtcagccagcagatcaaacgcctggagaaggagctggcgacccctctgttccagcgcgttcatcgaggcatcgtgctcaccgacgccggccagctcctgctccgccacgtggccgccggcctcgagacgatcgatgccggcatcgccgcgctgggcgcgcgccagcgccacgaggtgctccaggtggccaccgactacgccttcgctgcctactggctgatgccgcgccttccgcgcttccaccaggcccatccgcacctggacgtgagcctggtgaccagcgagcgcggcctggccggccagcgcggcgatatcgacgtggcgatcctgttcggcgacggtcgttccaagcacggcgaagcgcaccggctgtttcgcgaggaggtgttcccggtctgtagcccgcgcctggtcgagggattgcagttgccgctggccaaggcgcacctggcgcgcctgccgatgctgcatctgaagccggcgcagcacgcccgctggttcgactggccggcgttgttcgaagcgttggccatcgatcggcagccgattccggcggtgctcagcttcgacaactacaccttgctgatccaggcggccatcgccggccagggcgtggccatcggctggcgccacctggtcgacggcctgctcgaacaggggctgctttgccggcccattggcgagagctgcctgtcgcgatacgggtactatgcggtattgccggagcgcaagcggcgccagcggctggtcgacggtttcgtcgactggctacaggccgagttgcaggccggcggcgcttga

SEQ ID NO: 319183 - DNA, 1512 bp, Pseudomonas aeruginosa
atgaagacctcgccgaacatcctgttcatcatggccgaccagatggccgcgccgctgctgccgcttcacgatccgcgctcggcgctgcgcatgcctcacctctcgcgcctcgccgaacgggccgtggtgttcgactcggcatactgcaacagcccgctctgcgcgccgtcgcgcttcaccctggtcagcggtcgcttgcctacccgcatcggcgcctgggacaacgccgccgacttcgccgccgatacccccacctacgcccactacctgcgcaagctcggctatcgcacggcgctgtcgggcaagatgcacttctgcggtcccgaccagttgcacggctacgaggaacgcctgaccagcgacatctatccggcggactatggctgggcggtgaactgggacgagccggaggtgcgcccgagctggtaccacaacatgtcctcggttttgcaggccggtccctgcgtgcgcaccaaccagctggacttcgacgaggaggtggtgttcaaggcccgccagtacctctacgaccatgttcgccagcacgccggccagccattctgcctgaccgtgtcgatgacccatccgcacgacccctacagcatcccggcgagctactggaatctctaccgcgacgaggacatcccgctgccgcgccagcgcttcgcccaggaggagcaggaccctcattcgcaacgcctgctgaaggtcatcgacctgtgggacaagccgttgcccgaggagcgcatccgcgccgcccggcgtgcctacttcggcgcctgcagctacgtcgacgcgcagatcggtgcgctgctggcgaccctggaggaatgcgggctggccgacgacaccatcgtggtgttctccggcgaccatggcgacatgctcggcgagcgcggcctctggtacaagatgcactggttcgagatggccgcgcgcgtgccgctgctggtccatgcgccggcgcgcttcgcgccgcgccgcatcggcgcttcggtatccaccgtggacctgctgccgaccctggtggagctggccggcggccaggtcgatccacgcctgccgctggaaggccgctcgctgctgccgcacctgcgcgacggcagcgggcatgacgaggtgatcggcgaatacaccgccgagggcaccctcagcccgctgatgatgatccgccgcggcgactacaagttcatctactccgagcaggacccctgcctgctctacgacctgcgcaacgacccgcaggagcgcgagaacctcgccgccagtccggcccatcgcggaacgttcgaggcgttcctcgacgaggcccggcgacgctgggacatccccgcgatcacccgcgccgtactcgacagccagcgccgccgacgcctggtggccgccgcgctggcgcgaggacggctggccggctgggaccaccagccgtgggtcgatgccagccagcagtacatgcgcaaccatatcgacctggacgatctcgagcgccgcgcgcgcttcccgcaaccctga

SEQ ID NO: 319184 - DNA, 924 bp, Pseudomonas aeruginosa
atgaaccggcttcccacctgcctgctggccgccaccctgttcctgggcagcgcctcgctatacgccgaagaccccgcctgtgcccgcgtcaggctggccgatccaggctggagcgatatcgcggtgaccaacgccaccgccgcgtttctcctggaaagcctcggctaccaggtgaagatcgataccctgtcggtgccgatcatctatggcggcctgcgcgacggccaggtggacgccttcctcggcggctggatgcccgcgcaccaggactatcacgacaagttcgtcgccagcggccaggtcgaacgcctcggtcgcaacctcgacggcacccgcttcaccctggcggtgccgcgctacgtctgggacgccggcgtacaccgcttcgaggacctcgccgcgcaagggcaacgcttcaaccgcaagctgtacgggatcggctccggcgcgccggccaatcagtcgatccagaagatgatcgacgccaaccagttcggcctcggcgactggaagctggtggagtccagcgagcaggcgatgctcgccgaactcggccgggccgagaagcgccagcgctggctggtgttcctcggctggacgccgcacccgatgaacatccgccatgacctgcgctacctggaaggcggcgagcagtacttcggcgaccgcggccaggtctacaccctggcacgcaagggctacgccgcgcagtgcccgaacccggcgcggctgctggccaacctgcgcttcgacctggacatggagaaccgcctgatgagcgacgcgctggaaggcacggcgactccggcctcggcgacccgcgcctggctcaaggccaacccgcgggtgctcgaggcctggctgcaaggggtgaccagccgcgacggcggcgacgccctggccgcggttcgcggccagccatag

SEQ ID NO: 319185 - DNA, 1554 bp, Pseudomonas aeruginosa
atgtggacgcgcttgctgccgttcctcgcctggctaccggggctgcaccggggcatgctcgggcgcgaggcctgggtcggcctgaatggcgcaatcctggcactgccgcaatcgatggcctatgcgctgatcgccggcctgccagcggagtacggcctgtacgcggcgatgctgccagtggcgatcgcctgcctgtggggctcgtcgcgctacctggtgagcggtcccaccgcggcgatctcggtgctgctgttcagttcggtggccccgctggcgccgctgggcagcccgcaatacgtccaggccgtgctgctgctgacctttctcgctggcgccttccagtggctgctcggcgtcctgcgcgtcgggtcgctggtcaatttcgtctcgcattcggtgatgctcggcttcacccttggcgcggcgctgctgatcgtcctcggccaactgccctatcttctcggcctggccgcgagcggggagggcgcagcgccgggaaacggctggcggctgctggcgcggttcgccgagttcgatggcccatcgctgctggtgggcggcttcagcttcgcgctcagcctgctggtcaggcgcctgcgaccgcgctggccggccctgctgcttggcttgctgggcggtgccacgctggtctgggcgctacccgggaccttcgcctcggtagcccatgtgcaggccttatcgagcgcactgccgggctggaatccgctggtcttcgattcccgatcgatcctcgacctgctacctgcggcggtggcctgcggcatgctcgggctggtcaccagcctatcgatcgcccgcgccctggccgcgcgccagggagacgcgttcgatgccaaccaggaggtccgcgcccagggcctgtcgaacctgctcgggccttggctgtcggcgagcctgtcggcgggctccttcacccgctccgggctgaatctggaagccggtgcgcgctccccgctggcgggtgcgttttcggcgctctgggtggcactgctggccgtgctcggtgcgcgcctgatcgagcatgtgccgttgccggcgatggccgcaggcatcctgctgatcgcctggggcctgatcgaccgcccagcgctccgcgcgctctaccgcagcggccgcgccgaatgcctggtggccggcctaaccgccctggccacgctgctgttgccgctgcagaacgccatctacgcgggagtgctggcgtcgctggtcttctacctgcggcgcacctcgacaccacgcgtactgcgccagcacaacgacgaggaagaagtgctgcgcatcgaaggctcgatcttcttcggcgcctgcgactacctgcaacgcctcatgcgccaatgcgacaggccacggctggtgctggacgcccgccaggtgaacttcatcgacttcgccggcgcagtgctgttgcagcaggaagcccgccgcctgcacgccgagggccgccgcctggtattgcgccacgcccgcccgcaggtccgcgaagcgctgggccggcaggccgacgaaggctgccgcctgcactacgaaggctga

SEQ ID NO: 319186 - DNA, 348 bp, Pseudomonas aeruginosa
atgcagatgctgcgcgacgagggcgacccgcgcagcccgccgctcggcggcctgcaaccacgccagggcgcgacggcgcaggagctggccgatccgaagcagtaccaggccttcgaggaacgacagacccgcgaactggtacaggcctacaccagcggcgtacagcagataccggaaatccgcgcgcggatcgaggcggccgaacagggtggcgagcgcagcgccgaggaaatcgacgaggctcgcgccgcccttggacagttggagatgatgcgcgacaagctgcagcgggaatcgccgcaactgctgcccggcgacagcgcaccgacatcgccggcggcgccctga

SEQ ID NO: 319187 - DNA, 1287 bp, Pseudomonas aeruginosa
atgcaccgactgctctctgatcgcgcccggggctggcgtcgcgcactgtgcgggatcgtcctcgggctgctggcgtggagcgcccatggcgtccccgccaaggcgccgcaggatctgcggatcgacggcgaggtgctgccggggagaagcatcgacttgctcgagcaggccctgtcgcgggtcaagttcaacaccgacccgcagcagttgcgccgtggcctggtggaaaaccgcctgctggcgcgcgcggtggaagaccagctcaccgcgcagagccgcgccgatctcgacgccagcgtggagatcgaggccggcaacctgctcgaacaggtatacggcaggcgctaccgcgaggacctcgggccatacctgcgccagccccgggccctgagcgcggagcgtttgcgcgaggtgctggcgccgaggagccgcggcctggtggaaaacagcctgctgctggacgagacgcagcgccgcgaggcggccggggtcgagctgatcggctggcagtttcccggccagccggcacaggtcctcgacctgctatcgctgtacgaaggcgacaacgtccagggccaggtggaattgcaacagggcaacctcgcttacctggcgcgccaggtccagacccgcatccgccgcgactacctctggtaccgcctggcccgggacggcttcggcccggcagagcggcagggcgtgaggaccctggtgcgggacaagctggtgcgccatcgctatctgcaccagatcggcctctacagtgatttccaccatgagtccgatgcgctgcgggaactcgccggcaaggtcagcgacaaggacgccgaggcctactatcggcgcaacctggagcgttaccgcaacgtcgcgcaggtgcaggcggcgcatatccacctggccgaccaggcgagcgcggacaaggtctacgccgagttgcgcggcggcctggccttcgacgaggcggtacgccgctattccctggccgacgacagggaccgcgacccgcccggcgacctaggcctgatacggccccaggacggccggctcgacctgctgcgcaagactgcgctgatccagaaggccgatacggtttcccagccgatgcgcatcgacggcgcgttcgagatcgtccgggtgcgtagccgcaaggatcgccagttgcccctcgacgaccgcagcgtgcgcttcgaggtgaaccaggcggtggcgcgcgagcaactggcagcgcagttcgagacgcgcctgcgcaacctgctggccggcgccagggtggaaggcctgtga

SEQ ID NO: 319188 - DNA, 987 bp, Pseudomonas aeruginosa
atgaaaaccttcgcccgcctggccgccggtctctgcatctgcgccatcgccagccaggccaacgcctggtcgcaaccgacccacaagaacatcgtcaaggatgccctggccttcatgaactcctcctacgccaccgaggagatgcgccaggcctaccggttctacgtgagcgccgccggcagcgaggcgcaggccggggagatcctcggccaggcggccttcgacgtggacgacttcaaggacacccgtctcggtggctggtgggtcggctacgaacacgcgccgctgtggggcgcggcttcgggcatcgtcaactacacctcgtactggcacttcctcaacctggcccgggacggcgactcccatggcaacccccacggcggctacgactaccgctaccacaaggtcgacggcggcatcgccgacgtcgactggtacgccatggtctacctctacaaccgcgagctgaagcgcgaggacttcgacaccaccgaggcgcactaccgccagggcacccgctcggactggcaggagcactacggcgacttccagaccgccgccttccagccgatcgataacctcgccacctactggttcgagcagttccgcgccgcgccttcgctgcagaccatcggctatgccctgcatgccaccggcgacgtggcccagccgcaccatgtgtggatcacctcggccaacggccattccagctgggaaggctgggtcgacgaccactacgccagcgagaagctcaacgacccggcggcggtggccaacctggtggggcgctacgacccgagcaagagcatccgcgacctgctcacccagaccggccaggtcgcctacgcgcgccccgagccgctctacgacaccagctacgagacgcgcctgcgggtggcgaaggagctgattcccgagtccatcgccctgaccgtcaccgtactgaccaagggcgccaacagcttcgatgcaccgactgctctctga

SEQ ID NO: 319189 - DNA, 825 bp, Pseudomonas aeruginosa
atggaccgctattgcgtattcggcaaccccatcggccacagcaagtcgccgctgatccaccgcctgttcgccgagcagaccggcgaggcgctggtctatgacgcgcaactggcgccgctggacgatttccccgggttcgcccggcgcttcttcgagcagggcaagggcgccaatgtcaccgtgccgttcaaggaagaggcctatcgtctggtggacgagttgagcgagcgggccacccgggccggggcggtgaacaccctgatccgcctcgccgacggtcgcctgcgcggcgacaacaccgacggcgccggcctgctgcgggacctgacggcgaacgccggggtcgagctgcgcggcaagcgggttctcctgctcggcgccggcggtgcggtgcgtggggtgctcgaacccttcctcggcgagtgcccggcggagttgctgatcgccaaccgcacggcgcggaaggccgtggacctggccgagcggttcgccgacctcggcgcggtgcacggctgcggtttcgccgaggtcgaagggcctttcgacctgatcgtcaacggcacctcggccagtcttgccggcgacgtgccgccgctggcgcagagcgtgatcgagcccggccgtaccgtctgctacgacatgatgtatgccaaggaaccgactgccttcaaccgctgggccgccgaacgcggtgcggcgcgtaccctggatggcctgggcatgctggtggagcaggccgccgaggcattcttcctctggcgcggcgtgcgtcctgcctcggcgccagtgttggagacgctgcgccgacagttggcaactgtctga

SEQ ID NO: 319190 - DNA, 918 bp, Pseudomonas aeruginosa
gtgaccgaccgtatcgccgctgtcaaaacctacctgctcgacctgcaagaccgcatctgcgccgccctcgaggcggaggacggcaaggcccgcttcgccgaggacgcctgggagcgtccggccggtggcggcggacggacgcgggtaatcggcgacggcgcattgatcgagaagggcggggtgaatttttcccacgtcttcggcgatagcctgccgccctcggccagcgcccatcggccggaactggccgggcgcggtttccaggcgctcggcgtgtcgctggtgatccatccggaaaacccccacgtgccgacttcccatgccaacgtgcgtttcttctgcgccgagaaggaaggcgaggagccggtctggtggttcggcggcggcttcgatctgaccccctactacgcccacgaggaagactgcgtgcattggcaccgggtcgctcgcgacgcctgcgcgccgttcggcgcggacgtctacccgcgctacaaggaatggtgcgaccgctacttccacctcaagcaccgcaacgagccgcgcggcatcggcggcctgttcttcgacgacctcaaccagtgggacttcgacacctgcttcgccttcatccgcgccatcggcgatgcctatatcgacgcctacctgccgatcgtccagcgccgcaagcacacgccgttcgatgaacggcagcgagagttccaggcctatcgtcgcggtcgctatgtggagttcaacctggtcttcgatcgtggcaccctgttcggcctgcagtccggcggccgtaccgaatcgatcctgatgtcgttgccgccgcaggtgcgctggggctatgactggaaacccgagccgggcagcgaggaagcgcgcctgaccgagtatttcctcgccgaccgcgattggctcgccggccagccctga

SEQ ID NO: 319191 - DNA, 978 bp, Pseudomonas aeruginosa
atggccaagcgcatccagttcgctgcctacggcggccccgaagtcctcgaataccgcgactaccaacccgccgagccgggcccccgggaagtccgcgtgcgcaatcgcgccatcggcctgaacttcatcgacacctactaccgtagcggcctctatccagcccccggcttcccttcggggctgggtagcgaaggggccggcgaggtcgaggcggtgggcagcgaagtgacccgtttcaaggtcggcgaccgcgtcgcctacgccaccggcccgctgggcgcctacagcgaactgcatgtgctggcggaggagaagctggtccacctgcccgacggcatcgacttcgaacaggccgccgcggtgatgctcaaggggctcaccacccaatacctgctgcgccagacctacgaactgcggggcggcgaaaccattctcttccatgccgccgcgggcggcgtgggcctgttcgcctgccaatgggccaaggcccttggagtgcaactgatcggcaccgtcagctcgccggaaaaggcgcgcctggccaggcagcacggtgcctgggagaccatcgactacagccacgagaacgtggcgcggcgggtgctcgaactgaccgacgggaagaagtgcccggtggtctacgactcggtgggcaaggatacctgggaaacctcgctggactgcgtggcgccgcgcggcttgctggtcagcttcggcaacgcctcggggccggtgaccggggtcaacctgggcatcctctcgcagaagggttcgctgtacgtgacccggccgaccctgggcagctacgccgataccccggaaaaactccaggcgatggccgacgagctgttcggcctgatcgagcgcggcgacatccgcatcgagatcaaccagcgcttcgccctggccgaagcagccagggcgcataccgaactggccgcacggcgaaccaccggctcgaccgtactgttgccctga

SEQ ID NO: 319192 - DNA, 558 bp, Pseudomonas aeruginosa
atgatcagcagctttcgtgcgcaatgcgccgcccgggtcgtccgcgagggcggcgtgatcgcctatcccaccgaggcggtatgggggctcggctgcgacccgtggaacgaggatgcggtgtatcgcctgctggcgctgaaggcgcggccggtggaaaagggcctgatcgtggtggcggcgaacatccaccagctcgacttccttctcgaagacctgccggacgtctggctggaccgcctggccggtacctggccggggccgaacacctggctggtgccgcaccaggagcgcctgccggagtgggtcaccggcgtccacgacagcgtcgccgtgcgggtcaccgaccatcccctggtacaggaactgtgccatctcaccggtccgctgatctccacctcggccaatccggccgggcgcccggcggcgcgcacgcggctgcgggtggagcaatacttccacgacgagctggacgctatcctcggcggcgcccttggcgggcgccgcaaccccagcctgatccgcgacctggtgaccggacaggtcatccgcccggcctga

SEQ ID NO: 319193 - DNA, 1089 bp, Pseudomonas aeruginosa
atgaagaaccattctccagccgaactggaagcacggctgcgcctgcatggcctgcccgaactgggacccatgcgcttcctgcgcttgatcgaggccttcggttcggcctcttccgcgcttgccgcgccagccggcgcctggcgcaccctgggagtgcctgccgaggccgccgccgcgcggcgcagcccggcggtgcgggaagcggcgggtgaagccctgcgctggctggaaggtccgcgcaggcacctgctgatgtgggacgacccgggataccctgcactgctcgccgaagtcgccgatgccccgccgctgctgtacgtcgaaggcgctccggagactctggaacggccgcaactggcgatggtcggcagccgccgcgccagccccgccgggctgggcactgcccggagctttgcgcgcagcctggcgcagggcggcttcgccatcaccagcgggctggccctgggcatcgatggcgccgcccacgagggcgcgctggaggctggcggcgcgaccgtggcagtcctcggcaccggcctgcgcaggctctatccgcggcgccacgaagcgctggcgcggcgcatcgtcgagggtggcggcgcgctggtttcggagctgccgctggacagcccgccgctgccggcaaactttccccggcgcaaccgcatcatcagcggactctcgctgggtgtgctggtggtcgaggcaagtcccgccagcggctcgctgatcaccgcgcggctggcggcggaacaggggcgcgaggtgtacgccattccgggttccatccaccatcccggcgcacgtggctgccaccaactgattcgcgatggcgcgctgctggtggaaagcgtcgggcacgtgctcgaagcactgcgcggctgggcgcaggcggagccagcggaagcgccggcgcagcccctgccccaccctttgctggcgctgctgcgcgccgcgccctacaccagcgaaggcctggccgccgccagcggcatgacgctgcccgatgtgctggcgacgctcagcgaactggaactcgacggccgggtcgcctgcgaggccggcacctgggtgcatcgctccggctga

SEQ ID NO: 319194 - DNA, 1026 bp, Pseudomonas aeruginosa
atgaggaaatcactagtcgcccttctgctccttgccgcgagcggtctggcgcaggcccaggtcgacctcagggaagggcatccggaccgctacacggtggtcaggggcgataccctgtgggacatctcggggaaattcctccgccagccatggaagtggccggaactctggcacgccaacccgcagatccagaatccccacctgatctaccccggcgacacactcagcctggtctacgtcgatggccagccgcgcctggtgctgaaccgtggcgaatcgcgcgggaccatcaagctgtcgccgaagatccgcagcacgccgatcgccgaggccatcccgaccatcccgctggacaagatcaacagcttcctgctggccaaccgcatcgtcgatgacgagaagaccttcaccagtgcgccgtacatcgtcgccggcaacgccgagcggatcgtcagcggcaccggcgaccgcatctatgcccgcggcaagttcgccgacggccagccggcctatggcatcttccgccagggcaaggtctacatcgatccgaagaccaaggaagtcctcggcatcaacgccgacgacatcggcggcggcgaggtggtggccaccgaaggcgacgtcgcgaccctggcgctgacccgcaccacccaggaagtgcgcctgggcgaccgcctgttccccaccgaggagcgtgcggtgaattccaccttcatgcccggcgagccgagccgcgaggtgaagggcgaaatcatcgacgtaccgcgcggcgtgacccagatcggccagttcgacgtggtcaccctgaaccgtggccagcgcgacgggctggccgagggcaacgtgctggcgatctacaaggtcggcgagacggtgcgcgaccgcgttaccggtgagtcggtgaagattcccgacgaacgcgccggcctgctgatggtgttccgtacctacaagaagctgagctacgccctggttctgatggccagcaggccgctctcggtaaccgacagggtgcagaatccctga

SEQ ID NO: 319195 - DNA, 507 bp, Pseudomonas aeruginosa
atggccatcctgaacattctcgaattccccgatccgcgcctgcggaccatcgccaaaccggtggaggtggtcgacgacgcggtgcgccagctgatcgacgacatgttcgaaaccatgtacgaagccccgggcatcggcctcgccgcgacccaggtgaacgtgcacaagcgcatcgtggtcatggacctcagcgaagacaagtccgagccgagggtattcatcaaccccgagttcgaaccgctgaccgaggatatggaccagtaccaggaaggctgcctgtcggtacccggcttctacgagaacgtggaccgaccgcagaaggtccggatcaaggccctcgaccgcgatggcaaccccttcgaggaagtcgccgaaggcctgctggcggtatgcatccagcacgaatgcgaccacctcaacggcaagctgttcgtcgactacctgtccaccctcaagcgcgaccgcatccgcaagaagctggaaaagcagcatcgacagcaggcgtga

SEQ ID NO: 319196 - DNA, 945 bp, Pseudomonas aeruginosa
atgagccaagcattgcgcatcgtcttcgccggaaccccggaattcgccgccgagcatctcaaggccctgctcgacaccccacatcggatcgtcgccgtctacacccagcctgaccggccggccggccgcgggcagaaactgatgcccagcgcggtgaagaacctggccctggagcatggcctgccggtcatgcagccgcagagcctgcgtaatgccgaggcccaggcggagctggcggccctgcgcgcggacctgatggtggtggtcgcctatggcctgatcctgccccaggcggtactcgatatcccgcgcctgggctgcatcaacagccacgcctcgctgctgccgcgctggcgcggcgccgcgccgatccagcgcgcggtggaagccggcgacgcggagagcggcgtcaccgtgatgcagatggaagcagggctcgacaccggcccgatgctgctcaaggtgagcacgccgatttccgccgcggacaccggcggcagcctgcacgaccggctcgccgcgctcggcccgaaagcggtggtcgaagccatcgccggcctggccgccggcaccctgcatggcgagatccaggacgacgccctggccacctacgcgcacaagctgaacaaggacgaggcacgcctcgactggagccgtccggccgtcgaactggagcgccaggtccgcgccttcaccccctggccggtctgccacaccagcctcgccgatgctccgctgaaagtcctcggcgccagcctggggcagggcagcggggcgcccggaaccatcctcgaggccagtcgcgacggcctgctggtcgcctgcggcgaaggcgccctgcgcctgacccgcctgcaagtgccgggcggcaagccactggccttcgccgacctctacaacagccgccgcgagcaattcgccgccggccaggtgctcggccaatga

SEQ ID NO: 319197 - DNA, 1305 bp, Pseudomonas aeruginosa
atgaacccgcgtctcgccgcctgccaggcgctggccgcggtgctcgccggacgcgcctcgctgtctggcgcgttgccgccgcaactggacaaggtcgccccgcgcgatcgcggcctgacccaggagctggccttcggcgcggcgcgctggcaaccgcgcctgcaggccctggccgcgcgcctgttgcagaagccgttcaaggccgccgacaccgatatccacgccctgctgctgatcggcctctaccagttgctctacacgcggattccgccgcacgccgcgatcggcgagaccgtcggctgcgccgacaagctgaagaagggctgggccaagggcgtgctcaacgccgtgctgcgccgcgcgcagcgcgaaggcgagacgctgctggccgaggtcgaccgcgatccctcagcgcgcctgggacatccgcgctggctgctgaaagcgctcaagcaggcctggccggagcagctcgacgcgctctgcgcagcgaacaacgcacacccgccgatgaccttgcgggtcaatcggcgccacggcgagcgcgatgcctacctggccgaactcgccgaagccgggatcaaggcccgcgcctgcgactacagccgcgacggcatccagctcgccgcgccgcgcgacgtgcgcgaactaccgggcttcgcggagggtcgcgtcagcgtccaggacgaagccgcgcaactggccgccgagctgctcgaaagcgcgcccggccagcgtgtcctcgacgcctgctgtgcgcctggcggcaagacctgccacctgctggaaacccagccggaactggccgaagtggtcgccgtcgacctcgaggagagccgcctggtaagggtccgggaaaacctccagcggctcggcctgcaagccagcctggtcgccgccgacgccagggccaccggggagtggtgggacggcaagccgttccagcgcatcctcctcgacgcgccgtgctcggccaccggggtgatccgccgccacccggacatcaagctggcgcgcaagccggaagacatcgccgccctggcgcacctgcagggtgaattgctcgacgcgctgtggcctaccctggaagtcggtggcgtactgctctacgccacctgttcggtgatgccggcggaaaacagcgacagcatcgccgccttcctcgcccgcacgcccggcgcccgcgaactggaccttcccggcccctggggcatgaaacagccccacggccgccagttgctgccgcaggtggagggccacgatggcttctactatgccaagctgatcaagatatccgcccgttga

SEQ ID NO: 319198 - DNA, 1374 bp, Pseudomonas aeruginosa
atgaaaatcatcatcctcggtgccggccaggtcggcggcacactggccgagcacctggccagcgaagccaacgacatcaccgtggtcgacaccgacggcgaccgcctgcgcgacctcggcgaccgcctcgacatccgcaccgtgcaaggcaaggcctcgttccccacggtgctgcgccaggccggcgccgacgacgccgacatgctggtggcggtgaccaatagcgacgagaccaacatggtcgcctgccaggtcgcctacaccctgttcaacaccccgaccaagatcgcccgcgtccgcgagccggcctacctgacccgtaccgggctgttcgacaacgaggcgatcccggtggacgtgctgatcagcccggagcaggtggtcaccaactacatcaagcgcctgatcgaacaccccggcgcgctgcaagtcatcgacttcgccgagggcaaggcgcagttggtcgggatcaaggcctactacggcggccctctggtagggcaggagctgcgccagctgcgcgagcacatgccgaacgtggatacccgcgtcgccgcgatctaccgccgcaaccggccgatcattccccagggcgacacggtgatcgaggccgacgacgaagtcttcttcatcgccgccaaggcccatatccgcgcggtaatgggcgagatgcgcaggctcgacgacagctacaagcggatcatcatcgccggcggcggcaatgtcggcgagcgcctggccgaggccatcgagagccgctaccaggtaaagatcatcgagcgcagcccgctgcgctgccggcacctctcggataccctggacagcaccatcgtgctcaacggcagcgcttccgaccgcgacctgctgctggaggaaaacatcggcgagaccgacgtgttcctcgccctgaccaacgacgacgaggccaacatcatgtcctcgctgctggccaagcggctcggcgcgagcaaagtgatgaccctgatcaacaacccggcctatgtcgacctggtgcaaggcggcgagatcgacatcgccatcagcccgcaactggcgaccatcggcaccctgctggcccacgttcgccgcggcgacatcgagagcgtacactcgctgcgccgcggcgcagccgaagcgatcgaagtggtagcccatggcgacgccaagtcgagcaaggtgatcggtcgctcgatcaacgagatcaagctgccgccgggcaccaccatcggcgcgctggtgcgcgacgaggaagtgctgatcgcccatggcgacacccgcatcgagagcggcgaccacgtgctgctgttcctggtcgacaagaaatacatccgagacgtcgagcgactgttccaggccggcctgacgttcttctga

SEQ ID NO: 319199 - DNA, 318 bp, Pseudomonas aeruginosa
atgatgatcgaaggtctggaaaagatgctggccaaaggcgtggacaatgcgctgctgcgcttcggcctgggcaagggctacctggacgcgggcgacgccgaacgcgcggcggaacacctccagcgctgcgtagagcaggacccgaagtattccgccggctggaagctgctgggcaaggcgcgccaggctgccggcgatctcgcgggcgcccggcaggcctgggagcagggcctggcaactgccgcgacgcatggcgacaagcaggccgaaaaggaaatgacggtgttcctgcgcaagctcgacagggcgagaacctga

SEQ ID NO: 319200 - DNA, 273 bp, Pseudomonas aeruginosa
atgtcgaagcaagagcgttcagtcccgtcctatgtcgaatacccatacgagcaagcgattctctacgttcaccggaacgcctccgccaatgagatgctcgaatccgtacaggagcgcctcagggctctcctcggcctcctccatgccttggaaaggatcgaagtgcggacagggcagggcgttcccattcagcgcgtggcgcacatcctggtcacgctcggcggcgatgccctgacgctgctcacggccgcgcaccgggctaccacctcctga

SEQ ID NO: 319201 - DNA, 654 bp, Pseudomonas aeruginosa
atgtcagcctcttctccggcggcctggcgcggcaccctggccggcctgatcgccttccacatcttcatcatcatcgccagcaactacctggtgcagttgccgatcaccctgtttggctggcacaccacctggggcgccttcagctttccgttcatcttcctggctaccgacctcaccgtgcgcctgctgggcaagggccctgcccggctggtcatcgcccgggtcatgatcccggcgttgatcgcctcctacgtggtctcggtgttgttccaggaagcggcgttccgtggtttctccgcgctgctcgagttcaacaccttcgtcgcccggatctccctggcaagcttcctcgcctatgtgctcggacagatcctcgatatccaggtattcgaccgcctccgtcgttcccggcactggtggaccgcgccagtcgcctcgaccatcctcggcaacctgctggacaccttcacctttttcttcgtggcgttctggcgcagcgacaatccgttcatggcgcagcactgggtggaaatcgccacggtggactacggagtgaagctgagtatcagccttctgctgttcgtgccgctctacggcatgctactcaacggcatcctgaagatgctgccggggcggccgcagagcaacgcttga

SEQ ID NO: 319202 - DNA, 267 bp, Pseudomonas aeruginosa
atggataatcaacgacaatacccacgaaccccgctcaagtgccgaatccgtatcagtcacccgctatttggcgagctgatggcgcagacacgcgacctgtccgacaccggggtctatgtcaaacacccggagctgacccagctcccaacaggcagtgtcgttactggccaggtacaggacttgccgatcgacgcgccgatcctgcagatggaagtcgtgcgagtcgatgcggaaggcgtcggcctgcgctttctcagcgaagcatga

SEQ ID NO: 319203 - DNA, 888 bp, Pseudomonas aeruginosa
gtggagaaattcaaaggtgccctggtggtgggggccctacgcctgttcgcgttattgccctggcgtgccgtgcaaggcgtcggggccggcataggctggctgatgtggaaattgccgaatcgatcccgcgaggtagtgcggatcaacctgtccaagtgcttccccgagttgtctgaaaccgaactggaaaagctggtcggacaaagcctgatggatattggccggaccctcaccgaaagtgcctgcgcctggatctggccgcctgaaaagtcgctgagatacatccgcgaggtcgaaggcatggaggtgctggaggaagcgctggcttccggcgatggcctggtcggcattaccagtcacctgggaaactgggaagtactcaaccacttctattgctcctacgccaagccgatcatcttctatcgtccgcccaagctgaaggcagtcgacgaattgctgaagaagcaacgcgtgcaattgggcaaccgcgtcgcaccttccactccggagggtatcctcagcgtcatcaaggaagtgaagaaaggcggttgcgtagggattcccgccgaccccgagcccgcgcgtaccgctgggctcttcgtgccctacctgggcaccactgccttgatcagcaagttcgtcccgcagttgctttcacgcggcaaggcgcgtggagtgttcttccatgcggtgcgcctgcccgatggtagcggttacaaggtgatcctcgaagcggctccggcggacatgtacgacaaggacctggaagtgtctgtagcagccatgagccgcgagttggcgaagtatgtacgagcctatcccagccagtacatgtggagcatgaaacgcttcaagaaccgcccggatggcgagaaaaaatggtactga

SEQ ID NO: 319204 - DNA, 552 bp, Pseudomonas aeruginosa
atgccacgctgcttctggtgcaacgacgatcccctctacatggcctaccacgatgaggagtggggtgtgccgcagcgcgatcccgacgcgctgttcgaacttctgctgctggagggcttccaggccggattgtcctggatcaccgtgctgaagaagcgcgagcgctaccgcgaggtactgttcggcttcgacgtgcagcgggtggcacagatgagcgacgcggagatcgacgaactgatgctcgaccccggcatcattcgcaatcgggccaagctcaacgctgcgcggcagaacgcccaggcctggctggagctggacgacccggctgggttcctctggtccttcgtcggcggccagccgaagatcaaccatttcgccggtcgcgccgaggtgccggcgattaccccggaagccgaggccatgagcaaggcgctgcgcaaggccggcttcaacttcgtcgggccgaccatctgctacgccttcatgcaggccagcggcatggtcatggaccatacccaggactgcgaccgttacgcccaactcgtcggctag

SEQ ID NO: 319205 - DNA, 948 bp, Pseudomonas aeruginosa
gtgagccagactacgcccgccgtgcgcaccttccaagacctgattctcgccctgcagaactactgggcagagcagggctgcgtggtgctgcagccctacgacatggaagtgggcgccggcaccttccacaccgccaccttcctccgcgccatcggcccggagacctggaacgccgcctacgtccagccgagccgccgccccaccgacggtcgctacggcgagaaccccaaccgcctgcagcactactaccagtttcaggtggtcctgaagccgaacccggagaacttccaggagctgtacctcggctcgctgaaagccatcggcatcgacccgctggtccacgacatccgcttcgtcgaggacaactgggagtcgccgaccctcggcgcctggggcctgggttgggaaatctggctgaacggcatggaagtcacccagttcacctacttccagcaggtcggcggcatcgagtgctatccggtcaccggcgagatcacctacggcctggagcgcctggccatgtacctgcagggcgtggactcggtctacgacctggtctggaccgacggcccgttcggcaaggtcacctatggcgacgtgttccaccagaacgaggtggagcaatccactttcaacttcgagcacgccaacgtgccgaagctgttcgaactgttcgacttctacgaaagcgaagccaaccgcctgatcgcgctggagctgccgttgccgacctacgagatggtcctcaaggcttcgcataccttcaacctgctggatgcgcggcgcgccatctcggtcaccgagcgccagcgctacatccttcgcgtgcgtaccctggcccgcgccgtggcgcagagctacctgcaggcccgcgcgcgcctcggcttccccatggccacccccgaattgcgtgacgaagtactggccaagctgaaggaggccgaatga

SEQ ID NO: 319206 - DNA, 2058 bp, Pseudomonas aeruginosa
atgatgagcgccaaggatttcctggtcgaactgggcaccgaagagctgccgccaaaagccctcaacagcctcggcgaagccttcctcagcggtatcgagaagggcctcaaggctgccggtctgagctatgccgctgcgcgtttctatgcggcgccgcgccgtctcgccgtgctggtcgagcaactcgccgtgcagcagcccgaccgtaccgtcaacctagacggtccgccgctacaggctgccttcgacgccagcggtaacccaacccaggccgccctgggcttcgccaagaagtgcggcgtggatctgcagcagatcgacaagagcggtccgaagctgcgcttcagccagaccatcgccggccaaccggccgccggcctgctgcctggcatcgtcgaggcctcgttgaacgaactgccgattcccaagcggatgcgctgggcagctcgccgcgaggagttcgtgcgtccgacccaatggctggtgatgctgttcggcgacgatgtggtcgagtgcgagatcctcgcccagaaagccgggcgcgaatcccgtggccaccgcttccacaatccggacaatgtgcgtatttccagcccggcagcgtatctggaagacctgcgcggcgctcatgtgctggccgatttcgccgagcgccgcgagctgatcgccaagcgcgtggccgaactggccgccgagcaacagggcagcgccatcgtgccgccgagcctgctcgacgaagtgactgcactggtcgagtggccggtgccgctggtctgctccttcgaggagcgcttcctcgaggtcccgcaggaagccctgatcaccaccatgcaggacaaccagaaatacttctgcctgctggacgccaacggcaagctgctgccgcgcttcatcaccgtcgccaacgtcgagagcaaggcgccggagaacatcgtcagcggtaacgagaaggtggttcgcccgcgcctcaccgacgccgagttcttcttcaagcaggacaagaagcagccgctcgaaagcttcaatgagcgcctgcgcaacgtagtgttccaggcccagctcggcaccgtgttcgagaaggcccagcgcgtctccggcctggccgcctacatcgccgaacgtataggcggcaatgcgcagaacgccgcgcgcgccggcatcctgtccaagtgtgacctggcgaccgagatggtcggcgagttccccgaaatgcagggcatcgccggctactactacgccacccacggcggcgaagcggaagacgtcgccctggccctcaacgagcagtacatgccgcgcggcgccggcgccgagctaccctcgaccctgaccggcgccgccgtggcggtggccgacaagctcgataccctggtcggtatcttcggcatcggcatgcttcccaccggcagcaaggacccctacgcgctgcgccgcgctgcgctgggcgtgctgcgcatcctcatcgagaagcagctcgacctggacctggtagccgcggtcaacgccgccgtcgagcaatacggcgacaaggtcaaggccgccggcctggccgagcaggtgctggacttcgtgttcgaccgcctgcgcgcgcgctacgaggacgaaggcgtggacgtggccgtgtaccagtcggtgcgcgcgctcaagccaagctcgccgctggacttcgaccagcgcgtacaggccgtccaggccttccgccagttgcctgaagccgaggccctggccgcggcgaacaaacgggtgtcgaatattctcgccaagtccgaggacgaggttccgccgaacgtggatgccagcctgctggtggaagccgccgagaaggccctgggcagcgccgtggcgaacgccgaaagcgaagtcgcgccgctggcagcggcacgcgactatcgcgccgcgctggcccgcctggcggccttgcgcgagccggtggatacgttcttcgccgatgtgatggtcaatgtcgacgacgcggcggtgcgcgccaaccgctatgcgctgctggccaagctgcgcgggtcgttcctcggggtggcggacatctcgctgctcggctga

SEQ ID NO: 319207 - DNA, 1707 bp, Pseudomonas aeruginosa
gtgaaacgcctgaaaaagacactgcacctttcaagcttgtccctcgcttccctggctctttcttccgccgccctggcggccgctccggtcatgctcgaccagggcaaggaatggaccgaaagccaccgccaggacttctacagccgcgaccagggctcgcaggtgatgcccctgccctggctcaaggcgttgcgacagccggatggaacgcctttcctcgccgacagcctggcccgctacggctatttgcccaaccccaaggcgcccgcggaaggcctgccggtgggcttcaccgtagccggcacgggcgcccggcagatggtcggcatgacctgttcggcctgccatacccggcagatcgaggtgaagggcactgcctatcggatcgacggcggtccggcgatcgtcgacttccaggcattcctcgccgacctcgatcgggccgtgggaccgctgaccagcgatgacgccgccttcgacgccttcgccaagcagatcctcggggccaatccgcctcccggtgcgcgcgacgctctgctcgcggcggtgaaggaatggtacgagccctatcacacgctgatcgagcgcgcgctgcccaaggacacctggggaccggcgcggctggacgcggtatcgatgatcttcaaccgccttaccgggctggatatcggcaccgcgccgccctacctgattcccgacaacatcaaggcggcggatgcgccggtgcgctatccgttcctgtggaacgcggcgcggcagaacaagacccagtggcccggcttcgccgccaacggcaacgacctgctcggcctggcgcgcaatgtcggcgaggtctacggggtgttcgccaccttccacccgcagaagagcaagttccacctgctgggcatggactacctgaagatcaactcggccaacttccacggtctgggcaagctggaagacctgatcaagaagatcggcccgccgaagtggccctgggcggtggacaagcacctggccaggaaaggcgcgctgatcttcgctcgcaagaccgacgaaggtggctgcgtggagtgccacggcatccggatcaaggacctggtgctttgggacactccgctgagggacgtcggcagcgacagccgccagcacgccatcctcgatggccaggtgcagaccggcgtgatggagggcgcgcggatgccgttcggccagccgctgaaggcgaccgacggagccttcgatgtactcgccgtagcggtggccggttcgatcctgcagcacttcgtgccgatcctcggtgagaagcacgatgccaaggcggcggcggtcaagccggaaagcgtgatgaccgacgaaacccggcaactgctgaccgccttccagaagccggtgcgtacccaggccgacccctacccctacgagtcgcgggtcctgcaggggatctgggcagcggcgccgtacctgcacaacggctcggtgccgaccctggaagagttgctgaagccggccgcggagcgggtggaatccttcccggtgggctcggcctacgacgtggacaaggtcggcctcgccgcccagcagacccaattcggcagctatgtgctgaagaccaccggctgcgagcagcgtgattccggcaacagccgctgcggccatgagtacggcaccagcctgtcggccgaggagaagcgcgcgctgctggagtatctgaaggtcctgtag

SEQ ID NO: 319208 - DNA, 537 bp, Pseudomonas aeruginosa
atgtcccgttccctgctgattctcgaccgcgatggagtcatcaacctcgactccgacgattacatcaagaccctcgacgagtggatccccatccccagctcgatcgaggccatcgcccgcctgagccaggccggctggaccgtcgcggtggctaccaaccagtccggcatcgcccgtggctattacgacctggcagtgctcgaggccatgcatgcgcgcttgcgcgaactggtcgcggagcagggcggcgaggtcggcctcatcgtctattgtccgcatggaccggacgacggttgcgactgccgcaagccgaagccgggtatgctgcggcagatcggcgagcactacggggtcgatctgtcgggtatctggttcgtcggcgacagcatcggtgacctggaggcggcgcgggccgtcgattgtcagccggtattggtaaagaccggaaaaggtgtacgtacgctgggcaagcccttgccagagggcaccctgatattcgacgatctggcggcagtcgccagcgcattacttcagtaa

SEQ ID NO: 319209 - DNA, 774 bp, Pseudomonas aeruginosa
atgtcgacagtgcaggccatcagaaccgtcctcttttacctgctgctgtccgccagcgcgttcgtctggggcaccctcagcttcttcatcgcgccgatcctgccgttccgcgcccgctaccgcttcgtggtacagaactggtgccgcttcgcgatctggctgacccgcgtggtcgccggcatccgctacgaggtgcgcggactggagaacatcccggaaaagccctgcgtgatcctctccaagcaccagagcacctgggaaaccttcttcctctccggcttcttcgagccactcagccaggtactcaagcgcgagctgctctacgtgccgttcttcggctgggccctggccctgctcaagcccatcgccatcgaccgtagccagcccaagctggccctcaagcaactggccaagcagggcaacgagtgcctgaagaaaggcgcctgggtgctgatcttcccggaaggcacgcgtattccggtggggcagatgggcaagttctcccgcggcggcaccgccctggcggtcaacgccgggctaccggtactgccgatcgcccacaacgccgggcagtattggcccaaggccggctgggccaagtacccgggcaccatccaggtggtgatcggcccggccatgcacgccgaaggcgaaggcccgcgcgccatcgccgagctaaaccagcgcgccgaagcctgggtcagcgagaccatggccgagatcagccccatccagcagcgggtcagccatccggagccgtcggtggtctcgtga

SEQ ID NO: 319210 - DNA, 2421 bp, Pseudomonas aeruginosa
atgagcgagaacaacacgtacgactcttccagcatcaaggtgctgaaggggctggatgccgtacgcaagcgccccggcatgtacatcggcgacaccgacgatggcaccggtctgcaccacatggtgttcgaggtggtggataactccatcgacgaagcgctggccggttactgcagcgaaatcagcatcaccatccatacggatgagtcgatcactgtccgcgacaatggacgcggtattccggtggatatccacaaggaagaaggggtttctgcggcggaagtgatcatgaccgtcctccacgccggcggcaagttcgacgacaacacctacaaggtgtccggcggcttgcacggtgtgggcgtctcggtggtgaacgcgctgtcccatgaactacgcctgaccatccgtcgccacaacaaggtctgggaacaggtctaccaccacggcgttccgcagttcccactgcgcgaagtgggcgagaccgatggctccggcaccgaagttcacttcaagccgtccccggagaccttcagcaacatccacttcagttgggacatcctggccaagcgcatccgcgagctgtccttcctcaactccggcgtcggcatcctgctgcgcgacgagcgtaccggcaaggaggagctgttcaagtacgaaggcggtctgaaggccttcgtcgagtacctgaacaccaacaagaccgcggtgaacgaggtattccacttcaacgtccagcgtgaagaggacggcgtgggtgtggaagtcgccttgcagtggaacgacagcttcaacgagaacctgctctgcttcaccaacaacatcccgcagcgtgacggcggcacccacctggccggtttccgttcggcgctgacgcgtaacctgaacaactacatcgaggccgaaggcctggcgaagaagttcaagatcgccaccaccggcgacgatgcccgcgaaggcctcaccgcgatcatctcggtgaaggtaccggacccgaagttcagctcgcagaccaaggacaagctggtctcctccgaggtgaagactgcggtggaacaggagatgggcaagtacttcgccgacttcctgctggagaatcccaacgaagccaaggccgtggtcggcaagatgatcgacgccgcccgtgcccgcgaggccgcgcgcaaggcgcgcgagatgacccgccgcaagggcgcgctggacatcgccggcctgcccggcaaactggccgattgccaggaaaaggacccggcgctctccgaactgtacatcgtggagggtgactccgcgggcggttccgccaagcagggccgcaatcgccggacccaggcgatcctgccgctcaagggcaagatcctcaacgtcgaaaaggcgcgcttcgacaagatgctctcctcccaggaggtcggtacgctgatcaccgccctgggctgtggcatcggccgcgaggaatacaacatcgacaagctgcgctaccacaacatcatcatcatgaccgatgctgacgtcgacggttcgcacatccgcaccctgctgttgaccttcttcttccgccagatgcccgagctgatcgagcgtggctacatctacatcgcccagcccccgttgtacaaggtcaagcgcggcaagcaggagcagtacatcaaggacgaccaggccatggaagagtacatgacccagtcggccctggaagacgccagcctgcacgtcaacgagcacgctccgggcctgtccggggcggcgctggagaaactggtcaacgagtatcgcggggtgatcgccaccctcaagcgcctgtcgcgcctgtacccccaggagctgaccgagcacttcatctacctgcctaccgtgtcggtggacgacctggctaacgagtcggccatgcagggctggttggagaagttccaggcgcgcctgaccgccgccgagaagtccggcctgacctacaaggccagcctgcgcgaagaccgcgagcgccacctgtggctgcccgaggtggaactggtggcccacggcctgtccagctacgtcaccttcaaccgtgacttcttcgccagcaatgactaccgctcggtgtcgctgctcggcgaccagttgaacagcctgctggaagacggcgcctacgtgcagaagggtgagcgcaagcgcccgatcagcgccttcaaggacggcctggactggctgatggccgaaggtaccaagcgccacagcatccagcgatacaaggggctgggcgagatgaaccctgagcagctgtgggaaaccaccatggatccgaacgtccggcgcatgctcaaggtgaccatcgaggacgccatcgccgccgaccagatcttcaacaccctgatgggcgatgccgtggagccgcgccgcgacttcatcgaaagcaacgcgctggcggtgtcgaacctggacgtgtga

SEQ ID NO: 319211 - DNA, 1110 bp, Pseudomonas aeruginosa
atgtccctgacccgcgtttcggtcaccgcggtgcgcaacctgcacccggtgaccctctccccctccccccgcatcaacatcctctacggcgataatggcagcggcaagaccagcgtgctcgaagccatccacctgctgggcctggcgcgttcattccgcagtgcgcgcttgcagccggtgatccagtatgaggaagcggcctgcaccgtattcggccaggtgatgttggccaacggcatcgccagcaacctggggatttcccgtgagcgccagggcgagttcaccatccgcatcgatgggcagaacgcccggagtgcggctcaattggcggaaactctcccactgcaactgatcaacccggacagctttcggttgctcgagggagcgccgaagatccggcgacagttcctcgattggggagtgttccacgtggaacctcggtttctgcccgtctggcagcgcctgcagaaggcgctgcgccagcggaactcctggctccggcatggtaaactggaccccgcgtcgcaagcggcctgggaccgggaattgagcctggccagcgatgagatcgatgcctaccgcagaagctatatccaggcgttgaaaccggtattcgaggaaaccctcgccgaattggtttcactggatgacctgacccttagctactaccgaggctgggacaaggaccgagacctcctggaggtcctggcttccagcctgttgcgcgaccagcagatgggccacacccaggcgggaccgcagcgtgcggatcttcgcatacggttggcaggtcataacgccgcggagattctctcgcgcggtcagcagaagctggtggtatgcgccctgcgcatcgcccagggccatctgatcaatcgcgccaagcgcggacagtgcgtctacctggtggacgacctgccctcggaactggatgagcagcatcgaatggctctttgccgcttgcttgaagatttgggttgccaggtattcatcacctgcgtggacccgcaactattgaaagacggctggcgcacggatacgccggtatccatgttccacgtggaacatggaaaagtctctcagaccacgaccatcgggagtgaagcatga

SEQ ID NO: 319212 - DNA, 1104 bp, Pseudomonas aeruginosa
atgcatttcaccattcaacgcgaagccctgttgaaaccgctgcaactggtcgccggcgtcgtggaacgccgccagacattgccggttctctccaacgtcctgctggtggtcgaaggccagcaactgtcgctgaccggcaccgacctcgaagtcgagctggttggtcgcgtggtactggaagatgccgccgaacccggcgagatcaccgtaccggcacgcaagctgatggacatctgcaagagcctgccgaacgacgtgctgatcgacatccgtgtcgaagagcagaaacttctggtgaaggccgggcgtagccgcttcaccctgtccaccctgccggccaacgatttccccaccgtagaggaaggtcccggctcgctgaacttcagcattgcccagagcaagctgcgtcgcctgatcgaccgcaccagcttcgccatggcccagcaggacgtgcgttactacctcaacggcatgctgctggaagtgaacggcggcaccctgcgctccgtcgccaccgacggccaccgactggccatgtgctcgctggatgcgcagatcccgtcgcaggaccgccaccaggtgatcgtgccgcgcaaaggcatcctcgaactggctcgtctgctcaccgagcaggacggcgaagtcggcatcgtcctgggccagcaccatatccgtgccaccactggcgaattcaccttcacttcgaagctggtggacggcaagttcccggactacgaacgcgtactgccgcgcggtggcgacaagctggtggtcggtgaccgccagcaactgcgcgaagccttcagccgcaccgcgatcctctccaacgagaagtaccgcggcattcgcctgcagctttccaacggtttgctgaaaatccaggcgaacaacccggagcaggaagaggccgaggaagaagtgcaggtcgagtacaacggcggcaacctggagatcggcttcaacgtcagttacctgctcgacgtgctgggtgtgatcggtaccgagcaggtccgcttcatcctttccgattccaacagcagcgccctggtccacgaggccgacaatgacgattctgcctatgtcgtcatgccgatgcgcctctaa

SEQ ID NO: 319213 - DNA, 1545 bp, Pseudomonas aeruginosa
gtgtccgtggaactttggcagcagtgcgtggatcttctccgcgatgagctgccgtcccaacaattcaacacctggatccgtcccttgcaggtcgaagccgaaggcgacgaattgcgtgtgtatgcacccaaccgtttcgtcctcgattgggtgaacgagaaatacctcggtcggcttctggaactgctcggtgaacgcggcgagggtcagttgcccgcgctttccttattaataggcagcaagcgtagccgtacgccgcgcgccgccattgtcccatcgcagacccacgtggctcccccgcctccggttgctccgccgccggcgccagtgcagccggtatcggccgcgcccgtggtagtgccacgtgaagagctgccgccagtgacgacggctcccagcgtgtcgagcgatccctacgagccggaagaacccagcatcgatccgctggccgccgccatgccggccggagcagcgcctgcggtgcgcaccgagcgcaacgtccaggtcgaaggtgcgctgaagcacaccagctatctcaaccgtaccttcaccttcgagaacttcgtcgagggcaagtccaaccagttggcccgcgccgccgcctggcaggtggcggacaacctcaagcacggctacaacccgctgttcctctacggtggcgtcggtctgggcaagacccacctgatgcatgcggtgggcaaccacctgctgaagaagaacccgaacgccaaggtggtctacctgcattcggaacgtttcgtcgcggacatggtgaaggccttgcagctcaacgccatcaacgaattcaagcgcttctaccgctcggtggacgcactgttgatcgacgacatccagttcttcgcccgtaaggagcgctcccaggaggagttcttccacaccttcaatgcccttctcgaaggcggccagcaggtgatcctcaccagcgaccgctatccgaaggaaatcgaaggcctggaagagcggctgaaatcccgcttcggctggggcctgacggtggccgtcgagccgccggaactggaaacccgggtggcgatcctgatgaagaaggccgagcaggcgaagatcgagctgccgcacgatgcggccttcttcatcgcccagcgcatccgttccaacgtgcgtgaactggaaggtgcgctgaagcgggtgatcgcccactcgcacttcatgggtcggccgatcaccatcgagctgattcgcgagtcgctgaaggacctgttggcccttcaggacaagctggtcagcatcgacaacatccagcgcaccgtcgccgagtactacaagatcaagatatccgatctgttgtccaagcggcgttcgcgctcggtggcgcgcccgcgccaggtggccatggcgctctccaaggagctgaccaaccacagcctgccggagatcggcgtggccttcggcggtcgggatcacaccacggtgttgcacgcctgtcgtaagatcgctcaacttagggaatccgacgcggatatccgcgaggactacaagaacctgctgcgtaccctgacaacctga

SEQ ID NO: 319214 - DNA, 135 bp, Pseudomonas aeruginosa
atgaaacgtactttccaacccagcaccctcaagcgcgctcgcgtccacggtttccgcgcccgtatggccaccaagaacggccgtcaggttctgtcgcgtcgtcgcgccaaaggccgtaagcgtctgaccgtctga

SEQ ID NO: 319215 - DNA, 408 bp, Pseudomonas aeruginosa
gtggtgagtcgggacttcgaccgggacaagcgtctactgacagcccggcaattcagcgcagtcttcgactctccgaccggcaaggtccccggcaagcacgtcctgctgctggcgcgcgagaacggtctcgatcacccccgcctgggcctggtgatcggcaagaagaacgtcaagctcgccgtccagcgcaatcgcctcaaacgcctgatccgcgaatcgttccgccataaccaggaagtcctagctggctgggatatcgtggtgatcgcgcgcaaaggcctgggcgaactggaaaatccggagctgcaccagcagttcggcaagctctggaaacgcctgttgcgcaatcgacctcgcacggaaagccctgctgacgcccctggcgtggccgacggtactcatgcatag

SEQ ID NO: 319216 - DNA, 1737 bp, Pseudomonas aeruginosa
atggacattcaacgctcgattctcatcgtcgcccttgcagtcgtgtcctacctgctggttctccagtggaacaaggattacggtcagcctgagctgcccgccgccagcgcttcgatgaacaccacgcaaggcctgccggacactccgtccgcctcgggcaccagcagtgacgttcccactgcccagagcagtgcggccggcagcgaagccgccgacaagccggttgcggtcagcgacaagctgatccaggtgaagaccgacgtcctcgacctggccatcgatccccgtggcggcgatatcgtccagctcggcctgttgcagtatccgcgccgcctggaccgtccggacgtgccgttcccgctgttcgacaacggtcgcgaacgtacctacctggcgcagagcggcctcaccggtgccgacggcccggacgccagcagcgccggccgcccgctgttccacagtgcgcagagcagctaccagttggccgacggccagaacgaactggtcgtggacctgagcttcagccacgacggtgtcaactacatcaagcgcttcaccttccaccgtggcctgaaagccgattgctcggacaaggaaaaggcccagaagaagatcgagtgcatcaatgaaaacgcctatcaggtcggcgtcagctacctgatcgacaaccagagcggcaagacctggagcggcaacctgttcgcccagctcaagcgcgacggcagcgccgacccgtcctcgaccaccgccaccggggtgtccacctacctcggcgccgcggtctggaccccggattcgccgtacaagaagatctccaccaaggacatggacaaggaacagttcaaggagtccgtgcagggtggctgggtcgcctggctgcaacactacttcgtgaccgcctgggttccgaccaagggcgagcagcaccaagtcatgacccgcaaggacggccagggcaactacatcgtcggtttcaccggcccgaccctgagcgttccggcgggtagcaaggtggaaaccgacctgaccctgtatgccggcccgaaactccagaagcacctgaaggaactctccccgggcctggaactgaccgtcgactacggtttcctttggttcatcgcccagccgatcttctggctgctgcaacatatccacagcctgatcggtaactggggctggtcgatcatcgccctgaccgtcctgatcaagctggccttcttcccgttgtccgccgccagctaccgttcgatggcgcgcatgcgcgcggtgtcgccgaagatgcaggcgatcaaggaacagcacggcgacgatcggcagaagatgtcccaggcgatgatggagctgtacaagaaggagaagatcaatccgctgggcggctgcctgccgatcctggtccagatgccggtcttcctctccctctactgggtactcctggaaagcgtggaaatgcgccaggcgccgtggctcggctggatcaccgacctgtcggtgaaggatccgttcttcatcctgccgatcgtcatgggcggcaccatgctgatccagcagatgctcaacccgaccccgccggacccgatgcaggccaaggtgatgaaactgatgccgatcatcttcaccttcttcttcctctggttcccagccggtctggtgctgtactgggtagtcaacaactgcctgtcgatcgcacagcagtggtacattacccgcaagatcgaggcagccgcgaagaccgcctga

SEQ ID NO: 319217 - DNA, 1368 bp, Pseudomonas aeruginosa
atgcaagccgccaccgaaaccatcgtcgcgatcgctaccgcccagggccgcggcggcgtgggaatcgtccgcgtctccggacctctcgccggacagatggccgtggccgtgagcggacgccagctgaaagcccggcatgcgcattacggaccgttcctcgatgccggtgggcaggtgatcgacgaaggcctgtcactgtatttccccggcccgaactcgttcaccggcgaagacgtactcgaactgcaggggcacggcggccccgtggtactcgacctgctggtgcagcgttgtctggaattgggcgcccgccaggcgcgaccgggcgagttcagcgagcgcgcgttcctcaacgacaagctcgacctggcccaggccgaagccatcgccgatctgatcgaggccagctcggagcaggccgcgcgcaatgcattgcgttccctgcagggcgaattctcgcgccgggtacatgcattgaccgagcaactgatttccctgcgcatctatgtcgaagccgccatcgacttccccgaggaagaaatcgacttcctcgccgatggccatgtactggggcttctggaaaaagtacgcacagaattatccacagtgcagcgcgaagcttcccaaggcgccctgctgcgcgacggcatgaccgtggtcatcgccggacgaccgaatgccggcaagtccagcctgctgaatgccctggccggtcgcgaggcggccatcgtcacggacatagccggcaccacccgcgatgtactgcgcgaacatatccacatcgatggcatgcccctgcatgtggtggacaccgcaggcctgcgggataccgaggaccatgtggaaaagatcggcgtggaacgtgcgctgaaagccatcggcgaagccgatcgcgtgctgctggtggtggacgccaccgccccggaagcagcggacccgttttccctatggccggagtttctcgaccagcgaccggaaccgggcaaggtcaccctgatccgcaacaaggcggatttgtccacagagtccattggcctcgaggaaagcgcggacggccacgtcaccatcaccctctcggcgcgcaccggcgccggcctggagctgctgcgcgaacacctgaaggcctgcatgggcttcgaacagaccgcggaaagcggtttcagcgcccgccggcgccacttggaagcgctacgcctggcagggcaggcgctggagcatggccacagccaacttatccacaatggcgccggcgaactgctggccgaggatctgcgccaggcccagcagcacctgggcgaaatcaccggcgcattcacccccgacgacctgctgggtcgcatcttctcgagtttctgcatcggcaagtaa

SEQ ID NO: 319218 - DNA, 225 bp, Pseudomonas aeruginosa
atggagatcgtagccaacctggcggtatggctcggcggcgaatgccaggtcggacagatgatcgactggttcggcagttacgaccgcactagcgggctcagtgctcggctactgctgcgcaaacccgctaacgagggctccgagcgggatttccaggtctccgccaagcgccgcttcgagcgcctgtcgtcatccatcgatacgctggaaagcggcaacgactga

SEQ ID NO: 319219 - DNA, 1893 bp, Pseudomonas aeruginosa
gtggatttccctacccgttttgacgtaatcgtgatcggcggtggccatgcaggcaccgaagccgcactcgcggctgcgcgcatgggtgtgaaaaccctgctgttgacccacaatgtggaaaccctggggcagatgagctgcaaccccgccatcggcggcatcggcaagagccatctggtcaaggaaatcgacgcccttggcggcgccatggccgaagccaccgacaagggcggtatccagttccgcatccttaacagccgcaaggggccggcagtgcgcgccactcgtgcacaagccgatcgcgtgctctataaggccgctatccgccatacactggaaaaccagccgaacctgtggatattccagcaggcctgcgacgacctgatcgtcgagcaggatcaggtccgcggcgtagtgacccagatgggactgcgcttccatgccaacaacgtggtcctgactaccggcaccttcctcggcggacttatccacatcggcctggagaactactcaggcggacgcgccggcgacccgccgtccatcgcactggcgcgtcgtctgcgtgaattgccgctgcgggtcggccggctgaagaccggtacgccgccgcggatcgacgggcgcagcgtggacttctcggtgatgaccgagcagccgggcgacacgccgatcccggtgatgtccttcctcggttcgaaggaacagcatcccgagcaggtcagttgctggatcacccataccaacgcccggacccacgagatcatcgccgccaatctcgatcgttcgccgatgtattccggtgtgatcgaaggcatcggcccgcgctactgcccttcgatcgaagacaagatccatcgcttcgccgacaaggaaagccaccaggtcttcctcgagccggaaggcctgacgacccacgagctgtatcccaacggcatttccacgtccctgccgttcgacgtgcaactgcagatcgtgcgttccatccgtggcatggaaaacgcccacatcgtgcggccgggctatgcgatcgagtacgacttcttcgatccccgcgatctcaggtacagcctggagaccaaggtcatcggcggcctgttcttcgccggccagatcaacggcaccaccggctacgaggaagctggcgcccagggcctgctggccggcgccaatgctgcgttgcgttcgcaaggcaaggacagctggtgcccgcgccgcgacgaggcctacatcggcgtgctggtggacgacctgatcacgctcggcacccaggagccgtaccgcatgttcacctcgcgggcggaataccgcctgatcctccgcgaggacaacgccgacctgcgtctcaccgagaagggacgcgagctgggccttgtcgacgatcggcgctgggctgccttcgaagccaagcgcgaaggtatcgaacgcgaggaacagcggctgaagagcacctgggtgcggccgaataccccgcagggcgacgccatcgccgagcgcttcggtacgccgctgacccatgaatacaacctgctcaacctgctgagccgccccgagatcgattacgccggcctggtggagatcaccggcgacgctgtggataacccccaggtggccgagcaggtggagattcgcaccaagtacgccggctacatcgaccgccagcaggaggaaatcgcccggctgcgcgccagcgaagatacccgcctgcctgtggatatcgattacctggggatttccggcctgtcgaaggaaatccagaacaagctgaaccaggcccgtccggaaaccctcggacaggcttcgcgaatccccggcgtcacgccggctgcgatttcgctgttgttgatccacctgaagaagcgtgcctctggccgccaactggagcagagcgcttga

SEQ ID NO: 319220 - DNA, 645 bp, Pseudomonas aeruginosa
atgtctgcggtaacccaacaccacgccgacgaactcgcgcgcggtgctgacgagctaggcgtcgccctcgacgccgacaagcaacgccagctgctggcctacctggccctgctgatcaaatggaacaaggcctacaacctgaccgccgtacgcgacccggacgagatggtttcgcgccacctgctcgacagcctgagcatcgtgccttatgccgaggctggggataactggctggatgtcggcagcggcggcggcatgcccggcgtgccgctggccatcctgttcccggaaaagcgcctgaccctgctcgacagcaacggcaagaaaacccgcttcctgacccaggtgaagctcgagctgaagctggccaacctcgaagtcgtgcacagccgggtggaagccttccgtcccgagagccccttcgatggcatcgtttcccgcgctttcagcagcctggaggacttcgccaactggacccgccacctcggtggccaggaaacccgctggctggcgatgaagggcgtgcatccgaacgaagagctggcggcactcccggaggatttccgggtcgaagccgagcacgcgctggcggtacccggttgccaaggtcagcggcatctgctgatactgcggcgcacagcatga

SEQ ID NO: 319221 - DNA, 789 bp, Pseudomonas aeruginosa
atggctaaggtattcgcgatcgccaaccagaaaggcggtgtcggcaagaccacgacctgtatcaacctcgcggcctccctcgtggcgaccaagcgccgcgtcctcctgctggacctggatccccagggcaacgccaccaccggcagcggcatcgacaagcacaacctggagcactccatctacgacgtgctcaccggcgagtgcaacctcgccgaggccatgcagttctccgaacacggcggctaccagttgctgccggccaaccgcgacctgaccgccgcggaagtggtgctgctggaaatggacatgaaggaaaatcgcctgcgcaacgcgctggcgccgatccgcgagaactacgactacatcctcatcgactgcccgccgtcgctgtcgatgctcaccgtcaacgcgctgaccgccgccgacggcgtgatcatccccatgcagtgcgagtactacgcgctggaggggctgaccgacctgatgaacagcatccagcgcatcggccagttgctcaacccgacgctgaagatcgagggtctgttgcggaccatgtacgatccgcgcatcagcctgaccaacgatgtctccgcgcagttgcaggagcatttcggcgacaccctctacagcaccgtcatcccgcgtaacgtgcgcctcgccgaagcccccagcttcggcatgccggcgctggtttacgacaagcaatcccgcggcgccatcgcctacctggcgctggccggcgagctggtccgccgccagcgcgccaaagtccgcgccgcaaccgcataa

SEQ ID NO: 319222 - DNA, 873 bp, Pseudomonas aeruginosa
atggcagccaagaaacgtggactgggacgcgggctcgatgccctgctgggcggctcgagtcccgccaaactgcaggaggaagccgtacaggccgaccgccgcgagttgcagcagatccccctcgacctgatgcagcgcggcaagtaccagccgcgtcgcgacatggaccctcaggcgctggaggaactggcgcagtcgatcaaggcccagggcgtgatgcagcccatcgtggtgcggccgatcgccaatggccgctacgagatcatcgccggcgagcggcgctggcgggccagccagcaggccggactggaaaagatcccggcgctggtgcgcgacgtgccggacgaagcggccatcgccatggcgctgatcgagaacatccagcgcgaggacctcaacccgatcgaggaagccgctgccctgcagcgcttgcagcaggagttccagctgacccagcagcaggtcgcggaagcggtcggcaagtcgcgcgcgaccattaccaacctgctgcgcctgatcggcctgccggaagagatcaagaccctgctttcccatggcgacctggagatgggccatgcccgtgcgctcctcggtctgccggcagaacggcaggtggaaggggcgcgacatgttgtcgcacatgggctgaccgtacgtcagaccgaagccctggttcggcagtggacgcatgccccgggcaagcctgcgggaccggtcaagagcgacccggacatcgcccgcctggaacagcgcctggccgagcgcctgggcgcttcggtgcagatccggcatggtcagaagggcaagggacagttggtcatccgctacagctccctggatgaactgcagggcgttctcgcccacatccgttga

SEQ ID NO: 319223 - DNA, 381 bp, Pseudomonas aeruginosa
atgccaagtcgcctgccggcattcagattgctgctcgtccaactggtagtagtgcttgttgctgcgatctccctgtggatttcttggggaccggtagccggatattccggactgctgggagggatgatcgcctggttgccgaattgttatttcgcctacaaggcgttccgtttcagcggagcgcgggctgcccgggaaatcgttcgctctttctatgcgggcgaagccgggaaactgattctgacggcggtgctcttcgcactgacgttcgcaggcgtgaagccactgatggcgccggctctgttcggtgtctatctgctgaccctgatggtcagctggtgcgcacccctgctgatgggaaaaacatttacaagaccttag

SEQ ID NO: 319224 - DNA, 870 bp, Pseudomonas aeruginosa
atggcagcagaaaccgcttcgggttacatccagcaccacttgcagaacctgaccttcgggcgtctgcctaatggtgattgggggttcgcccacaccgccgagcaagccaaggaaatgggcttctgggcattccacgtagacaccctgggctggtcggtactgctcggcgtggtgttcctgttcatcttccgcctggcggccaagaaggccaccagcggccagccgggtggactgcagaacttcgtcgaggtgatggtcgagttcgtcgacaccagcgtcaaggacaccttccacgggcggaacccgttgatcgcgcccctggccctgaccgtgttcgtctggatcttcctgctcaacctgatcgacctggtaccggtggactacctgccgatgctggccgcgaagatcaccggcgacgagcacctgttcttccgcgcggtggccaccaccgacccgaacgccaccctcggcctgtcgatctcggtgttcgccctgatcgtcttttacagcatcaaggtcaagggcatcggcggcttcctcggtgaactgaccctgcaccccttcagcagcaagaacatcgtcgttcagatcctgctgattccggtgaacttcctgctcgagttcgtgaccctgatcgccaagccggtttcgctggcgctgcgtctgttcggcaacatgtatgccggcgaactgatcttcattctgatcgccgtcatgttcggtagcggaatgttcctgctgagtgccctgggcgtagccctgaactgggcgtgggctgtgttccacatcctgatcatcaccctgcaggccttcatcttcatgatgctgaccatcgtctacctgtcgatggcgcacgaagacaaccattaa

SEQ ID NO: 319225 - DNA, 258 bp, Pseudomonas aeruginosa
atggaaactgtagttggactgactgctatcgccgttgctctgctgattggcctgggtgccctgggtaccgccatcggtttcggtctgctgggtggcaagttcctggaaggcgcagctcgtcagcctgaaatggttccgatgctgcaggtgaaaatgttcatcgtcgccggcctgctggacgccgtgaccatgatcggtgtgggtatcgccctgttcttcaccttcgcgaatcccttcgttggtcaaatcgccggctaa

SEQ ID NO: 319226 - DNA, 471 bp, Pseudomonas aeruginosa
gtgaacattaatgcaaccctgattggccagtccgttgcgttcttcatctttgtgctgttctgcatgaagttcgtgtggcctccggtcatcgcggctctgcaagagcgtcagaagaagatcgctgacggcctggacgctgccaaccgcgcggctcgtgatctggagctggctcatgagaaagcgggccagcaactgcgcgaagccaaggctcaggcagccgaaatcgtcgaacaggcgaagaaacgcgctaaccagatcgtcgatgaagcccgcgaccaggcccgtaccgaaggcgaacgcctgaaggcccaggctcaagcggaaatcgaacaggaactgaacagcgtcaaggacgccctgcgtgcccaagtgggtgccctggccgtcaccggcgcagagaagatcctgggtgcttcgatcgacgcaaacgcgcacgagcagctggtttccaaactggcagccgagatctaa

SEQ ID NO: 319227 - DNA, 537 bp, Pseudomonas aeruginosa
atggcagaactgaccacgttggctcgtccctacgcaaaggcggctttcgagtacgcccaggctcatcagcaactggccgattggtcggctgcgctgggtgtgctggccgcagtgtcgcaggacgacaccgtgcgccagctgctcaaagagcctcagctgacctcttcggccaaggcccagagcctgatcgatgtgtgcggcgacaagctgaatgcaccagcccagaacttcgtccggactgtggctgagaacaagcggctcgaactgctgccgaccatcgctgagatgtacgagcagttgaaggccgagcaggaaaagtcggtcgaggtagaagtcaccagtgccttcaccttgagcaaagaacagcaggacaaactcgccaaggctctcagcgcccggctcagtcgcgaagtgcggctacatgcgtcggaagacgcgagcctgatcggcggcgtgatcattcgcgccggtgacttggtaatcgatggctcggtgcgcggcaagctcgcgaaactggccgaagcgttgaaatcttga

SEQ ID NO: 319228 - DNA, 1545 bp, Pseudomonas aeruginosa
atgcagcaactcaatccttccgaaattagtgaaatcatcaaggggcgcatcgagaaactcgacgtcgcctcccaagcacgaaacgaaggcaccatcgtcagcgtgtccgacggtatcgtgcgcatctacggtctggccgacgtcatgtacggcgagatgatcgagttcccgggcggcgtctacggtatggcgctgaacctggagcaggattccgtgggtgccgtggtcctgggtgaataccagggcctcgccgaaggcatgaacgccaagtgcaccgggcgcatcctggaggttccggtcggtccggaactgctgggtcgcgtagtcgacgcactgggcaatccgatcgacggcaagggtccgatcgacgccaaggccaccgacgcggtcgagaaggtcgctccgggcgtgatctggcgtaagtcggtagaccagccggtacagaccggctacaagtcggtcgacgccatgatcccggtaggccgtggccagcgcgagctgatcatcggcgaccgccagatcggcaagaccgccctcgcggtcgacgccatcatcaaccagaaagacagcggcattaagtgcgtctacgtggccatcggccagaagcagtccactatcgccaacgtcgtacgcaagctggaagagaacggtgccctggccaacaccatcgtggtcgccgccagcgcttccgagtccgccgccctgcaatacctggcgccgtactccggttgcaccatgggcgaatacttccgcgatcgcggcgaagacgccctgatcgtctacgacgacctgtccaagcaggccgtggcttatcgccagatctccctgctgctgcgccgtccgccgggccgcgaagcctacccgggcgacgtgttctatctccacagccgtctgctggagcgcgcttcccgcgtttccgaagagtatgtcgagaagttcaccaacggcgccgtgaccggcaagaccggctcgctgaccgcgctgccgatcatcgagacccaggccggcgacgtttccgcgttcgttccgaccaacgtgatctcgatcaccgacggccagatcttcctggaatccgccatgttcaactcgggtatccgtccggccgtcaacgccggtatctcggtatcccgcgtaggtggcgcggcccagaccaagatcatcaagaagctgtccggcggcattcgtaccgctctggcccagtaccgtgaactggcggccttcgcccagttcgcctcggacctggacgaagcgacccgcaagcagctggagcatggtcagcgcgttaccgagctgatgaagcagaagcagtacgcgccgatgtcgatcgccgagatgtcgctgtccctgtatgccgccgagcgtggtttcctgcaggacgtcgaaatcgccaaggtcggtagcttcgagcaggcgttgatctcctacttccagcgcgagcatgccgctctgctggcgaagatcaacgagaaaggtgacttcaacgacgaaatcgacgcgggcatcaaggccggcatcgagaagttcaaggccacccaaacctggtaa

SEQ ID NO: 319229 - DNA, 861 bp, Pseudomonas aeruginosa
atggcaggcgcaaaagagattcgcagcaagattgcgagcatcaaaagcacgcaaaagatcaccaatgccatggaaaaagtggcggtgagcaagatgcgcaaggcacaaatgcgcatggcggccggccgtccctacgcggagcgtattcgccaggtgatcggccatctggccaacgccaacccggaataccgtcacccgttcatggtcgagcgtgaagtcaagcgcgtcggctacatcgtggtgagcagtgaccgtggtctgtgcggcggtctgaacatcaacctgttcaagtccctcgtcaaggacatgagcggctaccgcgagcaaggggcggaaatcgacctttgcgtgatcggtagcaagggcgcttcgttcttccgcagtttcggcggcaacgtcgtggcagctatcagccacctcggcgaagagccttcgatcaacgacctgatcggcagtgtcaaggtgatgctcgacgcatacctcgaaggccgtatcgatcgcctgttcgtggtctccaacaagttcgtcaacaccatgacccagaagccgaccgtggaacagctgattccgctggtggccgatgacgatcaggagctgaagcaccactgggactatctctacgaacccgacgccaagtcgctcctcgacgggctgctggtgcgttacgtggaatcccaggtgtaccaggccgtggttgagaacaacgcctgtgagcaggcggcccggatgattgcaatgaagaacgctaccgacaacgccggcgagctgatcagcgatttgcagctgatctacaacaaggcgcgtcaggcggcgatcacccaggaaatctcggaaatcgtcggcggcgctgccgcggtgtaa

SEQ ID NO: 319230 - DNA, 1377 bp, Pseudomonas aeruginosa
atgagtagcggacgtatcgttcaaatcatcggcgccgtgatcgacgtggaattcccgcgcgatgccgtgccgagcatctatgaagccctgaaggttcagggcgttgaaaccaccctggaagtccagcagcagctgggcgacggcgtggttcgttccattgcgatgggttccaccgaaggcctcaagcgtggcctgaacgtggacagcactggtgctgccatctccgtgccggtcggtaaagcgaccctgggccggatcatggacgtactgggcaacccgatcgacgaagccggtcccatcggcgaagaagagcgctggggcatccaccgtgaagctccgtcctatgccgaccaggctggcggcaacgagctgctggaaaccggcatcaaggtgatcgacctggtctgcccgttcgccaagggcggcaaggtaggcctgttcggcggcgccggcgtgggcaagaccgtcaacatgatggaactgatccgtaacatcgccatcgagcacagcggttattccgtgttcgcgggtgtgggcgagcgtactcgtgagggtaacgacttctaccacgagatgaaggattccaacgtactggacaaggtagccctggtatacggccagatgaacgagccgccgggtaaccgtctgcgcgtcgcactgaccggcctgaccatggccgagaagttccgtgacgaaggccgtgacgttctgttgttcatcgacaacatctaccgttacaccctcgccggtaccgaagtgtccgcactgctgggccgtatgccgtccgcggtgggctatcagccgaccctggccgaagagatgggcgttctgcaggagcgcatcacctccaccaagaaaggctcgatcacctcgatccaggccgtatacgttcccgcggacgacctcaccgacccgtccccggcgaccaccttcgcccacctggacgcgaccgtcgtactgtcccgtgacatcgcctcgctgggtatctaccccgcggtcgacccgctggactccacctctcgccagctcgatccgctggtgatcggccaggatcactacgacaccgctcgcggcgtccagtatgttctgcagcgctacaaggagctgaaggacatcatcgcgatcctgggcatggacgaactgtccgaagccgacaagctgctggtggcgcgtgctcgtaagatccagcgcttcctgtcccagccgttcttcgtagcggaagtcttcaccggttcgccgggcaagtacgtttccctgaaggacaccatcgctggcttcaagggcattctcaacggcgactacgatcacctgccggagcaggcgttctacatggtcggcggtatcgaagaagcggtcgagaaagccaaaaaactgtaa

SEQ ID NO: 319231 - DNA, 426 bp, Pseudomonas aeruginosa
atggccataacagtccattgcgacatcgtcagcgccgaggcggagatcttctccggcctggtcgagatggttatcgcgcacggcgctctgggtgacctgggtatcgccccgggccacgcgccgctgatcaccgacctgaaaccgggccccatccgcctggtcaagcagggcggcgagcaggaggtgtactacatctccggcggtttcctcgaagtccagccgaacatggtcaaggtcctcgccgacaccgtggttcgtgccggcgacctcgacgaagcggccgcccaggaagccctgaaggctgccgaaaaggcgctgcagggcaagggcgccgagttcgactacagcgccgctgccgcgcgtctggccgaagccgcagcccagctgcgcaccgtccagcaactgcgcaagaagttcggcggctga

SEQ ID NO: 319232 - DNA, 1365 bp, Pseudomonas aeruginosa
atgtcccttgaaatcgtgattctcgccgccggccagggcacccgcatgcgttcggccctgcccaaggtcctccatcccattgccggcaagccgatgctcggccacgtcatcgactgcgcgcgccagttgcagccggaacggatccacgtggtgatcggccacggcgcggatctggtgcgtgagcggatggccgccgacgacctgaatttcgtgctccaggccgaacagctcggtacgggccatgcggtggcccaggccctaccgttcctcagtgcagaccaggtgctgatcctctacggcgacgtgccgctgatccagctggacaccttgcagcgcctgctggcgcaagtcaccccggaccagttgtcgttgctcaccgtcgacatgctcgaccccaccggctacggccgcatcgtccgtgacgaccagggcgcggtgcaggccatcgtcgagcacaaggacgcgaccccggcgcagcgccagatcggcgagatcaacaccggcatcctcgcggtgccgggcaagcgccttgccgactggctcggccgcctgtccaacgacaacgcccagggcgagtactacctgaccgacgtgatcgccatggcggtcggcgacggcctggtggtagccagcgcccaaccgctggacgcgatggaagtgcagggcgttaatgaccgcatgcaacaggcccagctggagcgtcactaccagcgcctgcgcgcggaggagctgatgcgccagggcgtgaccctgctcgatccgcagcgcctggatgtccgtggcgaaatctcggtcggccgcgacgtgctgatcgacgtcaacgtggtgctggaaggccgcgtggtgatcgaggacgacgtgcgcatcggaccgaactgcgtgattcgcgacagcgtcctgcggcgtggcgcggtgatcaaggccaacagccatctggaaggcgcggagctgggcgagggtagcgatgccggtccgttcgcccgcctgcgtccgggcagcgtgctcggcgctcgggcccatgtcggcaacttcgtcgaactgaagaatgcccgcctcggcgagggcagcaaggccggccacctgagctacctgggcgatgccgagctgggcgccaactgcaacatcggcgccggcaccatcacctgcaactacgatggcgcgaacaaattccgtaccgagctgggcgacgatgtgttcatcggctcgaacaactcgctggtggcgccgctgaagatcggcgatggcgcgacgaccgcggccggctccaccatcacccatgaggttccggcgaagaacctggccttcggccgcgcccggcagaagaacctggaaaactggaagcgcccggaaaaaatcaagaagtaa

SEQ ID NO: 319233 - DNA, 522 bp, Pseudomonas aeruginosa
atgccgaagcctgcgaaatggatcgtgctggggctgctcatagcctgggcggtgctgcccgaatggccgcggatacccgtcgaaggcgccagtgcccgcgactggaatccgcgaaccttctggttcgagccctgggggcgctccggagtgcacaagggcatcgacatcttcgcccgcagcggcacccccgtacgctccgccagctacggcctggtgctctatcgcggggagatcgccctcggcggcaaggtcgtcctggtgctggcgcccaagtggcgcctgcattactacgcccatctcgatagcctcgacacctatccgggccagccggtcctcaccggttcccgcctgggtacggtcggcaccaccggcaacgcgcgcggcaagccggcccacctgcactacgcgatcatcaccttgctgcccctatccctggctggccgacgccagcacccagggttggaagaaaatgttctacctcgatcccaatacggtgctgccgagccgatgaaaagtcattga

SEQ ID NO: 319234 - DNA, 774 bp, Pseudomonas aeruginosa
gtgatctcgaaacgtaatacgccgcaacgtcgccatgccatcctcgcgctgctttccgagcagggcgaggtcagcgtggacgcactcgccaagcgcttttccacctcggaagtgaccatccgcaaggacctcgccgccatggaaagccacggcctgctgttgcgtcgctacggcggtgcggtgccgatgccgcaggaactgatcggcgaagccgcacagcccgtctcgccctacaagcaggctatcggtcgcgccgccgcggcgcgcatccgcgagcatgcgaggatcatcatcgacagtggcagcaccaccgcggcgatgatccccgagcttgggcacaagccgggcctggtggtgatgaccaactcgctgaacgtggtcaacgccctgcgcgaactggagcacgagccggtgctgctgatgaccggggggacctgggatccgcattccgagtcgttccaggggcaggttgccgagcaggtgctgcgttcctatgacttcgaccaactattcatcggtgccgacggcatcgatctcgaacgcgggacgaccacgttcaacgaattgctgggcctgagccgggtgatggccgaggtcgcccgcgaggtgatcgtcatggccgaggccgacaaggtcggtcggcgcattcccaaccaggaattgccctggagcagcatccataccctgattaccgacgagcgcctggaatcttccgcgcgcgaacagataaccgcccggggcgtcacgctgatctgcaccccggtcgaggcctga

SEQ ID NO: 319235 - DNA, 1836 bp, Pseudomonas aeruginosa
atgtgtggaatcgtaggcgcgatcgccgagcgcaacatcacccccatcctcatcgaaggcctcaagcgcctcgagtatcgcggctacgacagcgccggcgtggcggtcttcgataacgaaggcaggctgcagcgctgccgccgggtcggcaaggtcgccagcctggaggaaggcctggccggtactccgctgctcggccgcctgggcatcgcccatacccgctgggcgacccacggcgcgccaaccgaaggcaacgcccacccgcatttctccagcgacgaactggcggtggtgcacaacggcatcatcgagaaccacgaacctctccgtgagcggctcaaggggctgggctacgtgttcacctcgcagaccgacaccgaggtcatcgtccacctgctgcaccacaagctgcagtccatcggcgacctgaccctggcgctgaaggacgcggtcaaggaattgcacggggcctatggcctggcagtgatcagcgcggcgcagccggaccgcatcgtcgccgctcgcagcggcagcccgctggtgatcggcctcgggcttggcgagaacttcctcgcttccgaccaactggcgctgcgccaggtgaccgaccgcttcatctacctggaagaaggcgatatcgccgagatccgtcgcgacagcgtgcgcctgtgggatgtccagggcaacgacgtgcagcgcgagaccgtgcagtaccacgaaggcgccgaagccgccgacaagggcgagtaccggcatttcatgctcaaggaaatccacgagcagcccagcgtcgtgcagcgtaccctggaaggccgcctcgggcagaaccaggtaatggttgaaagcttcggtccgcaggcggcggagctgttcgccaaggtccgcaacgtgcagatcgtcgcctgcggcaccagttaccacgccggcatggtcgcccgttactggctggaaagcctgaccgggattccctgccaggtggaggtcgccagcgagttccgctaccgcaaggtcgcggtgcagccggattgcctgttcgtcaccatctcccagtccggtgagaccgccgacaccctggctgccctgcgcaacgccaaggagctgggcttcctctccagcgtggcgatctgcaacgttgccaccagttcgctggtgcgcgaatccgacctgaccctgctgacccaggccggcccggaaatcggcgtggcctcgaccaaggccttcaccacccagttggtcgccctgctgctgctgaccctgggcatcggccaggtgcagaagcgcctggccgatggcgtcgaagccgagctggtggacgaactgcgtcgcctgccgacccggctgggcgaggcgctggcgatgaaccggacggtggagaaggtttccgatctgttcgccgagaagcaccacaccctgttcctcggccgtggcgcgcagttcccggtggccctggaaggcgcgctgaagctcaaggaaatttcctatatccatgccgaagcctacccggccggcgaactcaagcatggcccgctggcgctggtggacagcgacatgccggtggttaccgtggcgccgaacaacgagctggtggagaagctcaagtcgaacctgcaggaagtccgcgcccgcggcggcgaactggtggtgttcgccgacgaaggcgcgggcatcgaggctggcgagggcacccatgtggtgggcatgccgcacatcggcgacgtgctctcgccgatcctctacaccatcccgttgcaattgctctcgtaccatgtcgccgtgctcaagggcaccgacgtcgaccagccgcgcaacctggccaagtcggtcaccgtcgagtaa

SEQ ID NO: 319236 - DNA, 1206 bp, Pseudomonas aeruginosa
atgaaccagaaaatttccccgccttcacagaagctcgacggcctgttcctgctggccctgtcgatggccgtattcttcgtcggcgtgaccgagttcatgctgtcctccatgctcgggccgctggcgcaggcgttccacaccactaccagcggcgccgcttggctgatctccagctacgcgttctcctatgcgatcgccgcgccgttgctgggctacttctccgaccgcatgcaacgcaggaagctgctgctgctcgccctggtcctcttcgcggtcgatactctggccatcgtcatcgccccgaccctggaaattgccgtcgtcctgcgggtgatcgggggcatcgcctcggcaatcatcatcccgaccaccttcgccctggtcgcggaggtggtcgccccgcaaagacaggccggtgccatgggccaggtgatgctcggcatgaccctcggcattgccgccggcccggcactggccggcctcctctcggacttcttcggctgggcggcgcccttcctgttggtctcgtgcggttgcgtgctggtcttcctgatggcgcgccagcgccttcccgtgcaagccgtggcaccgcgcgccgagggccatgcgctgggctggtgcaggcaatggagcatcctcaggccactgatcgccaagggtgcctggaacggcaccggggtcgccggcctgcttctctcgggagaggtgctgcgccagcgctacggcttcagcaccgcgcagataggcgtcagcatcgccgccttcggcgtgggcctggccgtgggcaacctcgccgcgggttacctgcgacgttatctgaagcgcgacgaagacatgctcctgctggtgctggcgctcctggtgttatcgatgtcgaccttcatgctcctgccgctaccgttgcccgtggcgctctgctgcctgggcgcctggggcgccgcgctgggcctgggcgcgccggcgggcacggtggtactcgcctcgcgctccgggccggacaagggcatggtgctgtcgttcgccgagacgttcaacaacatcgccattctcgccagcgtgcccctggctgtgcgactgctggagctgaaggggccgcccgccaccctgtgggtattgggcatcggcctggggatcggcgcctggctcaccgtgctggactggttcgccagccgcaggagcgacgaggcgctgccgttgcgcgattga

SEQ ID NO: 319237 - DNA, 891 bp, Pseudomonas aeruginosa
atgaacccaaacgccacctatgctctggcttcggccgaactgatcgacggaaagctacgcttcgacagcagcgatggcttcgcccgcgccatcgccgacgggttcttcttcgtcaagtcaccgagcctggacctggcagccggcgataccttcgcccgcaacttctacctgcctcgccaggagggcctcggcgcgccctaccagggtttctcgcagtggaccgaagatcggctggcgcgccgggaaggatatttctcccgcgacgtcgaccaggtcgagcagttcttcctcgagagccgattctggcagacagtgttcccaggccctttgctgcggcaggccgaacggatgcggagtttcagtctcgaggtgctgcgggccgtactcgcggaactggacctgccggtagagctgtgggacgaggccacgggacgctgcctctccatgcaaggcacctatcacctgacctttaaccatttccgcagccacgtccgggcccgcgggctgaatgtgcacaaggactcgggttgggtgaccatcctgcgctcgctggagcctggacttgaggttcttcgcgagggagactggctgccggtctcgccccgtcccggcgaattcatcgtcaacttcggctgcgcgatggagatactgacccgtcactcggccactcctgtcgccgccgtcgctcaccgagtgcaggaacaattgccaggccaagccgatcgcttctcctatgccctgttcgtggatagcagcctggacccacggacatgccctggcctgtttcgctatcttccaggccacggcctggtgctggaagcagatttcgaaatgttcctcaacgaaattctgcacaatacttaccaagagaatacccagggtctatattga

SEQ ID NO: 319238 - DNA, 675 bp, Pseudomonas aeruginosa
ttgtccacctatacggggttcaaggaatgccagataccaggggcctaccaaggctatttcgacagggagcacgatcagtgggagaacgtctacatcgaacgaggcaactggtctcttatacctgaggccgtggctgcactgggcgtacaaatggcggagctgggtattggcgtcctgcgcgcggtgctcgcggagctagacatcccccgcgcggaatgggcacgcctgaccagcggcctgtccgaaggacagggccaccagatgttcggcttcaatcatttccgcgccagcaagccgatccgtggttccaagttccatcgagactcgggctgggtcaccgtcctgcgctccaccgaacccggactgatcgcctatatcgacggccagctccgctcgatcaacccactgcctggccatctcatcatcaacttcggcagttccatggaagtgctttccgaacacctgtcgagaaaggtccacgctaatgtccacggggtagcccgcaccgagcgcgcgagcccggacgaacgctactcctatgtcgttttcctggatagcgatctgggcggcgacatctaccgatacggtccggccggagcccagaaggtacagacggtcctcgaattcgccgaacaggaggtcagccggacctacaacgacgacatcctcctctga

SEQ ID NO: 319239 - DNA, 882 bp, Pseudomonas aeruginosa
atgagcaatatccttccatccgcccggatgctcgacggcatgctgcacttcaaggaagaagacggtttcagtcgcgcgcgcaagctaggtgccttccacctcgagcacccacggggctgggacttttcggccggcatcgccctggcccagagctattatctggaacccgaggtagacgccgacaacgccttccgggggttccatcgcaaggatctcggcaagtccctgctgggctattcccgcacaggtgccgaccaggacgaactgctgcagatcgaatgcggcctgtggcgggaatatcttcccgcccccgccgccgacctgctttgggcaatgaacgacctgaaccgcagtgttctctcgcaactgttcgcgctggtcggcatcgaggaaagacatttcgacctgatagccggcggcatgtcttccaaccaggcgctgcagtactgcatcttcaatcatttccgcgctgacagcgcccacccggtgggtctcaccgcccacaaggacagcggttttaccaccctgctctacaccacggagcctgggctggagtcgctggaaaatggctcctggattcctttcgatcccatgcccggccatttcaccctggtacttggacactccttcgaactcctaaccgagaagtccgccacccctgtccaggccagctatcaccgcgtccgcagaatggaaccgcaagagcgaaaagcggacaggttcaccttcggttcctacatcggtccgcgctgggaccaggacctgtaccagatcagcggcgagaccgttaagccggtgcaatccttcctcgagtttcagaaacgcaaagccgcggaaatgggttacgaattccatcccaaggtggagacggctcatcgctga

SEQ ID NO: 319240 - DNA, 1431 bp, Pseudomonas aeruginosa
atgaacagcaaagagaatagcgcgcccttccccggcctcatcgcccatcattccggctcttgtccggctaccggacacgccgaggctttccaccatgccacggtgtgccagggcctggacgcctccacctacttcgcccgttccggcatcgcggaactggcggagaacaacgaaggactctgtaccttctggctcggagacgacctggcgctctaccagacgaacaacgcgcccctcgtcgacgacgaggatctggcgccctcgatcaatgcgaacgccgagctcttcggttccttcctcggttccctgcccgcgcaggacgagcgacgcaaggccaagcgcgccgtggtcgaacgcgtgctcggcagcaaccggttcgttaccagtctggacccgcatgtacgcgaaatggcccaacactacctgcgagaggtggcaggtcgctcgctgcccttgcaggacttctgcctgcacatggtagcgcgcatcgacagcgggttgcccggcgtcctggattttcatcagaagcccctgacccactacctgcaaagcaccgaatacggagtgatcgccagggacttcttcgagatcgcctcggaggtcatcagcaagatgaatccggaatcgatcgagaacgccgacatgatcgtcgagatgacgcgcgacatgctggattcgaactacgaatcgattgtccgggctcctccaacgaacatgatcctcgcccagttcgactgcttctcccggcccttcacacgcgaaaccatacgaacgctggatgccgcatcactcaaggaactgggtacgatcatcgtcgcgacctatgacaccacggccctcagtctgctctggacgctcacctacctggaggacaacccagccgagaaagaacgtctgctgggtgtagtagacaacccggaacaagcgctggacgaggcctacctactggtgcttgaagcgatccgcctgggtggcagcaaccccactgcattgtggcgccggaccaaccggccgatacgcatccgccatcgcggcaccgaggttacgattcccgccaatacgatgctctggctcgatcgacggcgggccaatcgcgacgcgtcgctgttcccccacgccgagcggttcgatacggacaacatccggcagctcatccgcaaccagaccagccacggccaggccgtgtcgctgctggccaggaaccgctacgaaatcaactccttcaacatggtcaacacccatagaagcccgcgcaaatgcccaggccgcctgttctccgtcagggaacaggcgctgatcctgacggagctgtaccgcctctacaaggtctgcgtgacagaagccgactccacgctggcacctcacagttccatgccgcggccccgacgttcgggaaacatcatcctcactgccagggccgccgccctgtga

SEQ ID NO: 319241 - DNA, 942 bp, Pseudomonas aeruginosa
atgagcgggcttccccagttccatccctgcaaggcctatctggatgattccaggcacctggtcttcaaccaggcggatggctttgcgcgggcgctacgcgacggcttcttcgccctgcgtattccagaagaactggatctcgcaccaggtatccgcttcgcccaagagttctaccaacctgccgtggaagagccccatgcagacgcccgttaccggggtttcaggaaccttcccgacatctatttcgaccgggagaacttccagaccgaacatatccttgccgacgccagacaacgccaggcgtcgtttccagacgaagtgaaccgactgtgcgaacggatgcacgagatcgcccggctcatcctgcgtgagatcctcggcagcctcggcgtagcgccacggttgtggcccgacgtcaccggcgggaccagcgaagggaagggcgtcacctggttcgccgtcagccactaccgacccgagcgcaacatgcagggcgctccagcgcacaaggacaccggcttcgtcaccgtcttgtactgcgaccagccaggcctgcaggcgcgactcgaggaaggatgggtcgaggtcccccccatggaagggcatttcctgatcaatttcgggggcagcctggaacttctcaccgccaggttgccaatcccggccgccgcggttctccaccaggtccgacagagttcatcgacggtggagcggggcgatcgctactccttcgcggcattcctcaatccacctgcgaccggcgcgctctacagcctcaccgccgacggccagcgcgccgagccggtcattccggtagagaccttccttcgcgaattcaacgagcagacctggaaggacagctataccgatttcggcatcgccgaagggcctggggccgccgccccagccgacgaccacgcaaaccggtacctgcgcccatga

SEQ ID NO: 319242 - DNA, 969 bp, Pseudomonas aeruginosa
atgagttcctctcccaagccggtggcctggcaattgaaccgaggttcgatctaccaggatgtctacgagaagagaatcgataaacgtcctgtagataccctggcaaaactgcaagaggcctatctggaggacgagcatctggtcttcccctccgaacaaacccgcgtggcggcgttgagagatggcgttttcctgttgcgaataccggacgatttccaggtccgcgactgcgacctgttcgccagcaatttcttcaagggcccggccatcgccccctacggtgcatttcgcgaactcacagcggaaaccttcgacgatcccctgctgggttttcatgaacgaatcaaccagatcgagcaattcctgctggaacgacgcttctggaaaacccactacccagaggaaatcctccaggccggcgaacagctgaccgcttacagtcggcagttgctgcgtgccatcctgtcgctcaccgacatcgatccggaattctggagcctggctaccggcggtgcctcggacgcccagggttcctaccatttaaccttcaatcactatcgcccgcgcttcgcgggtgtcgggctggcttcccacaaggacgatgggttcctgacgctgttacgcaccaccgaaccggggctggaagtcaaccgcaatgatcgctgggaggcgctggagccctcacccgatcatttcgtggtcaactttggtctctccatggaagtgcttactcgcggctcctccacacccgtcagggccatcatgcacagggtcaggcatcagacccacgaccgctgcagcttcgctcatttcacctccagtcactgcactcccggcaccgaggcaggcatctacagctatgcaacgggagagggactcaggagagtctgcagttcgcgcgacatcatcgacgcgaacgacgaggagatctaccagggtacggtcatcagggagacggacaatccatga

SEQ ID NO: 319243 - DNA, 735 bp, Pseudomonas aeruginosa
atgaacctgatagcggaagatttcagcacacgaagccttctagcgggtgagcggtataaagcgaagatcgctttcgtttcaccacacaccaggcgtaacagttttgaggacgagccaaagtgctttctgggcgtcagcctggaaaatagaaatttcactcccaaccgcttccattccatggtcgagtgggcggctcggcgctttgagaaatgcagtattttgataggcgaccatattcaccggattaccttgcagtccacgcgggacatgcccgaggaagatgcccgccgcgaggccgtcagactgggcgacgcgttcatggaggaaagccggctcatcgtcgatgcctaccgacacgccacggacttcgagtacataacctgttcggagatccaggccagtacagaatgcaaggatttctatacaagtttgcgtaactatttcctggagcactctggattccgagattcggtggaaaagtttggaagaaactaccaccggcataattgggagaagttgagtgaagaacagcagaggcatcgcctcgacttttcctcgcgatattttctcgaagagttttccgtattcgcctgcctagtaagaaaaggcttcaaagtcatggcctatcccggtgctttcagtacgttggcagaaatagcagcgggtgactttccaggaatgctcgatgaattgcagaaacttaccgtggtttccctgcaattgaaaaggagatag

SEQ ID NO: 319244 - DNA, 624 bp, Pseudomonas aeruginosa
atgaacgagaccgtatccctcgaaacacgcgaagtacgctttctctccgtgttcgacttcgacggtaccctgacataccgagacagcttcgtgcccttcctgcgtttcgccttcggcaaccgggtgttcgtccgccgcatgctgcgcatggcaggacccagcctggcctatctctgccggcgtatcgaccgcgacgacctgaaggcgcgcctgatcgccaccttcctcaccgatgtgcccgtagatgtgctggaagagcgggcgctggcctaccagaaccgcttctgggaaacactgatgcgtccccacgcattgaccgcggtggccgaccaggtcagcagcggcagcaccgtgaccatctgttccgcctccccttcgctgctactcaggccgttcgccgagaagctcggcgtgcacctgatcgccaccgagctggaagtggtagacggcgtactgaccggcaggatcgtcggccgcaactgccggcgcgacgagaaagtctgccgcctggagcggcactacggtccgctgacccaatactccctgcgcgcctggggcgactcgcgcggcgatacggaactgctggcggcggcgctggagcgcttctggaaaccgttccgctga

SEQ ID NO: 319245 - DNA, 570 bp, Pseudomonas aeruginosa
atgattgcacagctcccctctgagttgctgtccctgcaactgccgttgcggatccgcatcggcgatgctcaggcgttcgatctggggccggatccacaggtaaccatggtcattcgcgacccctcgctgctaaccgagatcacccatcccagcctcgatgcgctgggcaaggcctacgtcgagaagcgtctcgacatcgaaggaccgatcagccaggtcatcggtatcggcgatgccctcagcgaagcgctcggcgaacccgatggcggcgcgccgccggttcgcgaaagccatgacaaggacaccgacgccgaagccatccattaccactacgacctgtccaacgacttctaccagctctggctggatccggaaatggtctattcctgcgcttatttcgagaccggcaaggaagacctcgccaccgcgcaactggccaagctccgtcacctgtgccgcaagctgcgtttgcagccgggcgagaagctgctcgatgtcggttgcggttgggggggctggcgcgcctggccgctcgcgagttcggcgtcgaggtcaccggcatcacattga

SEQ ID NO: 319246 - DNA, 618 bp, Pseudomonas aeruginosa
ttgagcaaggagcagctggcgctcggccgggagcgagtcaaggccgaaggcctggaggaccgagtcaccctcaagctgctggattaccgcgacctgccgcgcgatggccgcttcgacaaggtggtcagcgtcggcatgttcgagcacgtcgggcacgccaacctggggctgtacttccagcaactgtacgatgcggtgcgtcccggcggcctggtgatgaaccacggcatcacctcgcgctacaccgacggccgcccggttggcaagggggccggcgacttcatcgatcgctacgtgtttccccacggcgagctgccgcacctgtcgctggcggtggcgcggatgagcgaagccgggctggaagtagtcgacgtggaaagcctgcgtctgcactacgcccggaccctggatttctggagcgccaacctggaagctaggctgaaggaggcggctcgcctggtgcccgaggaaaccctgcggatctggcggctgtacctggccggatgcgcctacggcttcaagcgcggctggatcaacctgcaccagatcctcgccattcgcccccacgaggatggctcccacgagctgccctggtcgcggcgcgacctgtacgcctga

SEQ ID NO: 319247 - DNA, 960 bp, Pseudomonas aeruginosa
atgtcgctgagcagacgcttcggtcttttcacgcttgccgcaacggtgaccttcagtaccgcggtctttgccgcgccgaccttcatcaatatcctcaccggcggcaccagcggggtctattaccccataggggtcggcctctcgcagatctacggacacgatatccagggcgcgaaaacctcggtgcaggccaccaaggcttcggtcgagaacctcaacctgttgcaggccgggcgtggagaactggcgctggcgctgggcgactcggtcgccgacgcctggaacggggtcgccgacgccggcttcaaggcgccgttgaagaagctgcgggctatcggcaatacctatccgaactatatccaggtagtggccagccaagcctcgggcatcaagaccctggccgacctgaaaggcaagcgcatttcggtgggcgcgcccaagagcggtaccgagctgaacgcccgggcgatcttcaaggccgccggcctgagctacgaggacatgggcaaggtggagtacctgccctacgccgagtcggtggagctgatcaagaaccgccagctcgacgctacgctgcaatcctccggcctgggcatggcggccatccgcgacctggcctcgaccatgccgatcaccttcgtcgcgatcccggcggacgtggtggcgaagatcgacagcccggcctaccacgccgcgagcattcccgccggcacctacgacggccaggagcaggacgtgccgacggtggcgatcgacaatatcctggtcagccactccggggtcagcgacgagctggcctaccagatgaccaagctgatgttcgacaacctgccgcgcctggtcaccgcccatgctgccgccaaggatatcgccctggacaaggcggcgaagaacctgccgattccgctgcatcccggcgccgagcgcttctacaaggagaagggcgtactgcccgagtga

SEQ ID NO: 319248 - DNA, 2025 bp, Pseudomonas aeruginosa
atgagcgatcatcagaacgggctgcacctcgaggcggaaaactggccgcgcgcgttgttcgccgtggccctggccttttccgtgttccaggtcgtcaccgcggcctttcccctgatttccacccaggtcctgcgggcaatgcacgtcggactgctgttgctggtggtgtacatcagctatcccgccttcggcataggtcgcccctggcagccgctggcctggttgctgggcatggccggcctgggcacggcggtctaccagtgggttttcgagggcgacctgatccagcgctccggagagctgacccaggccgacatggtcgtcggcgtggtgctgatcgtcctggtcttcgaggcggcgcgacgggtgatgggcatcgccttgccgatcatctgcgcgctgtttcttgcctatggcctgttcggcgaacacctgccgggcgacctggcccaccgcggctacggcttcgaccagatcgtcaaccagctgtcgttcggtaccgaaggtctctacggcacgccgacctacgtatcggccacctacatctatctgttcatcctgttcggcgccttcctcgagcaggccggcatgatccgcctgttcaccgatttcgccatgggcctgttcggtcaccgggtcggcgggccggccaaggtctcggtattctcctcggcgctgatgggcaccatcaccggctccggcgtggccaacgtggtcaccaccggacagttcaccatcccgctgatgaagcgtttcggctacaagccggcgttcgccggcggcgtcgaggcgaccgcgagcatgggcagccaactgatgccgccggtgatgggggcggtggcgttcatcatggccgagaccatcaacgtcccctacgtggagatcgccaaggcggcgctgatcccggccctgctgtatttcggctcggtgtaccggatggtccacctcgaggcccgccgggccgatctaaagggcctgccgcgcgatcagtgtccgagcgcctggggtgccgtccgcgagcgctggttcctgctgattccgttgctggtgctgatcgcgctgctgttctccgggcgcacgccgctgttctccggaaccatcggcctggcgctgaccgccatcgtcatcctcggttcggcgatcatcctgcgggtgtcctcgctcggcctgcgcatcgccttctgggtggcgctggggctgctctgcgcggggttcttccgcctcggcatcggggtgatcttcgtcgtgatcgcggccctggccctggcctgctggttcgtccgtggcggccgggaaaccctgcgcatctgcgtccgcgccctcgccgaaggtgcgcgacatgcgattccggtgggcatcgcctgcaccctggtgggagtcatcatcggggtgatttcgctgaccggcatcgccaccaccttcgccagctacgtgctcgacctgggacgggagaacctgctgctgtcgctggtcctgaccatggtcacctgcctggtcctgggaatgggcatcccgaccatccccaactacatcatcaccagctccatcgccgcgccggccctgctggaactgggggtgccgctgatcgtctcgcacatgttcgtcttctacttcggcatcctcgccgacctcacccctccggtggcgctggcctgtttcgcggccgcgccgatcgccaaggaaaggggattgaagatcagcttctgggcggtgcgcatcgccctggcgggtttcgtggtgccgttcatggcggtgtattccccggcgctgatgctgcaggaaggcggttggggggcgacgctctatgtcacctgcaaggcggtgctggccatcggcctgtggggcatggcttccatcggctacctgcaggggccgctggcctggtgggagcgcctggtggcgttcgccgccggggccagcctggtcctggccttgccgatcagcgacgagctgggcttcgtcctcggcgcgctggtgatcggctggcacctctggcgccagcgtgcgcgcgaggcggtggcgtga

SEQ ID NO: 319249 - DNA, 1245 bp, Pseudomonas aeruginosa
atgcgtagctgtatatcagtcttccggccggccctgctggcactgttcgtctcggcaagcggctcggccggcgccgacgcggctgtggaaaacccgcggatcggccgtgccgccgatctctatgaactgatcccggaataccagccggatacctaccggaacatggacaaggtctatccgacccgggttatccacaaggggaccaaggtccgtccgctgccggcgggtgtggccatcgcgccgcgctaccggatcggcggcgaggaatacggcgtcgacgatttcatgcggcgcaaccgcgttggcggggtgctggtcctcaaggatggcaaggtcgccctggagcgctacggcctgggcaacgacgaacgcacgcgctggacctcgttctcggtggtcaagtcgatctcctcgaccctggtgggcgccgccgtgcagcagggcctgctggctctcgaccagcctgtggacaagtacctgccgagcctggccggctccgcctaccagggggtgacggtggagcaggtcctgcagatgagttccggggtccgctggaacgagacctatcgcgatccgaagtccgaccgcaggcagatgttcgacgcccagctcgccgaacgtcccggtggcatcctgcggctgctggcgagcctgccgcggcagtacccggccggtacccacttcacctacagcaccggcgagtcgcacctgcagagcgagctgctgcacgcggcgacccgcattccggtgagcgactacctgtccgagcggatctgggcgcggatgggcatggagagcgacggcttctggcaactggaatcgccggccgggcaagagatcggcagcagcggcttgagcgcgaccctgcgcgactatggccgcttcggccagttcgtcctcgaggacggggtgatcgatggcgaacgtatcctccccgaaagttgggtcgatcgtgccagtcgcgtcgaggcttcttcccacctggccccgggcaagctctacgatggcgaatacgcgctcggctacggctaccagtggtggaccttcccggtgggcgccaaggccctgcccgagcatgacggcggggccttcgaagcccagggcatcttcggccagtacctctacatcaaccgcaaggagaagatcgtggcggtggtctggagcgcctggccgaagccggagatggacgatcgcgaggaggagacctatgccttccttggcgcggcggtgaaagccctgcgctag

SEQ ID NO: 319250 - DNA, 1338 bp, Pseudomonas aeruginosa
atgcaaagcctgctgatccgcaatgcccggatggtcaacgaggggcaggtacgcgaaggcgatctgctggtccgccacggtcgcatcgaacgcatcgccggctgcctggaaaactgcggcgccagccgggagatcgatgccgccggacgctacctgctgccgggaatgatcgacgaccaggtgcactttcgcgagccgggttatccacagaagggctcgatcgccagcgaatcccgcgccgccgtggcgggcggcatcaccagtttcatggacatgcccaatacccgcccggcgacgctgagcctcgaagcgctggcggaaaagaagcgcctcgccgccgcccatagcgtggccaactacggtttccacttcggcgtcagccgcgacaacctcgacaccgtggccgccctcgatccacgcgaggtcgccgcggtgaaggtgttcatgggcgcctccaccggcgacatgctggtggacgacctgccgaccctggagcgcctgttcgccagcgttccgaccctgctgctgagccattgcgaagacacgccgcggatcgaagccaacctggcgcgctggcgacaacgcttcggtgaacgtattccggcagccgcccacccgcgcattcgcgacgccgaggcttgctaccgttccaccgccctggcggtggaactggcgcaacgacatggcacgctgctgcatgtcctgcacttatccacagcgcgtgaactggccctgttcgaggacaagccgctgtgccagaaacgcatcaccgcggaagtctgcgtccaccatctgctgttcgacgacagcgactacgcccgcctcggccatctgctcaagtgcaacccggcgatcaagagccgcggggaccgcgacgccctgcgcagggcgctggccggcaaccgcctggacgtgatcggcaccgaccacgcgccgcacgcctgggccgagaagcagcaggcttatccacaggcgccggccggcctgccactggtccagcatgcattgccggcactcctggagctggtccgcgaaggctggctgtcgctggccaccctggtggcgaagaccagccaccgggtcgccgaactgttcgccatcgccgatcgcggtttcctccgcgaaggttactgggccgacctggtgctggtcagcgaactggagcacccggcgctggccagcgccatgccgctgctgtcgcgctgcaactggacgccgttccgccaccgggcattccaccatcggatcgataccaccatcgtctccgggcaactcgcctggcacgcgggacgcctgtccgacgattgccagggactgcccctgcggttttcccgctga

SEQ ID NO: 319251 - DNA, 561 bp, Pseudomonas aeruginosa
atgatccgcaagaatccctccggcgacctgccggtgatcgacgaatcggcctatgtggacaagaccgcgatcatctgcggcaaggtgatcatccaggccaacgtcttcgtcggtccctacgcagtgatccgtgccgacgaagtcgacgccgacggcggcatgcaaccgatcgtgatcggcgccaactcgaacatccaggacggcgtggtgatccattccaagtcgggtgccgcggtgaccatcggcgagcacagctccatcgcccaccgctccatcgtccacggtccttgcgaagtcggcgaccgggtcttcatcggcttcaacagcgtgctgttcaactgccgggtcggcgatggctgcgtggtccgccacaacgcggtggtcgacggctgcgacctgccagcgggtttctacgtaccgtccaccgagcgcatcggtccgcgcaccgacctggcgagcatgccgcgggtcagcgtttccgccagcgagttctcggaagacgtggcgcgcaccaacgtcgacctggtacgcggctacaagtcgctgcagaacgagttctga

SEQ ID NO: 319252 - DNA, 897 bp, Pseudomonas aeruginosa
atgaatgccttgacgcttcccgatatcgcccgccagaccaccaccgccgatcttcccctggactgggtcggcatgcagggcatcgcccttcccgtgcagatcggcgggcagagggtcgccgccgaagccgatgccggtgtcagcctggacgacccgcaggcccgcggcatccatatgtcgcgcctctacctggcgctggccgaactggaacagggcgagctggacctttcctgcctgcgcgccgtcctgcaacgcttcctcgacagccacgccggcctgtcgcgtcgcgcctacctgcgcctacgcctcgcgccgctgctgcggcgtccggcgctggtcagcccgctgagcggctggaaacgttatccactggtgctggacacgcgcctggaaggcgatgacttccaggccgaagtccatctcgagctgacctactcctcgacctgcccctgttcggcggcactggcccggcaattgatccaggagcgcttcgaccaggacttcgccggacagccgctcgatcatgccagcgtgctcgcctggctcggcagcagcgccggcatcgtcgccaccccgcacagccagcgcagcagcgcgcacctgcgcatcggcctggcggaagactgcatcggactgcccctggaagagctggcggatctcggcgaaagcgccctcggcaccgcggtgcagactgcggtgaaacgcgccgacgagcaggccttcgccctcgccaacgggcagaacctgatgttctgcgaggacgcggtgcgccggctgcaccgcgccctgcagggttatccacaggcgagccggttctccatacgggtcgtccatgcggaaagcctgcatgcccatgacgccgtcgccgaaagccattggcagcgaggtgcagcatga

SEQ ID NO: 319253 - DNA, 1194 bp, Pseudomonas aeruginosa
atgaagcgccgtcgtctcctgcaaagcctgctcgccggcctggccctccagccgttcctggccgccagcgccaatgtacgaatccgccaggcccgggcctggaattcctcggaaagctggcgcctggtgctggaactggacggcccgccgcgttatcgaaccttttccctgcaggcccccgagcggttgatcctcgacctgcccgacgcgcaattgctcgcaacgctctccgagctaccgctggacggccccgtgcgcgccatacgcagtggccaactgggtggcggcgggacgcgcatcgtcctcgatctgcgccaagcggtcaggccgcgcagcttcgccctggaaccgcaggcgggaaagggccatcgcctggtcctggacctatatccacaggcgctggcggcgccccccgagccaatgctggcgctggcccgcccgctaccctcgacgggccgcgacatcctcgtggtggtcgatgccggccatggcggcaaggaccccggcgcggtcggtagcaagggcgagcgcgaaaaggacgtggcgctggccatcgcccgcctgctggcgcggcggatcgaccgtgagaaaggcttcaaggcgcgcctggtgcgcaacggcgatgtgttcgtcccgctgcgcaagcggccggaagtggcccggcgctacaacgccgacatgttcgtctcggtgcacgccgacgcggcgccgcgactgaccgcctccggcgcgtcggtatatgccctctccgagcatggcgccagctcgaccatgtcgcgctggatggccgagcgcgagaacggcgccgacctgatcggcaacagcggcaacctgccgctacagggccgcgacaaggtactcgccggggtgatcctcgacatggccctgagttcgaccatcgccagcagcctggacctcggccacagcgttctcggccagttgtcggacgtcaccgcgctgcaccagaagcgtgtcgagcaggccggcttcgccgtgctcaagtcgccggacatcccttcgatcctggtggagaccggcttcatctcgaatcgcggcgattgtcgccggttgatggacgaacgccatcgccagcgcctggccgaggcgatcttcgctggcgtgcagggctacttccggcaacgccctcccgccggcagctacctggcggcgctcagcgcgcagcctcccggctag

SEQ ID NO: 319254 - DNA, 417 bp, Pseudomonas aeruginosa
atgcgccgcgtcctccgcctttactgcctggccctcctgctgctcgctccggcggcacaggcgcagggctttcttcccggcacccgcccggcggaatgcgcctacctacgtaccgttctggcctgcatggatcggctgggcaaccactacagcgtcgccaccggcggcaacgacacctggctgcgcggctacgacgcggcgagcggacgacgctgggcccagaccaatacgcgctacgggcgcctgaccttcttcagcggcatcgccagcgatggggaaatctgggtcggcctcagccgcaacatcggctggaccagcatcagccgcctgagcagttcatcgggccagcgccaacgcctgacctgcgggcgggtcagcggctgcagcgaaggccctagccgggaggctgcgcgctga

SEQ ID NO: 319255 - DNA, 405 bp, Pseudomonas aeruginosa
atgaccgaacaggaactgcttgcccagcccgacgctgcctacatggacgaagcccagcaggacttcttccgcgacctgctgctgcgtcagcgccaggaacttcaggcgcgcatcgaaggcgaattcggcgagctgcgcgatctcgaacgccccagcgacgaggccgacctggcttcccgcgaggaacagcggcaatggcaacttcgcctgctggagcgggagaagaagctgctcgacaagatcgacgaagcgctggagcgcctggcccgcggcgactacggctggtgccaggaaaccggcgagccgatcggcctgcgccgcctgctgttgcgtcccaccgccaccctctgcatcgaggcgaaagagcgccaggagaagcgcgaacgccacgtgcggcacaactga

SEQ ID NO: 319256 - DNA, 1203 bp, Pseudomonas aeruginosa
gtgaaccaacgcctacctgtcaccgtgctgtccggctttctcggcgccggcaagagcacgctgctcaaccatgtgctgaagaaccgcgagaaccgacgggttgcggtgatcgtcaacgatatgagcgaaatcaatatcgatggcagcgaggtccagcgcgatgtcagcctgaaccgcgctgaagaacgcctggtggagatgagcaacggctgtatctgctgcaccctgcgcgaagacctgctggaagaggtcggccgtctcgcccgggaaggccgcttcgactacctgctgatcgagtccaccgggatttccgaaccgatgccggtggccgagaccttcaccttccgcgacgagctggaccgcagcctgtccgacgtggcgcgactggataccatggtcacggtggtcgacgggatgaattttctccgcgactaccaggaggccgccagcctggccagtcgtggcgaaaccctcggtgaggaggatcagcgctcgatcaccgacctgctgatcgaccaggtcgaattcgccgacgtgatcctggtcagcaagatcgacctgatctccagcgagcagcgcgaggaactgctggcgatcctgcgccagctcaatgccgaggcggagatcctgccgatggtgatgggtcaggtgccgctggcgaagatcctcgataccggtcgcttcgatttcgatcgcgcggcgtccgcgccgggctggctgaaggaactgcgcggcgagcacctgccggaaaccgaggaatatggcatcgcctccatggcctaccgggcgcgccggccgttccaccccgcgcgcttccacgccttcctgcacaatccgctgaagcaggggcggctgctgcgctccaagggcttcttctggctcgccagccggccccgcgaggccggcagctggtcgcaggccggcggcctgatgcgctacggcctggcgggccgctggtggcgcttcgtgccgaccggacagtggccacaggacgaagagggcctgcgggcgatcatgcggcactgggaggaaggcgtcggcgactgtcgccaggagctggttttcatcggtcagaacctgaacttcgcggccctgcgcgcagccctggacgcctgcctgctggatgacgccgagatgaacctgggcatccccggctggcagggcctggacgaccccttcgaggactgggggcatgccgcatga

SEQ ID NO: 319257 - DNA, 642 bp, Pseudomonas aeruginosa
atgagcgcactgccgcaggaaaaaccgttgccgtgccaggcgttcgatgacgacccccaggtgctggccgaggtgcttcgcgagggcgtcaacctggcggtctggacacgccggttgagcccggcgctgcgcgacttcgccgccgccctggtgcgcaaccggccgggactggcgctgagccagacgctggagatggaagaggaacggctacccgtcttggacggcctgctcgacgcgcagcaactgccgggacaaaccgatttcctcgacgacctgggctggctggtcgaggccttctcctgcctgaccggggcgcggcgtatcggcctgcgcctgcgcgttctggataaaccgatgtgcccgcgtttccacgtcgaccacgtgccgctgcggctggtcaccacctaccagggcgccgccagcgaatggctggacgagtccggcctggaccgtcggctgcttggcggagcgcaggccgaagttgtcgacgaacagcttatccacagcttgtccacgggcgacgtggcgctgctcaagggcgaacgctgggagggtaacgaaggtgccgggctggtgcatcgctcgccgcgagcggagcctgggctggcgcgcctgctgttgaccctggactggcttgcctga

SEQ ID NO: 319258 - DNA, 369 bp, Pseudomonas aeruginosa
atgcgtccgttcctgttcttcctgtcctgcctgccgggcctggccctggccgaagcctgcatcgtccatagccaggcgaagaatctcgacgtgaaggtctgccagcagaaccgcagcatcccggccaagctgttccgcgaaggcttctgccagccacaactgcagggccagaaggtcgaggtgacgttcgccgaggaatgtccgacgggcgccttcggtgtctgccgcgacgccagggtacccaacgcgccctatcggcaggacatcttctactacggcatcgcgaccgacgcacgctacctggagccgttctgcgccagccagagccaaggtcgctgggaagagcctagcgccgcgaaaaagccctga

SEQ ID NO: 319259 - DNA, 969 bp, Pseudomonas aeruginosa
atgcttcgagagatacccacacacctgatcggcggccccctgggggccggcaagaccagcctgatccgctcgctgctggcgcagaagccggcgggcgagcgctgggcggttctggtcaacgagttcggcgagatcggcctggatgccgcgctgctggccacggacgtcgacggcgtggccatcggcgaggtggcgggcgggtgcctctgctgcgtcaatggcgtgccgttccaggtggggctcggtcgcttgttgcgtcgggcacggccggaccggctgttcatcgaaccctccgggttgggacatccgctggcgctgtggaaacagctgcaggctcctccctggtccggcgtcctggccctgcaacccctggtagtggtgctggatgccgcggcgctggcctccggccaaccgctgccggaggcacaggaacaggcgctggaagcggccggcatgttgctgctgaacaaatccgaaacgctcgacgcgacgcagcgctgcgctgtgcgcgcgcgcctgccggtcctgccgttgcgctggagcgtgcgcggtcacctggcattgcgcgatctgccgaccagcgttgccggggaaggtagcgcgacgacctgggcggccctgccggaggcgcctgctcagttgggaacggtgctgcctgccgagcgaccgctgcgcgccgtgcgcgagcaggacggccagttcgccatcggctggcggctggcgccgtcggtgcgtttcgatcgggccgcagtggacgcctggctgaaccgtctgtccggactgcggcgagccaaggcggtgctgcattgcgcggacggttggtatgcagcgaatgccgcgccgtttgtggataactggggcaagtcctcgtggcggcgggataatcggctggaactgatcctcgccgcaggcgcggatgaaaaggcgctcgaagaggcgttcctggcgtgtcggatggtcgcggaatga

SEQ ID NO: 319260 - DNA, 1032 bp, Pseudomonas aeruginosa
atgtcgccacagccttcacggtcgcctgaccgtttttcgctggccgcgctcgccgaagaccaccccaccgctcccgcccagggagacgaaagcgagtccctgccatgcgtgaatgcccagcgcggagaacccaacctgcgcgtggtggactgctccggcgcgcgccgcgacgaggaagtggcggtcgaggaagtgctgatcccctacgcccatggcagcgatcccgaagacgtccccggcgagccgcccaagtcgcgctggtggttgtcctccggcgcggcggtggcgatgcatgtggcgatcatcggtgcgctggtgtgggtgatgccgaccccggccgaactcaaccttggccacggcgaactgccgaagaccatgcaggtgaatttcgtccagctcgagaagaaggccgagccgaccccgcagccgccggctgccgcgccggagccgacgccgccgaagatcgaggaacccaagccggagccgccgaagccgaagccggtggaaaaacccaagcccaagccgaaacccaagcccaaaccggtggaaaacgccattcccaaggccaagccgaagccggaacccaaacccaagccggaacccgagccgagcacagaggcatccagccagcccagcccgtccagcgccgccccgccgccgcccgcacctaccgtcgggcagagcacgcccggcgcgcagaccgcgcccagcggctcgcaaggtccggccggcctgcccagcggcagcctcaacgacagtgacatcaagccgttgcgcatggatcctccggtctatccccgaatggcccaggcccggggtatcgaaggccgggtgaaggtgctgttcaccatcaccagcgatggccgcattgacgacatccaggtgctggagtcggtgccgtcgcgcatgttcgaccgtgaagtgcgccaggccatggccaagtggcgtttcgagccgcgtgtcagtggtggcaagatcgtcgcccgccaggcgaccaagatgttcttcttcaagatcgagaagcgccgctga

SEQ ID NO: 319261 - DNA, 1308 bp, Pseudomonas aeruginosa
atggaaagcgccaacgccatttccgcgtctgcccagccccgcaccacttcgcaacgcatcaagtcgatcttcagcggttccgtcggcaacctggtcgagtggtacgactggtacgtctacgccgccttctcgctgtacttcgcaaaggcattcttcccccagggcgacatgaccgcccaactgctgaacaccgcagctatcttcgccgtgggcttcctgatgcgcccgatcggtggctggctgatgggtatctatgccgaccgcaagggccgcaaggcggcgttgctggcctcggtgctgctgatgtgctttggctcgctgatcatcgccctgacccccagctatgaaaccatcggcgtcgccgcgccgatcctgctggtggtcgcgcgcctgctccagggcctgtcggtcggcggcgaatacggcacctccgccacctacctgagcgagatggcgaacaaggaacagcgcgggttcttctccagcttccagtacgtgaccctgatttccggccagctcatcgccctggcggtgctgatcgtcctgcaacagaccctgaccgtagaacaactggaaagctggggctggcgcgtccccttcttcatcggcgcgctgtgcgcagtggtggcgatgttcctgcgtcgcggcatggaagagaccgagtccttctcgaagaagaaggaagagccgaaggaaagcctgctgcgcaccctgctgcgccacccgaaggaagtgctgaccgtggtcggcctgaccatgggcggcaccctggccttctacacctacaccacctacatgcagaagtacctggtgaacacggtaggcatgagcaagaccgattcgaccatgatctcggctgccaccctgttcctcttcatgctgctgcagcccatcgtcggcgccctctccgacaagatcggccggcggccgatcctgatcgccttcggcgtactcggcaccgtcttcacctacccgatcctcagcacactgcacagcgtcgacagctggtggggagcgttcttcctgatcatggcggcgctggtgatcgtcagcggctacacctcgatcaacgcggtggtgaaggccgaactgttccccaccgagatccgcgccctgggcgtcggcctgccgtatgccctgaccgtgtcgatcttcggcggcaccgccgaatacgttgccttgtggttcaagagcgtcggcctggagagcggcttctactggtacgtcaccgcctgtatcgcctgctcgctgctggtctatgtgttcatgaaggacacccagaagcactcgaagatcacgaccgattga

SEQ ID NO: 319262 - DNA, 1758 bp, Pseudomonas aeruginosa
atgcatgccgtcgatttcatccaggacctcgccgtgatcatgctggtggcgggtgtggtcactatcctcttccaccgcctgcgccaaccggtggtcctcggctacatcgtcgccggcttcatcatcggcccgcacaccccgcccttcggactgatccacgacgaagacacgatcaagaccctggccgaactcggggtgatcttcctgatgttctgcctcggcctggagttcagcctgcgcaagctcttccaggtcggcgccacggcgttcatcgcggcgttcctggaaatcgtcctgatgatctggatcggcttcgagatcggtcgcttcttcgagtggagcaccatggactcgctgttcctcggcgcgatcctggcgatctcctccaccaccatcatcgtcaaggcgctcggcgacctgaagatgaagaacgagcgcttcgcccaactgatcttcggcgtgctgatcgtcgaggacatcctcggcatcggcatcatcgccctgctgtcgggaatcgccgtgagcggttcggtggaaaccggcgaggtgttctccacggtcggcaagctcagcctgttcatgatcgtcgcgctggtcgtcggcatcctcctggtgccacgcctgctggcctacgtggcgaagttcgagagcaacgagatgctgctggtcaccgtgctcggcctgtgcttcggcttctgcctgctggtggtgaagctggaatacagcatggtgctcggcgccttcctgatcggcgcgatcatggccgagtcgcgccagttggtgcagatcgaacgattgatcgagccggtccgtgacatgttcagtgcgatcttcttcgtcgccatcggcctgctgatcgacccgaagatcctcgtcgagtacgcctggccgatcgccctgatcaccgtcgcggtagtgctcggcaagatgttctcctgcggcatgggtgcgttcatcgccggcaacgacggacgcacctcgctgcgggtcggcatgggcctgtcgcagatcggcgagttctccttcatcatcgccgccctgggcatgactctgaaagtcaccagcgacttcctctacccggtggcggtagcggtctcggccatcaccaccctgctcaccccgtacctgatccgcgccgccgacccgctctcgcagcacctggccaacgccatgccgcagcgcatggcgaggatcttcggccactacggcgactggctgcgcagcatccagccgcagggcgaccgtgcggtgctggcggcgatgatccggcgcatcttgctgcaggtcggggtgaacctggcgctggtgatcgcgatcttcctcgccggcggttatttcgccgatacgctttccgcctggatgagccagtgggtcgcctacgacgggctacacaaggcattgatctggggcggcgcgctgctggtctcgctggccttcctgatcgccgcgtaccgcaagctcaaggccctgtcgatgctgctggccgaactcggggtcaagccggagaaagccggacgccatacggcgcgggtacgtcgggtgatctccgagataatcccgctgctgtcgctggccggcatgatggtgctgctggcggcgctcagctcgagcatcctgccgccgggcgagttgctggtcgtagtggtgctggtcgccggcctggtgatcgcagtgctctggcgctggctgatccgcgtgcattcgcggatgcagatcgcgctgatggaaaccctcgaccaggaaaagggcagccactga

SEQ ID NO: 319263 - DNA, 855 bp, Pseudomonas aeruginosa
atgcagcgtgttctcagcatcgccctcgccttctgcctggcgctgaccgtcagcctggatgccaatgccaagcgcttcggcggcggcaagagcctcggctcggcacccagccaccagacccgccaggcgcagccggccactgcgccgaacgccactgctgccgcccccaacgccgctcgtcccgccgctgccgccagcggtgcttcgcgctggctcggcccgctggccggtatcgccgcgggcggcctgctcgcttccatgttcatgggcgacggcttcgagggcatccagatgctcgacatcctgttgatcgccctggtggccttcatcgccttccgcttcatcgccgctcgccggcgccagcagaaccagggccagcctgcgatggccgggcacgcgccgatgcagcgcgaaatgccggcccaggcgccgatcttcggtggcgccgccgctgctgccgctgcgccgagcccggtgatcaacgcgccgagctggttcaacgaggagcgcttcgtcggtgccgctcgcgaacacttcatgtccctgcagcagcattgggatgccaacgagatggacaagatcgccgagttcgtcaccccgcagatgttgcaatggctgaagcaggagcgcgccgagatcggcgacgcctaccagtccacctacatcgacaacctggtcgtgcaactggacggcgtcgacgaccaggccgacaagaccatcgccaccctgaccttcagcggtgtgtcgaagacctcgcgcttcgaccagggcgaagccttcagcgaaagctggcggatggagcgcgcccagggcgagaaccagccatggctggtggccggtatccggcagaactga

SEQ ID NO: 319264 - DNA, 402 bp, Pseudomonas aeruginosa
gtggaagacgtcatcgaaaaactgcgtgaactcaacgaaccggttccggtgcccctggaactgccggaagaagaactgctggtggaaatcgaggaagagctgctgatcggcattcccgccgagttccgcgaattcctcctgctggtcagcgatgtggtctacggccgcctggagccggtgaccgtgaccgatccgcactcgcacacctatctgcccgaagtggcggccactgcctgggacctgggcgttccgcgcgagctgatcccgctttgcgaggacgacggcagctactactgcgtggcggaggacggcgaggtggtgctctgggccgatggcgacctcaccgatgaaagctgggattcggtgtgggtttgggctcgcgacgtctggctggagagctga

SEQ ID NO: 319265 - DNA, 213 bp, Pseudomonas aeruginosa
atgaagttcaaagctctgttcgctgcattgctgctgaccagcctggcgggttgcgccaaccaggcggtggtcactttgcaagatggcagcgaggtcctggtcaaggatcagtcggattacgacaaatacaatgactactacgagttcgaacagctgaatggcgacaccatcctgatcaagaaggacaatgtgcgcaccattcgcccgcagtag

SEQ ID NO: 319266 - DNA, 681 bp, Pseudomonas aeruginosa
atggccgagaatctccaggaacgactctaccaacgactgcgggaagacttgctggccggacgtttccagcccggcgagcgactgaagatccgcgacctggcgaaccagtggggcaccagcccgatgccggttcgcgccgccctgcaacggctggtggcggaaggggcgctggagggcgaggcacaacgctcgctcagggtgccgctgatgacccgcgagcgtttcctgcagatcctccaggtgcgcctgtccctcgaagggctggcggccgaaagcgccagcggccggctggacgagcaggcactggaaggactcgaaggttgtctgcggcgaatggaggacgccttgcgccaacgcgaggtacaggcctacctggaagccaacagcgaattccacctgacgctctaccgcgcctgcggcaacccggtgctgctgcgtctcatcgagacgctctggctacaggtcgggccgttcttcaaccggctgttcaccgaggccgacctctccctacgtctgaacgatttccacgaggacgccctggacgcgctacgccgcggcgacggcccggccgcgcgcgcggcgatcgaacaggacctggcctacttcggccagtacctgctgaacctcctggagctggaggcccggccacgaaagcgacaccgttccggcgagcacgcctga

SEQ ID NO: 319267 - DNA, 783 bp, Pseudomonas aeruginosa
atgaatgacttttcgaagtggacaggtcaggtcgcgctcatcagcggcgccggcagcgaactcggcatcggtttcgccattgcccggcggctggcccgcgaaggcgtgcgcctgctgatcaccgccagcagcgagcggattaggcaacgagcggaggaactgagcgcatgtggtcacgacgtgcgcgccgcgagcgccgacctgaccgacgaagcccaggtgcagggcctgctggactgggccgaagcccagtggggacgggtcgacatcctggtgaacaatgccggcatggcccagttggacagcgcggagcccttcagcgcagtggaagcgacctcgctgcgggattggcaactgtccctgtcgcgcaacctgaccagcgctttcctgctcacccgcggcctgctgccgggcatgcgcgagcgcggctacgggcggatcgtcaacgtcgcctccaccaccggaacccgcggcagcaacccgggcgaagccgcgtatagcgcggccaaggccggtctggtcggctggagcatgggcctggcgctggaggtggcgaagagcggcatcacggtgaacagcgtcgcgccgggctggatcgccaccgcctcgagcaccgccgaagaacgccaggccgccctggccagccccagcggacgtgccggccggcccgaagaggtggccgccgcggtggccttcctcgcctcgcccgaagccagcttcgtcaacggcgaactgctggtggtggatggcggcaactgcctgatcgaaaacaaacggagctga

SEQ ID NO: 319268 - DNA, 1395 bp, Pseudomonas aeruginosa
atgaccgccagtggcatcgccgaagccgccgtggaaaccttcatggcccgcgagcagcaacgtttccttgcgcagaatccacagtccgtcgcgctcgccgagcgagcccggcgcgccttgttcgacggcgtaccgatgcactggatgagcgattggtcaacaccctgtccgctgttcgtggaacgtgcccacggcgcgcgtttccatgatgtggacggccacgcctacgtggacttctgcctgggcgataccggcagcatgttcggccattctccggcgccgatcgcccgggcgctcgccgagcagggcgcgaacggcctgaccaccatgcttccgggggaggatgccatcgtcgcaggcgagctgctggcgcagcgcttcggcctgccgttctggcaggtagcgaccaccgctaccgacgccaaccgcttcgtcctgcgctgggcgcgtgcgatcaccggtcgcaaggtggtgctggtattcgacggttgctaccacggcacggtcgacgacaccctggttcgctgccgcgacggccgcaccgtgcatcgctccggcctgctcggccaggcccacgacctcacccagttcagccgcgcggtgccgttcaacgacctccaggccctggagcgggcgctggccagcgaagacgtggccgccgtgctctgcgagccggcgatgaccaacatcggcatggtcctgccgcaacccggcttccaccagaagctgcgcgagctgacccgtcgtcacggcacgctgctgatcatcgacgagacccacaccatctccacaggtcctggcggctgtacccgcgcctggaagctcgagccggacttcatcaccctcggcaagccgatcgccggcggcgtaccgtgctcggtgtatggttgcagcgcggcgatggccagcgccatgcaactggccagggcacgtgccagcgagcagagcgaaggccacggccacagcggcatgggtaccacgctgtcggccaacgccctggcgatgcgctgtatgcgcgccaacctggaagaggtgatgaccgataccgcctacgcccacatgctgtccctggcggcgcgtctggccgagggcttccgcaggattatccacaagtacggcctggcctggtcggtgaccgagctcggcgcgcgcagcgagttccagttctgcccgcaacccccacgcgacggcgcggccgccgaggcggcgttccacgacagcctgcagatggccttgcacctgtatctgatcaaccgcggcatcctcatcacgccgttccacaacatgaccctgtgttgcccggacactcgcgaagaagatgtcgaccgcctgctctccagcctcgacgaggcgctcggcgagctgctcgccatacccggcgcgcgggaggcctga

SEQ ID NO: 319269 - DNA, 1368 bp, Pseudomonas aeruginosa
atgcatttcgccgatccgcgggaagcccgcgagttcctcgccgcacaccccgaggtgcgcagcatcgagctgttcctgatcgacgccaacggcgtgccgcgcggcaagctgctgcatcgcgacgagctgctggcggtctacgaaagcgggcggccgctgccgagcaccatcctcggcctgaccatcaatggcgatgacgtcgaggagaccggcctggtctgggacgtcggcgatgccgattgctggaccttcccgctgcccggcagcctgaccttgcaaccctggcggcagtcaccgaccggccaggtgcaggtcagcatgcatcccgagctcgggctaccggccgcggcgggcgatccccggcatgtgttgcagcgggttatccacagtctgcaggcggagggtttccacccggtgatggcggtggaactggagttctacctgctcgaccgcgaacgcgacagcgacggccggccgttgccggcgttacagatgaatggccagcggccgcgggcgacccaggtctatggcgtctacgagctggagcagttgcagccattcctcgatgacttgtatgccgcctgcgaggcccagggcctgccggcgcgcacggcgatttcggagtacgcgccggggcaggtggaaattaccctgcagcatcgcttcgacacgctccaggcgatcgacgaaggcgtgcgctacaagcgcctggtcaagggcgtggcgaatcgccatgggttgcaggcctgcttcatggccaagccgttcgccgatctttccggcagcggcctgcacctgcacgtcagcctggccgacgccgctggcaacaatctgttcgccagcgaggacccggccgggaccccgctgctgcgccaggccatcggtggaatgaaggcgtgcctgctggagtctttggcgctgttctgtccgaacgccaactcgttccgccgcttccaggcgaacagctacgcgccgctggcgccgacctggggaatcaacaaccgcaccgtgtcgctgcgggttcccggcggcccggcgtccagccggcacatcgagcaccgcatctgcggcgccgacgccaatccctacctggcggcggcggcgttgctcgcggcggtgcgcctggggattcgcgagcgactcgaccccggtgcgccgatcaccggcaacggctacgctcaagccacccaggcgttgccgagcgactggctgaccgcgctgcgcgcgctggagggctcggcctgggcgcgcgaggcgctcggcgaggatttcctgaagatctacctggcgatcaagcaggccgaataccgtgccttcatgggcgaggtcggcgagcaggactggcgctggtatctcaaccaggcctga

SEQ ID NO: 319270 - DNA, 759 bp, Pseudomonas aeruginosa
atgagcacgcccgtcgttcttatcactggtgcagccggcggcttgggccgggcaatcgccaagcgtttcgcccagagtcattggcgcatcgccgccacggatgtggataaggagggcctgcacgcgctgaacgcgcaggtgccgttggacgccagcggggtcgccgacctgcgcagcgcggataactgccataccctgatgtcgaagattctcgcccgtaccggacgtctcgacgccctggtgaatgccgcgggcgtctggcgcgaggggcctgtggaaaacttcaccgaggaggatttcgacctggtcctgggagtcaacctcaaggcctccttctacatgtgccaggccgcgattccctacctgaaggaaaaccagggcagcatcgtcaacatctccagcgactccggacgccaggcctaccggggttcggcggcgtattgcgcgagcaaggcggcgctgaccatgctgagcaagaccctggcgctggaactggccgagcagggcgtgcgggtcaacgccgtgtcgccggcggatatcgccacgccgatgctcgactaccaggccgaacgctatgggatgggcaatccggatggctacaagcgcgcgctgctgaaggattatccacagggcaaggcggcacgcttcatccgcccggaagaagtcgccgagctggtctggtatctctgcggccctcaggccgaagcgatcacgggtgccgacctggcggtggacttcggcctgtccgctggccgctga

SEQ ID NO: 319271 - DNA, 744 bp, Pseudomonas aeruginosa
atgcctgccgccatacgcatccttctcctggccctggccgtgcttgccggcatcggtgccgctgccatccaggccgaggatacgccctgcgccaccgccgcggaatgcaacacgcgcggcacccaggcttatcgacaggggagttatccacaggcgctggacgccttcgcctggcaattgcgcctggccgagcgccaggagcagggcggagccgactcggaacaggcgctgaacaatctcgcgctgaccagcctcaaggccgggcaaccgggacgcgcccgcgcctggatgaacctggcgctggatcgcggctacagcggcaaggccacgcgctacaacctggaacaggttgccctgaaagtcgactatccgtccctccagggcctcgccgggcactacctgcgctacgccgggcaggccgaatgggaaagcctgcagatcgaaccggtgaagggcggctaccaggcgagcttcgccctgatgcgcatcggcaatccggagaaactgatggaatatgggcccgcggcggtcggcgagctgtccggtcggctggaggggcaaggcgcgctctaccggctgcgcagcgaaggcctgggagccggctgcagcctgctggtatggcaggaaggcatcgacctgcgagtggtggagagccttggcgggaactgccagggttacggcggcatgggcatcgccgccgccggtaactgggtgaagatatccagtcaggccagggacgactga

SEQ ID NO: 319272 - DNA, 483 bp, Pseudomonas aeruginosa
atgcaacccggaaacaaccaactgtcgatgaccgtgctgatgactccggacatggccaatttctccggcaatgtccatggcggcaccctcctgaagtatctcgacgaagtcgcctatgcatgcgccagtcgctatgccggtcgctacgtggtgaccctgtcggtggatcaggtgatcttccgcgagccggtgcatgtcggcgaactggtgaccttcctcgcttcggtcaactacaccgggcggacttccatggaaatcggcgtcaaggtcatcaccgagaacatccgcgagcagtccgtgcgtcataccaacagctgtttcttcaccatggtcgccctggatgacgagcgcaagccggtggccgtccgcccgctggagctggaaaccgccgagcagaagcgccgcttcgcccaggcccaacaacgccgccagctgcgcgcggagctggaggcccgctaccaggcgattcgcgaagacggatga

SEQ ID NO: 319273 - DNA, 1704 bp, Pseudomonas aeruginosa
atgcaccatacgccgttactcactacactcgccgcggggttcgtcctcgccttcctcttcggggccctggccaatcgcctgcgcatttcgccgctggtcggctacttgctcgcgggcgtcctggccgggccgttcactcccggttatgtcgccgaccaggcgctgtcgcaggaaatcgccgaactcggcgtgatcctgctgatgttcggcgtcggcctgcacttctcgctcaaggacctgctctcggtgaaggccattgccattcccggggcgctggtgcagatcggcgtcgccacgctgcttggcatcggcctggccaagctgctcggctggagcttcggcggcggcctggtattcggcctgagcctgtcggtggccagtaccgtggtgctgttgcgcgccctggagcagcgccagttgctggacaccaagcgtggcaggatcgccatcggctggctgatcgtcgaggacctggcgatggtcctgaccctggtgctcctgccggcgctcgccggcaccctcggcggcaagaccgacggcggcgacgccggtctgctctggccgctgctgattaccctgggcaaggtcgccgccttcgtcgccctgatgatcttcggcggtcgccgggtggtgccctgggtgctggagaggatcgccgccagcggttcgcgggagctcttcaccctggccgtgctggccattgccctgggcatcgcctatggctcggcggtgctgttcggggtgtccttcgcgctaggtgccttcttcgccgggatgattctcaacgagtccgagctcagccacgaggcggcggagaactcgttgccgctgcgcgacgctttcgcggtgctgttcttcgtctcggtggggatgctgttcaatccgatgatcctgttgcaggagccactgacggtcctggccactttcctggtcatcgtcttcggcaagtcggtggccgcctacctgatcgtccgcgccttcggccatccgaacagcaccgcactggtgatcgccgccagcctggcgcagatcggcgagttttccttcattctcatcggcctgggcattggcctcgaactggtgccggagcagagccgcgacctggtgctggccggggcgatcctgtcgatcctggtcaatccgctgctgttcatcgccatcgatcgcctgcagcaacgcaaggagcagcgcctggcggaggccgctggcggggtccgcgagatgccggcgcaggacctgccgccgccgatcctggagcgcgagcatgcggtgctgatcggtcatggccgggttggcgggttggtcagcgctcgcctgcgcgccgccgggacgcccttcgtggtagtggtggacaagcgcgacaaggccgacgaactgcgcgaacagggctacagcgtggtcctcggcaatgccgccagtcccggcgtgctggagctggccaacatcgccgaggcgcgctggttgctgatcgccattcccaacggcttcgaggccgggcagatcgccagccacgcccgcgcggtgaacccgccgctggacatcgtcgcccgggcgcatttcgacgccgaggtggactacctggagcagaacggcgccaacctggtgatcatgggcgagcgcgagatcgcctgcggcatggtccatcgcctgggactcgaccgtgacgagcgcggcgccgacgcaccgctgccgcagtcggcctga

SEQ ID NO: 319274 - DNA, 585 bp, Pseudomonas aeruginosa
atgttgcgccgtctctacgactggaccctgcgcctggccggccatccccgcgcggagctggccctgggcggggtgaccttcgccgaaagctcgttcttcccgattccgccggacgccttgctggtgccgatggtcctggccaaccgggccaaggcctggcgctacgcggcgatctgcgcgatcagctcggtgctgggcggcatcgccggctatttcatcggcttgctgctgttcgagagcgtggccatgccgatcctggcgttctatggcttgctggagaacttcgaacaggtcgccgaacgctacaacgaactgggctggctgatggtgctgctgggcggcggcttcacgccgctgccgtacaaggtgatcaccattaccagcggagtgacccagctcgacctctggctgttcgtcggcctcagccttgtcgcccgcagcctgcgcttcgccgctacctgcgctttgctgttctgggctggcccacgcctgaagaccctgatcgagcggcgcctgggcatggctttcgtgctgatggcggtgatggtggtcggtgggttgatgttggggaaatacgttctttag

SEQ ID NO: 319275 - DNA, 1203 bp, Pseudomonas aeruginosa
atgagccccaccagcgccctacctgccctagcctgcctggctgttgcgctcgccacctgtgagttcattcgtcgccttggcagcgcgcgcctgcccgcttcccggttcgtcaccatcgacggcctgcgcggttacctggcgttcttcgtttttctccatcactcgtccatctggtactactatctgaaggatggtctctggcaactaccgccgtcccggctctacgcccatttcggccagaccagcgtcgcgctgttcttcatggttaccggcttcctcttcgctcacaagctcctgcacagccgcggcacgccgatcagatggctggatgtctatgcatcgaggattgcccggctgctcccagcctatctcctggcaatggcactgctattccttttggtgttcacggccaccggcttttccctacgcgaggcgccctcggccctgcttggcaagatgctcgactggttgctcttctcgataccgagcaagcctgacatgaacggtttcatcgggacattccgcatcgtggcaggggtgacctggacgctgccctatgagtggttgttctacttctgcctgccattcctcggcgtcctgctcgggaaccgtccttccccagtagccatggccatcatggcaggcatgatctggctggtactgaaagcctggcagccgaactggacgctcgcctatatgttcgtcgctggtgggttgtcagcgctcgcggtacgctcgacgcacctgcagcgattcgccgcgagtatctccggcaatctcctatgcctggcgctcctgctcctacccggagtgctctttcccagcgcctatcaggaaacggcgatcctcattctcggcctggctttcctgctgattgcggcgggttcgagcctattcggcctgctgactcaagcactgtcccgcttcctcggcgaaatgacctacagcatgtatctgctgcacgggtgcatcctattcatcagcttcgaactgctgatcggcagggacaacgccaaggcgttttccgctctggaacactggctggtcataggtgcgatcactcccctggtagtgctcgcgtcgtatctatccttccgtttcatagaaagtccggccatgcaacgctccagacaactcagcgctctgctgggcaaaccgatgctggcgctcaagcgcctgggccgtcacccgactgctggctaa

SEQ ID NO: 319276 - DNA, 873 bp, Pseudomonas aeruginosa
atgccacgtacgccccacctgctcgccatccagtcccatgtggtcttcggccacgccggcaatgccgcggcggtgttcccgatgcagcgcatcggaatcaacgtctggccgttgaacacggtgcaattctccaaccacacccagtacggtcgatggaccgggcaggtgctgccgccggagcagatcccggcgctggtggacggtattgccggcatcggcgaactgggcaactgcgacgcggtgctgtccggctatctcggcagcgccgcccagggccgcgccattctcgatgtggtggcacggatcaaacaggccaaccctcgggcgttgtacctctgcgacccggtcatgggccacccggaaaaaggctgcatcgtggccccggaagtcagcgacttcctgctggaagaagccgccgcggtcgccgactacctgtgcccgaaccagttggagctggacagcttctgcgaccgccagccgaactccctcgccgactgcgtggaaatggcacggagcctgctggcacgcggtcccagggcaatcctggtaaagcacctgaactatccgggcaagtccggcgacaccttcgagatgctgttggtggccgccgatcaggcctggcacctgcagcgcccgctgctggccttcccgcggcaaccggtcggagtcggcgacctggcctcggggctgttcctctctcgcctgctgctcggcgacgacctgcgtaacgccttcgaattcaccggcgccgcggtccatgaagtgctgctggaaacccaggcctgcggcagctacgagctggagctggtgcgggcgcaggatcggatcgcacatccacgtctcaaattcgaagctcgctcactcgcaatgtag

SEQ ID NO: 319277 - DNA, 501 bp, Pseudomonas aeruginosa
atgggggctaattcacatggcgaaaacaccccccactcgctgcctgccgggagaacgggtaagctggccgtccccctacaccggattccgctcgtgaccctgggtaaccttttcgtcatgctcctgttgggcgccgccgcagcctggtggtggcgcgcccatggcgtacgcgagcgggcgttgctgctggccaagcagcattgcgccaagcagggcgtggaactgctcgacgagaatgtcgcgcgccggcgcctgcgcctggcccgtgaccaccgtggtcagtggcggctgagccgcgagttcggtttcgaattcaccgtcagcggcgaggaacgctacgccgggcgcatcgtcatgtatggctatcacctcggcgccatcgaattggccccgcatcgcttcgaggcggccgccgaggtcgacaacccgccggtgcatagcgccgaggtgattcgcctcgacgagtggcggcagtcccggcagaaaaaggtcggcgactga

SEQ ID NO: 319278 - DNA, 789 bp, Pseudomonas aeruginosa
atgcgccccctcctcttcagtgcccttctcctgctttccgggcatacccaggccagcgaatggaacgacagccaggccgtggacaagctattcggcgcggccggggtgaaaggcaccttcgtcctctacgatgtgcagcggcagcgctatgtcggccatgaccgggagcgcgcggaaacccgcttcgttcccgcttccacctacaaggtggcgaacagcctgatcggcttatccacaggggcggttagatccgccgacgaggttcttccctatggcggcaagccccagcgcttcaaggcctgggagcacgacatgagcctgcgcgacgcgattaaggcatcgaacgtaccggtctaccaggaactggcgcggcgcatcggcctggagcggatgcgcgccaatgtctcgcgcctgagttacggcaacgcggaaatcggccaggttgtggataacttctggttggtgggaccgctgaagatcagcgcgatggaacagacccgctttctgctccgactggcgcagggagaattgccattccccgccccggtgcagtccaccgtgcgcgccatgaccctgctggaaagcggcccgggctgggagctgcacggcaagaccggctggtgcttcgactgcacgccggaactcggctggtgggtgggctgggtgaagcgcaacgagcggctctacggcttcgccctgaacatcgacatgcccggcggcgaggccgacatcggcaagcgcgtcgaactgggcaaggccagtctcaaggctctcgggatactgccctga

SEQ ID NO: 319279 - DNA, 879 bp, Pseudomonas aeruginosa
atgtcgctatccccctggtcccattcctgctcggccggtttcaccctgcgcggctggcgcagcgaaccgagcggcaagccgttgctgcatttcctccatggcaacggcttctgcggccgcacctacgaaccgatgctgcgtctgttggcggaggatttcgacctctggctgtgcgacatccagggccacggcgaaagcgaccacggcggccgcttccacggctggaaccgcaacgccgagatggcggtggaggccttcgaggccgggcgcggtccctatggagatgtccagcgactggcctgcgggcacagcttcggcggcgtcctcagcagcctcgtcctggcccgccatcccaccctgttcgcccgcgccgtgctgctcgacccggtactgttcaccccggcgatgatcggcgtgatggcactttccgagaccctcggcctgcaattgcgcggcagcctggcgaagaaggcgcgcctgcgccgcagccagtggcccgatcgcgcagccgcctacgccggcttgcgcggccgcggtatcttcaagggctggaccgacgaggcgctgtgggcctacgtggaatatgcgctgaaggagagcgacggcggagtcgagctgaagtgccggccaagccgcgaagcggagatcttcagctccttccccaggcggctgtggccgtcgctgggcaagatcaccacgccgacccgcgtgctctacggtaaccgcacctactctttcgtcgccaagtcggtggcgcgctggtgctcgctcaacccccaggtcagcgcccacgtggtggtcggcggccactgcttcatgcaggaagacccgtccgataccgccgaacgcgtacgcgactttctcctgcccaatccatga

SEQ ID NO: 319280 - DNA, 1344 bp, Pseudomonas aeruginosa
atgagcgaccaggtgatcttcgtcgacgacgaagcgacgatccgcgaagcggtgcagcaatggctggagctgtccggcttcgaggtgcgcctgtgcctgcgcgccgaggaatgcctgggagtgttggacaagtccttcgccggggtggtcatcagcgatgtgcgcatgcccggcatggacggcctgcaactgctcgccaacctgcaggcggtcgatcgcgacctgccggtgatcatggtcaccgggcacggcgacgtgccgatggcggtggaggccatgcgccagggtgcctacgacttcatcgagaaacccttcacgcccgagcgcctgctcggcagtttgcggcgcgcgctggaaaagcgccgcctggtgctggagaaccggcgcctgaaggagcaggccagtctcaaggaccaggtcgatgcgcgtctgcttggcgtgtccaagccgatggaagcgttgcgccggcaggttctggccctggcgccgaccccggtgaacgtcctgatccgtggcgagaccggcagcggcaaggaactggttgcccgctgcctgcacgacttcgggccgcgcgccgacaagccgttcgtggcgctgaactgcgcggcgattcccgagcaactgttcgagagcgagctgttcggtcatgagagcggcgccttcaccggcgcgcagggaaagcgcatcggcaagctcgagcatgcccatggcggtaccctgttcctcgacgagatcgaaagcatgccgttggcgcagcaggtcaagctgctgcgcgtcctgcaggagcagcaactggagcggctcggctcgaaccagagcatccacgtcgacctgcgggtgattgccgcgaccaagcccgacctgctggccgaagcgcgtgccggacgcttccgcgaggacctggtgtatcgcctgaacgtcgccgagctgcgcctgccgccgatccgcgagcgtcgcgaggacatcccgctgctcttcgaacatttcgccagcgttgccagccagcgcctcggccgcgagccgcagcccgccgcgccggcggaactggcgcggctgatggcccacgactggccgggcaatgtacgcgagctggccaacgccgccgagcgtcatgtcctcggcctggagcgccgggacgcggaggaaggcggcggcctcacctcggggctggcggaacgcatggaagccttcgaggcggagtgcctgcgccaggcgctcggccagtgccgcggggacatcaaggcggtgatggagttgctgcaactgccgcgtcggacactcaacgaaaagatgctgcggcatggcctcagccgcagcgatttcgtcggtgaagagccggcctga

SEQ ID NO: 319281 - DNA, 1350 bp, Pseudomonas aeruginosa
atggccatcgaacagttcggataccggcaacagctgcgccgcagcctgtccctgagcgacctgatcatctacgggatgatcttcatgatccccatcgccccgttcggggtctacggctgggtccatgccgatgcccacggcatggtgccgatggcctacctggtgggcatgctggcgatgctcttcaccgccctcagctacggagccatggccaaggcctttccgattgccggctcggtgtattcctacgcccagcgcggcatccacccccatgtcggcttcatcgccggctgggtgctgctgctcgactacctgctgatcccgccgctgctctacgtgttcagcgcgctggcgctgaaccacttgttcccggcgatccccaagctggcctggatgctgctgttcctggtctcggcgaccctggtcaacctgcgcggcatcaccttcgccgcccgcgccaacctgttgttcctgatcggagagctggtggtgctggcgatcttcctggtggtcggctaccaggcgctggaaggcggcctgggcaacggccggctgaccctcgaaccgctgtatcgcccggaagccttcgatctcggcctggtaatgaaggccgcctcgatcgccgtactgtcgttcctcggcttcgacgccatctccaccctcgccgaggaggtcaagggcgatcccgcccggcagatcggccgcgccgcgctgatcgcgctgttcatcatgggcggcatcttcatcgcgcagacctggctggccaccgacctcgccgccgggatgaacttcaagtcggcggacaccgccttctacgagatcgccgaagcggccggtggccagtggctgtcgatgctgaccgcggtagccaccgcgctggcctggggtgtcaccgtgtcgatcacctcgcaggcagcggtctcgcgcctgctctactcgatggcccgcgacggcaggctgccgcgcgcgctggccagggtccatccgcgctaccagacgccgcacgtcagcctgtacctggtggcggtgctgtcgctgggaatcggctgggccttcctcgacgcaccggacgtgctcacctcactggtgaacttcggtgccctcaccggcttctgcctgctgcacctgagcgtgatcaaccactactaccgccgccagcgctccggccaatggttgcggcatctactgttcccgctggtgggcctggcgatcatcgcctacgtgctgtacagcatgagcctcgacgcacagttgctcggactggcctggatcgcggtggggctggtctacctggcgttgctgcaacgcggcgggcgccaggcgccaacggagttggccaaggatctctga

SEQ ID NO: 319282 - DNA, 753 bp, Pseudomonas aeruginosa
atgccgagctctactgacaaccccgaactcggcatctaccagctgccgccctaccacctgctcaatccccaagggcgcagcccggtggtcctggtctgcgagcatgccagccggcacattccgctggagttgcagcgcctcggcctggaccaggccgcggcggaagaacacatcgcctgggatatcggcgccctggcgctggccgaagagctttcccggcgactcgacgcgccattgctggcggccggctactcgcgtctgctgatcgacctgaaccgaccgctggaggcccccgacagcattccgccacacagcgaggtctacccggttcccggcaaccgcgagctgtccgagacggtgcgccgctatcgccaggattgcctgttccatccgttccaccagcgcctgacgcaactgctcgacgagcgccaggccgccggcgtgccgacccgtgtggtcggcgtgcacagttttaccccggtgtaccacggcagaccccgcccgctggttgccggggtgctttatcgcaacgccggcgcctacgccaggcgcatcctcgacggtttgcgccggcacggcctggaagtcgccggcaaccagccctatgcgatcgacccggcggaagacactaccgttccggtgcatggcgacgcacgcggtctggaagcggtgctgctggagatccgcaacgatggattgcgcacgccggatgcggtgtacgcctgggccgagcgtctgtatccctggctctga

SEQ ID NO: 319283 - DNA, 1332 bp, Pseudomonas aeruginosa
gtgaaccgcctgcagccggtacgcctggtcagcttcgtcaccaccgacctggccggcatcacccgcgggcgttcgctgcccctggcgaccctggaggagcaattggccagcggttgcggctgggtaccggcgaacagctcgctgaccccgcaggacctgatcgacgagagcagcccctggggcagccacggcgacctgcgcctgctgcccgacccgaacagccgggtgcgcgtcgagcagggtcccgacgccgctgcgccggcgctcgactacctgcacggcaacctggtggaaaccgacggcacgccgtggccggcctgcccgcgcagcctgctgcgggccgaggtggaacgctatcgcgacagcggcctgcaggtcatcgcggcgttcgaacacgaattcagcctgctcggcctgcccggtgagcgtccggccgcggcgttttcgctgcaggcccagcgtgccgccgggcagttccccggctggctggtcagcgccctggcccaggctggcaccgagccggagatgttcctccccgaatacggccagcgccagtacgaggtcacctgccgcccggcgcagggcgtggccgccgccgaccgcgcggtgaacgtccgcgaggtcactcgcgaagtggcgcggcagatgggcctgcgtacctgcttcgcaccgctgccggcacccggcgcggtgaccaacggggtgcacctgcacctgagcctgcaacatgccgacggcagcccgctgctgtacgagcccggtcgacccaacgatctctccgaactcggcgagcactgggccgccggcgtgctcgcgcacctgccagcgctgtgcgcgctgaccgctcctaccgccgcctcctacctgcgcctgaaaccccaccactggagcgccgcctacgcctgcctgggactgcgcaaccgcgaagcggcgctgcgcatctgcccggtggtgagcgtcggcggcaagccgctgggcaagcagtacaacctggaattccggccgatggacgccaccgcctgtccgcacctggcgatggccgcggtgctgatcgccggccgcctgggcatcgaacgacgcctgccgctgcgcgccctggccgatgtcgatccgcacggcctcagcgacgaagagcgccaggcccgcggcatccaggccctgccggcgatcctcggcgatgcgctcgactgcctgcaacgcgacgaggcgctctgtgccgagctgccaaagccgctgctggacacctacctcgccatgaagcgccacgaactggcgctgacggcgggcctttccgacgacgacctgtgccgccactatgccgagctctactga

SEQ ID NO: 319284 - DNA, 654 bp, Pseudomonas aeruginosa
atgttcagcctgccccaccactcgccgcgcgacctgccattcggccgccggcagaccgccatcctgttcgtcgacatgcagcgtgcctgggtcgagccggggcgcgacccgcacgtcgatccgcaggcagccggttacttctacgagcgcgtgcagaaccaggtgatccccaaccagcagcgcctgctcagggccatgcgcgcagtggacgagaacgtcctgcacaccgtcatcgagagcctcaccgccgatggtcgcgaccgctcgctggatcacaagctgtcggagatgcacctgcccaagggcagcccggacgccagggtgatcgacgccctggagccgaccgccaacgagatcgtgctgccgaagacttcttccggcgttttcaactccaccgccatcgactacgtactgcgcaacctcggcacccgccacctgatcgtctgcggggtggtcaccgaccagtgcgtggacatggccgtgcgcgatgccgccgaccgcggttacctggtcaccctggtcgaggatgcctgcgccacccataccccggaacgccaccaggcctgcctggaagcgatcaagggctactgctggatcagcgacaccgagaccgtcctgcaacgcatcgccgccctcggccggagcaacctgtga

SEQ ID NO: 319285 - DNA, 858 bp, Pseudomonas aeruginosa
atgcaagaactaaaacaacgcctggcctccccgcccgccgaactgactcccgcggagcgcaaggtggtgcgtgccctgctcgatgactacccgcgcctcggcctcggcccgatgacgcgcctggcccggcacgccggagtcagcgacccgacgatcatgcgcctggtgaaaaagctcggcttcgccggctacggcgacttccaggaagcgctgctggccgacgtcgacgaccgcctgcgctcgccgcgcaccctgctcgccgaacgccgcgagcggatgggccgcgacgacacctgggcgcgctacctcgaccaggctggccagagcctgcaacagaccctcggcctgacccgccccgatgacatccagcgcctcgccgactggctgttcgacagccgcctgcgcgtgcactgccacggcggacgcttcagccgtttcctcgccggctacctggtcacccatctgcgcctgctgcgcccgcagtgccgattgctcgacgacggcgccctgctccccgaccagctctacgacctcggccgccaggacctgctggtcctgttcgactatcgccgctaccagagccaggcccagcacgtggcccaagccgccaaggcacgcggcacacggctggtgctgttcaccgacatctacgcctcgccgctgcgcgaacacgccgacctgatcgtcagttcgccagtggaatccgcctcgcccttcgactcgctggtgccggccatggcccaggtcgaggcactggtagcgaccctggtggcgcgcatgggcgcgccgctcgacgaacgcctggagggcatcgaccagctccgcaacgcgttcagcagtcatattctggaggaatga

SEQ ID NO: 319286 - DNA, 783 bp, Pseudomonas aeruginosa
atgaaaaaactgcttgctgctttctccgctgtcgcggcgctcggcctcaccgccgcccaggccgccgagtccctcaccgtcgcggccaccccggtgccgcacgcggagatcctcaacgtggtcaagccgctgctggccaaggaaggcgtggacctgaagatcaaggagttcaccgactacgtgcagccgaacgtgcaggtctcggaaaagcgcctggacgccaacttcttccagcaccagccgtacctcgatgagttcaacaaggccaagggcaccgacctggtcgccgtgaccggcgtacacatcgagccgctgggcgcctactcgagcaagtacaagaagctcgacgaactgccttccggcgctaccgtggtgatccccaacgacgccaccaacggcggccgcgccctgctcctgctggacaaggccggggtgatcaagctcaaggacaacaagagcatcaccgccacgccgaaggacatcgtcgacaatccgaagaacatcaagatccgcgaactggaagccgcgaccctgccgcgcgtgctgacccaggtcgacatggcgctgatcaataccaactacgccctggaagccaagctgaacccgaccaaggatgcgctggccatcgaaggcagcgactcgccctacgtgaacatcctcgtcgcgcggccggacaacaaggacagcgacgccatgcagaagctggccaaggccctgcacagcgccgaggtcaagcagttcatccaggagaaatacaaaggcgcggtggtaccggcgttctga

SEQ ID NO: 319287 - DNA, 678 bp, Pseudomonas aeruginosa
atggacttcttcgaaaccatgagcttcgccaacatcgactggtacgaaatctggctggccagcgtcgacaccttctggatgctcggcggttcgctgctattcacggtggtcctcggcctgcccctcggcgtcctgctgttccttaccgggccacggcagatgttcgagcagaaggcggtctacaccctgctctcgctagtggtgaacatcctccgttcgttgccgttcatcatcctgctgatcgtgatgatcccgctgaccgtactgataaccggtacctcgctgggcgtcgccggggccatcccgccgctggtggtgggcgccacgccgttcttcgcgcgcctggtggaaaccgcgctgcgcgaggtcgacaagggcatcatcgaggcaacccaggcgatgggcgccagcacccggcagatcatctggaacgccctgctgccggaagcccggccgggcatcatcgccgccatcaccgtcaccgccatcaccctggtctcgtacaccgcgatggccggagtggtcggcgccggcgggctgggcgacctggcgatccgcttcggctatcagcgcttccagaccgacgtgatggtggtcaccgtggtgatgctgctgatcctcgtccagattctgcaaaccgtgggcgacaagctggtggtgcacttctcgcgcaagtaa

SEQ ID NO: 319288 - DNA, 1008 bp, Pseudomonas aeruginosa
gtgatcgaattccacgacgtccacaagacctatcgagttgccggtcgggaaatccccgccttgcaaccgacccgcctgaacatccaggccgggcagattttcggcctgatcggccattccggtgccggcaagagcaccctgctgcgcctgatcaaccgcctcgaggagcccagcggcggccgcatcctggtcgagggcgaagacgtcaccgccctcgacgccgaaggcctgcgccgtttccgccagcgcgtcgggatgatcttccagcacttcaacctgctgtcctcgaagaccgtcgccgacaacatcgccatgcccctgcgcctggccggcggcttcagccgtgccgaagtcgatgcgcgggtctccgagctgctcgcgcgggtcggcctgtccgaccacgcgcgcaagtatccggcccagctctccggcggacagaaacagcgcgtcggcatcgctcgcgccctggcctgccggccgagcatcctgctctgcgacgaggccaccagcgccctcgatccgcagaccaccgcctcggtcctgcaactgctggcggaaatcaatcgcgagctgaagctgaccatcgtcctcatcacccacgagatggacgtgattcgccgtgtctgcgaccaggtcgcggtcatggacggcggcgccatcgtcgagcagggcgatgtcgccgatgtcttcctccatccgcagcacccgaccacccgccgcttcgtgttcgaggccgaacgggtcgacgaggacgagcgccacgacgatttcgcccacgtgccgggtctcatcctgcgcctgaccttccgcggcgaagccacctatgcgccgctgctgggcaccgtggcgcggcagaccggggtcgactacagcatcctttccggacgcatcgaccgcatcaaggacacgccctacggccagctgaccctggccctggtcggcggtgacctggaagccgccatgagccagttgaacgccgctgacgtacatgtggaggtactgcgctga

SEQ ID NO: 319289 - DNA, 792 bp, Pseudomonas aeruginosa
atgatgtcgtccttctttcgcctgctgtccgtcctggcggcggcgctgctggtcagcgcctgccagggcaatgcgtcgtcgcaaccgacgccggtggtcgcgccccaggcgcagcccgccgatccctacgccgaactgcagcaaaccctggccgccggcaagctcgaacaggccgagcaacaatggctggccctgcgcagcgcagccgccggcgacgagcgagtcgaagcgttccgccgccagttggccgaggcctacatgcagcgcggggaaaccgcgctgcgtcaaggagacctcaacaccgccaccagcgccctcggccatgcccgcggactgatgcccaaagcgccggcgctgaccgccgggctggacggtgcgatcaaccgcgccaaggtcgatcccgcccgcgccgagcaggcccgacgcatgcagcaggcggcccagcagcagatgcagcagatcatccagacgccgcccggcggcgagctgaagccgctacccggcgctccccacctgatcgatccgcaagcggccagcagcgccgtgcccctgccgatgctcgacggcaccggccagggcggcctcggtgcggtgctcgacgcggtggccgcggatgtcgtcgcctaccgttgcagggtgcatatcgaagtgcgccgggacagcgactatccgctggtttccgaccagctcctggcgcgggtgaagaagctctcacccgatttcgacctgcatctcagccatgtcgtacaggccgacaagccaacccgattgatacttaccccccggaattga

SEQ ID NO: 319290 - DNA, 789 bp, Pseudomonas aeruginosa
atggctgacttcctgctcaacgccctcctcgccggcctcgccctggccctggtggctggccccctgggctccttcgtggtctggcggcggatggcctatttcggcgataccctgtcccacgccgcactgctcggggtagccctgggtttcctcctcgatgtcagcccgaccctggctgtgaccgtcggctgcgtgctgctcgcagtgctgctggtgaccctgcagcagcgccagccgctggccgccgacaccctgctgggcatcctcgcccacagcaccctgtcgctgggcctggtcaccctgagcttcatgaaggaagtgcgggtcgacctgatggcttacctgttcggcgatctgctggcggtaagcgccagcgacctgctgtggataatcgccggcagcgcgctggtcctggcactgatctgcttcctctggcggccgctgctggcgatcaccgtgcacgaggaactggcgaaggtggaaggcctgccggtcggagcgatccgcctggcgctgatgttgctgatcgccatcgtcatcgccgtggcgatgaagatcgtcggcgtactgctgatcacctcgctgctgatcattcccgccgccgccgcccagcgccatgcccgcagtcccgagcagatggcggtcggcgccagcctgctgggactggtcgcggtgtgcgccggcctggccctgtcctggttcaaggatacccccgccggcccctcgatcgtggtcagcgccgccggcctgttcctgctgagttttgtcctgccccgccgcacggtgtag

SEQ ID NO: 319291 - DNA, 810 bp, Pseudomonas aeruginosa
atggacaacgcgctggtgcggctgacccaggtcggcgtgtccttcaacggccaggcggtgctgagcgatgtcgacctggccatcgagcccggccagatcgtcaccctgatcggccccaacggcgccggcaagaccaccctggtacgcagcgtgctcggcctgctcaagccgcacgtcggcgaggtctggcgacggccgcggctgaccatcggctacatgccgcagaaactccacgtcgacgccaccctgccgctcagcgtactgcgcttcctccgcctggtacccggggtcaggcgcgagcaggcgctggcggcgttgcgcgaggtcggcgcggcgcacgtgctggagcgcccgctgcaaagcatttccggtggcgaactgcaacgcgtgctgctggcccgcgctctgctgcgcaagcccgagctactggtgctcgacgagccggtgcagggcgtcgacgtcgccggccaggccgaactctaccgcctcatcggcaaactgcgcgaccgctacggctgcggtgtgctgatggtctcccacgacctgcacctggtgatgagcgccaccgaccaggtggtctgcctgaaccgccatgtctgctgctcagggcaccccgagcaggtcagcggcgacccggccttcgtcgagctgttcggccaggacgctcgcagcctggcgatctaccaccaccatcacgaccacgcccacgacctccacggcgaggtggtcaaggccggtcccggcgccttgcctccaggcacccgcttcactcctgtccacaagcacggccccgactgcaaccatggctga

SEQ ID NO: 319292 - DNA, 504 bp, Pseudomonas aeruginosa
atgtacaagattgcgcccaagaccccgctggcctgccagccccatgaccacagccagtgcgtcagcaccgcgctggccgaggccgatgcgctgtgcgcgcgccagggcgtacgcctgaccgaattgcggcggcgcgtgctggagctggtctggcagagccacaagccgctgggggcctacgatatcctcgcggtgctcagcgaaaccgacggccgccgcgccgcgccgccgaccgtctaccgcgcgctggacttcctccaggagaacggcctggtgcaccgcatcgcctcgctcaacgcgttcgtcggctgcaacaacccggagcacagccaccagggccagttcctcatctgccgcacctgccacaccgcgatcgagctggaacagccggatatcagccgggccatcgtcgccggagcgaacagcgtcggcttcgccgttgaaagccagaccgtcgaggtggtcggcctctgcggcacctgccgggaccagaaggacgcctga

SEQ ID NO: 319293 - DNA, 924 bp, Pseudomonas aeruginosa
gtgaccctgcgtccctttgccctgctgtccgcctgcttcgccctgttcctgctggcttcgccggcgcgcgccgaggtcagcgtgctgaccagcatcaaaccgctgcaactggtcgccgcggccatccaggacggcgtcggccagccggacgtactgctgccgccgggcgcctcgccgcaccagtacgccctgcgtccttccgacgtacggcggctgcgcgaggtgcaattgttctactggatcggcccggacctggaaaacttcctgcccaaggtgctcgccggccgccagggcgccagcgtcgcggtgcaggacctgccgggcatgcacctgcgcaagttcgtcaatttcgaggaagaggagcatgccgggcacgacgagcacgaccatgaccatcgtcccggcatgctcgacgcccacctctggctgttgccggccaacgcccgcaccatcgccgcgcggatggccgaggacctggcccaggtcgacccggccaacgccgggcgctaccgggccaacctgaaggccttcgaggagcgcctcggcgggctcgacggcaaactccgcgaacgcctgggcaagcttgccggcaagcctttcttcgtcttccatgaagccttcgactatttcgaggaagcctacggattgcgccataccggcgtgttcgcggtatccgcggaggtccagccgggagcacgccatgtcgccgccatgcgcgcccagctgaaggccgccggtccggcctgcatcttcagcgagccgccgcttcgaccgcggctggccgacaccctcagcgaaggcctgccggtgcgcctggccgaactggacgacctgggcgtgaacgtgagcgtggacgccaacggctatgagaatcttctgaacaacctggcaggcgaatttgccggctgtctggaaaagctctga

SEQ ID NO: 319294 - DNA, 2205 bp, Pseudomonas aeruginosa
atgttgcgtacggtggccggcttcggacgccccaacaaccatcgggaggttaatcagcggatggccaagacagacgcacgcagtccccgcaccgaacgcgggaccatcgccctgcaggacgcgtcgcaggatatctgggacaagaagtaccggctcaagagcaaggacggtacgccggtggatgccagcgtcgacggtacctggcaacgcgtcgcccgcgcccttgccgatgtcgaggaaaaggcctcccgcgaacactggtacgggcgcttcctctgggccctgcgcaacggtgccatcccggccggccggatcatctccaacgccggcgccctggggcacaagccggccacctcgactatcaactgcaccgtgtccggaaccatccaggactccatggacaacatcctcgagaaagtccacgaggccggcctgacgctcaaggccggctgcggcatcggctatgagttcagcaccctgcgcccgcgcggcgcctacgtttccggtgccggtgcctacaccagcgggccgctgtcgttcatggacatctacgacaagatgtgcttcaccgtcagctccgccggcggccgccgcggcgcgcagatgggcaccttcgatgtcagccacccggacgtccgcgaattcatccgcgccaagcgcgaggacgggcgcttgcgccagttcaacctgagcctgctgatcaccgaccagttcatgcaggcggtggaacaggacgccgactggccgctggtattcccggtgcacgtgaaggagcgcgacgagatcgacctcgacgaccccaacgcggtggtctggcgcgaatggccgatccaggacgactacgtccagcgcgccgacgggctggtcgcctgcaaggtctacggccaggtccgcgcccgccacctgtgggacatgatcatggtctccacctacgactatgcggagccgggcttcatcctcatcgaccgggtcaacgaactgaacaacaactggtggtgcgaggcgatccgcgccaccaacccctgcggcgagcagcctctgccgccgtacggctcgtgcctgctcggctcggtcaacctcacctgcttcgtcgagcagccatttggcgacgaggcgcgcttcgactgggaccgtttccgcgaagtggtgcgggtgtttacccggatgctcgacaacgtggtggaaatcaacggcctgccgctggaacagcaacgccaggaaatccttggcaagcgccggcatggcatgggcttcctcggcctgggctcgaccctgaccctgctcaagctgcgctacggcagtcccgaggcctgcgtattcaccgaggaagtggcgcgggaaatggccctggtgggctgggaagtggccctggagctggccagggagaagggcccggcgccgatcctggcgcaggactacgaagtcactgcggaaatgcttcgcaagcgtccggaaatggccgccgatggctataaggccggcgaccgcatccgcggcagcgtgcttcacgccaagtattcccgctacatgcagcgggtcgccgaacatgctccggaactgatcgaggcgttggctgaaaccggcgcgcgcttcacccaccacagctccatcgcgccgaccgggaccatcagcctgagcctggccaacaatgcctccaacggtatcgagccgagcttcgcccaccattattcgcgcaacctgatccgcgaaggccgcaagaccaaggaaaaggtcgaggtctacagctacgagctgctggcataccggaccctggtcaacgcccaggccctgccggacagcgacgacccggcgcgacgcctgccggactacttcatcaccgccgacagcgtcaccccggcgcagcacgtggacatccaggcggcggcgcagaagtgggtcgattcgtcgatctccaagaccgccaacgtgcccaccgactacccgttcgaggacttcaaggacatctaccgctacgcctggcaccagggactcaagggctgcaccaccttccgcttcaatcccgaggcgttccagggcgtgctggtcaaggagtccgacctggagaagacccgctaccgcttcgaactggaggacggcagcgtggtggagttcaagggcaacgagcaggtcgagtacgacggtgagatccataccgccgccaacctcttcgacgccttgaaagaaggctattacggcaagtactga

SEQ ID NO: 319295 - DNA, 690 bp, Pseudomonas aeruginosa
atgtcagcagtcaagatcacgcagaagatcaagggcttcaaggtcgtcaacgaagccgaggagcaggcccttgccgccgccgcggaagccgcgtcggtggtgcagatggacgagaccctggagcgcccggataccctgatcggcgccacctacaagatcaagtcgccgctgttcgagcacgcgctctacgtgaccatcaacgacatggtcctcaatgcgggcacggcgcacgagcagcggcgtcccttcgagatcttcatcaactcgaagaacatggatcatttccagtggatcgtcgcacttacccgcatcatgtccgcggttttccgcaagggcggcgactgtaccttccttgtcgaggaactcaaggcggtattcgacccgcgcgggggctacctgaagaaaggcggcatctacatgccttccatcgtcgccgagatcggcggcgtgctggagcgccacctgacggccatcggcttgttgcgtggccctgaactggacgaggaacagcgtcttttcctcgcggaaaaacgtgccgcctacgaggccgcccagggcaccagcaaggtcgagccgggcgaaggcttccccgccggcgcgcaactgtgcggcaagtgcaacagcatggcggtggtacagatggacggctgcgccacctgcctcaactgcggacactcgaaatgtgggtga

SEQ ID NO: 319296 - DNA, 546 bp, Pseudomonas aeruginosa
gtggtcggtacctgggtcggtctcagtcgtcgcgccgaagcctacctggagccgagcttccaggccctgcgggcgatccccagcctggcctgggtgcccctgctgctgctctggttcggcatcgacgagacgccgaagatcgtcctcatcgccctcggcgccttcttcccggtctacctcgcgctggtcgccggggtacgcggggtcgatcgcaagtgggtggaactggggcggctctaccgtttgtcgcgcttcgccctggtccgccgcatcctccttccggcggcgctgccgaacctgttcaccggcctgcgcggggcgctcagcctgagctggatgttcctcgtcgcggcggagctgatcgccgccacccagggcctcggctacctgctcagtgacggtcgggaaacctcgcgtccggacctggtgatcgccgcgatcctggtcctggcggccctcggcaagctcagcgatggcctgctccgctcgctggagcgccgggccctgcgctggcgcgacagcttcgacggggagggcggcgcatga

SEQ ID NO: 319297 - DNA, 750 bp, Pseudomonas aeruginosa
atgagcggcctgctcgacctgctggagattcgcaaggcctatggcgatacgcgggtgctggagggcgtggcgctgtcgctggcgcccggcgaggtggtcagcctgctcggccccagtggttgcggcaagagcaccctgctgcggatcgccgccggactggacgatgacttccagggcactgtcgaacgcaacccgatcctcggcttcggcccggacggcgagaacggccgtagcggtggaatcggcgtggtgttccaggagccgcgcctgttgccctggctgacggtggcgcagaacgtcggtttcgccgacggctggctggaggacgagcactgggtcgagcgcctgctcgccgatgtcggactggccggctgcggaggattgctgcccaagcaactgtccggcggcatggcgcagcgcgcggcgatcgcccgcggtctctacggacggccgcaggtgctgttgctcgacgagccgttcagcgcggtcgacgccttcacccgcatgcgcctccaggacctgctgcaggacgtggtgcagaactacgagatcagcgtcctgctggtcacccacgatctcgacgaggcgttctatctcgccgaccgcgtgctgctgatgggcggccgtcccggacacatccgccgcgagttccacgtaccgctggcgcgtccccgcgatcgccgggcggtggagctggcctacttgcgcggcgaggccctgaccgaaatgcagcgggcgcacgtgctctga

SEQ ID NO: 319298 - DNA, 594 bp, Pseudomonas aeruginosa
atgctcgtcgtttccatcgccggaagtcccagcgtacgctcccgctccggggtgttgctggagcgtgccagggactggctgagccgtcgcggcgtcgaggtggccagccaccaggtgctggattttcccgccgaggacctgctgcgtgcccgcctcgacagtccgccggtactggcgctggccgagcagatcggccgcgccgacggcctgctggtcgccaccccggtgtacaaggcctcgttttccggcgcgctgaaggtcctgctcgacctgttgcccgagcgcgccctggagcacaaggtggtgctgccgttcgctaccggtggcagcagcgcgcacatgctggccgtggactatgcattgaagccggtcctggccgcgctcaaggcccaggaggtactgcatggcgtattcgccgtggacaagcagatcgcctacgccaccgagagcgacccggcgcgcctggaaccggtcctcgagcagcgcctggaaaacgccctggaaaccttccacctggccctctcgcgacggccgcagccgatcgacccgcagttgctcaacgagcgcctggtgaacgcccgctggagcatctga

SEQ ID NO: 319299 - DNA, 972 bp, Pseudomonas aeruginosa
atgcgcaccatcgctttgcgtcgtggactggcggccctgctggtggcggccctgtcctacggcgttcaggccgacgagaagtcggccaacaccctgcggatcggctaccagaaatacggcaccctggtcctgctcaaggcccgcggcaccctggagaaacgtctcgccgaagacggcgtgaaggtgcaatggaccgagtttcccggcggcccgcaactgctcgagggactcaatgtcggcagcatcgacttcggcgtgaccggggaaaccccgccggtcttcgcccaggccgccggcgccgacctgctctacgtggcctacgaaccgccggcgccgaccagcgaggcgatcctcctgccgaaggactcgccgattcggtcggtggccgagctgaagggcaggaaagtcgccctgaacaagggctccaacgtgcattacctgttggtccgcgccctcgagcaggccggcctgaagtacagcgacatccaacccgtctacctgccgccggccgacgcccgcgccgccttcgagcgtcacagcgtcgacgcctgggtgatctgggacccctaccaggccgccgccgagaagcagttgtccgcgcgggtcctggtggatggtcgcgagctggtcgacaaccaccagttctacctcgccacccggacttacgcgcaacggcatccgcaggtgctcgacaagctggtggacgagatccgcgaggtcggtgactggtcgcgggccaacccgcagcaggtgaccgagcaggtcgcgccgctgctcgggctgcccgccgacatcaccctgaccgcggtgaagcgccagggctacggcgcgcagttgatcaccccggcggtggtcgaggcgcagcagaagatcgccgacaccttcacccagctgaagctgattcccaaaccgctgagcatcaaggaggtgatctggacgccaccggccggcaaggtcgccagcgcaccctga

SEQ ID NO: 319300 - DNA, 1149 bp, Pseudomonas aeruginosa
atgagcctcgagattttctggttccttcccacccacggcgacggccactacctgggcaccacccagggcgcccgtgccgtcgaccacggctacctgcagcagatcgcccaggccgccgaccgcctgggcttcggcggcgtactgatccccaccggacgttcctgcgaggactcctggctggtcgccgcctcgctgatcccggtaacccagcgcctgaagttcctcgtcgcgctgcgtcccgggatcatttcgccgaccgtcgccgcgcgccaggcggcgaccctggaccggctgtccaacggccgcgcgctgttcaacctggtcaccggcggcgatcccgacgaactggctggcgacggcctgcacctgagccacgccgaacgctacgaggcctcggtcgaattcacccgcatctggcgtcgcgtgctggagggcgagaccgtcgactacgccggcaagcacatccaggtgaagggcgccaaactgctctatccgccgttgcagcagccgcgtccgccgctgtacttcggcggctcctcggaggccgcccaggacctcgccgccgagcaggtcgagctgtacctgacctggggcgagccgccggcggcggttgccgagaagatcgcccaggtacgcgagaaggccgcccgccagggccgccaggtgcgcttcgggatccgcctgcacgtgatcgtccgcgagaccagcgaggaagcctggcaggccgccgatcgcctgatcgcgcacctcgacgacgacaccatcgcccgcgcccaggcctccctggcgcgcttcgactcggtcggccagcaacgcatggccgcactgcacggcggttcgcgcgacaacctggaagtcagccccaatctctgggccggcgtcggcctggtgcgcggcggcgccggcaccgcgctggtcggcgacgggccgacggtggcggcgcgggtcagggagtacgccgagctgggcatcgataccttcatcttctccggctatccgcacctggaagagtcctaccgggtcgccgaactgctgttcccgcacctcgacgtgcagcgcccggcgcagcccgagggacgcggctatgtcagcccgttcggcgagatggtggccaacgacatcctgccccggcaggccgcgcagagttga

SEQ ID NO: 319301 - DNA, 789 bp, Pseudomonas aeruginosa
atgagcatttccaaacgactggccgagcgcctggcgccctgggcgctgccgctggtcctgctggcggtgtggcaggcggcggttgagttcggctggctgtccagccgcatcctccccgcgcccagcgccgtactcgaggccggctgggcgctgctgcgcagcggcgagatctggcagcacctggcgatcagcggctggcgcgcggcgatcggctttctcatcggcggcgccatcggcctggtgctgggcttcgtcaccggcctgtcgaagtggggcgaacgcttcctcgacagttcggtgcagatgatccgcaacgtgccgcacctggcgctgatcccgctggtgatcctgtggttcggcatcgacgagtcggcgaagatcttcctggtcgccctcggcacgctgttcccgatctacctgaacacctaccacggcatccgcggcatcgaccccggcctgctggagatggcgcgcagctacgggttgtccggcttcgccctgttccgccaggtgatcctgcccggcgcgctgccgtcgatcctggtcggggtgcgcttcgccctcggcttcatgtggttgaccctgatcgtcgccgagaccatttccgccagctccggcatcggttacctggcgatgaacgcccgcgagttcctgcagaccgacgtggtggtcctggcgatcctgctctatgccgtcctcggcaagctcgccgacctcgccgcccgcggcctggaacgcgtctggctacgctggcacccggcctaccaggtcaagggaggtggcgcatga

SEQ ID NO: 319302 - DNA, 825 bp, Pseudomonas aeruginosa
atgaatgcccacaacgccgcccttggcggcactccgcagcgcctcaagcgcggtatcccgctggccctgcgcggagtggcgcggcgcttcggcgagcgcgaggtgctcaaggacatcgacctgctggttccggccgggcagttcgtcgctatcgttggccgcagcggctgcggcaagagcaccttgctgcgcctgctggccggcctcgaccagcccagccgcggcgagttgctggccggctcggcggcgctggccgaggcccgcgaggacacccggctgatgttccaggactcgcgcctgctgccgtggaagcgggtgatcgacaacgtcggccttggcctgcgcggcgactggcgggcgaaggccctgcaggcgctgcgggcggtcggcctggccgagcgtgccaacgagtggccggcggccctgtccggcgggcagaagcagcgcgtcgcgctggctcgcgcgctgatccacgagccgcgcctgctgttgctcgacgagccgctcggcgcgctcgatgcgctgacccggatcgagatgcagcaactgatcgaaggactctggcgcgaacacggtttcaccgtcctgctggtcacccacgacgtcagcgaggcggtggcggtggccgaccgggtgatcctcatcgaggacggcgagatcggcctcgacctgccggtggaactgccccggccgcgctcgcgtggctcggcgcgactggccgcgctggaagccgaagtgctcaaccgggtgctggcgcagccggagctgccgccgcaacccgagcccgtttcacccctgcccacgcaactgcgctgggcgctctaa

SEQ ID NO: 319303 - DNA, 216 bp, Pseudomonas aeruginosa
atgaccatcaaagccatcaacgttcgtaaccagttcaagggcaccgtgaaggaaatcatcgaagggccggtgctctccgagatcgacgtgcagaccgctgccgggatcgtcacttcggtgatcaccacgcgttcggtgaaggaactggagctggccatcggtagcgaagtgatcgccttcgtcaagtccaccgaggtctccatcgccaagctgtga

SEQ ID NO: 319304 - DNA, 339 bp, Pseudomonas aeruginosa
atgaccctgaccgacttccgcgcgcgtctgcgcagcgaacaccacctgttcaccgacaccctggcgttcatcgccgagcactacagctacacgccgagcgccttcgacaacggcagcgtgagcaacccggccgggcagaacgaaggttcctgcaagaccctgggcttcgccatcctcgagggcctcagcctcgaggaaaccctgctggccttcggcgagcactaccgtgcggtgcgcgacaacccggaaggcgacgaccacgccaacatccgcgccctgcaacagaccggcctggccggcgtgcatttcgagcgccagcccctgtcgcgccggggctga

SEQ ID NO: 319305 - DNA, 312 bp, Pseudomonas aeruginosa
atgaccgaagccaacctcaccgaacagcaacgcctggaactcgaagccgccgccttccgcaccctggtccatcatttgcagacccgcaaggacgtgcagaacatcgacctgatgaacctcgccggtttctgccgcaactgcctgtccaagtggtacaaggccgccgccgacgacctcggggtggaagtcagcaatgaccaggcccgcgaagagatctacggcatgccctatgccgagtggaaagccaagtaccagaaagaagcgagcccggaacaacaggccgccttcgccaagagccagggcaacgcctga

SEQ ID NO: 319306 - DNA, 372 bp, Pseudomonas aeruginosa
atgccgcgactggaaccgggaatggcgcgaatccgcgtcaaggacctgcgcctgcgcaccttcatcgggatcaaggaggaggaaatcctcaacaagcaggacgtgctgatcaacctgaccatcctctacccggccgcggacgccgtggaggtcaacgacatcgagcacgcgctgaactaccgcaccatcaccaaggcgatcatccgccacgtcgaggagaaccgcttcgccctgctcgaacggatgacccaggaaatcctcgacctggtgatggagaacccggcggtgcgctacgccgaggtggaagtggacaagccgcacgcgctgcgcttcgccgagtcggtctcgatcaccctcgccggccaccgctga

SEQ ID NO: 319307 - DNA, 561 bp, Pseudomonas aeruginosa
atgaacccagcactttcccagcattaccgggagatcctcgtcggtctcggcgaagacccgcagcgcgaaggcctgctcgacaccccgaagcgcgcggccaaggccatgcagtacctctgccacggctatggccagaccctggaggaaatcgtcaacggcgcgctgttcgcctcggacaacgatgaaatggtcatcgtccgcgacatcgagctgtactccctgtgcgaacaccacctcctgcccttcatcggcaaggctcatgtggcgtacattcccaccggcaaggtgctcggcctgtcgaaggtggcgcggatcgtcgacatgttcgcccgccgcctgcagatccaggagaacctcacccggcagatcgccgaggcggtccgccaggtgaccagcgccgccggcgtggcggtagtgatcgaggcccagcacatgtgcatgatgatgcgcggggtggagaagcagaactcgcagatgttcacctcggtgatgctcggcgcgttccgcgactcgaacaccacccgccaggaatttctgcaattgatcggaaggagcaagtga

SEQ ID NO: 319308 - DNA, 705 bp, Pseudomonas aeruginosa
atggcgacagccccgatcctgatcaccggcgccagccagcgtgtcggcctgcattgcgcccgccgcctgctggccgacggcgagtcggtgatcgtcagctaccgcagcgaacgcccggcgctggacgaactgcgccaggccggcgcgctgaccctgcacgccgacttcgccagcgaggccggcatcttcgccttcatcggggccctccgacagcataccgacagcctgcgagcgatcgtccacaacgcctcggactgggtcgccgagacgcccggccacgaagccgaggcgttccagcaactgttcagcgtgcacatgctcgcgccctacctgatcaacctgcactgcgccgagctgctggaacgctcgcagcctgccgacatcgttcacctcaccgacgacgtggtgcgcaagggcagcgcccggcgtatcgcctactgcgcgagcaaggccgggctggacaacctgaccctgtcgttcgccgcgcgcttcgcgccgaggatcaaggtcaacgccatttcaccggcactggtgatgttcaacgacggggacgacgccgaataccgcgcccgcaccctggcgaaatccgccctcggcatcgaaccggggccggaagtcatctaccagagccttcgctacctgttggacaacccctacgtcaccgggaccaccctgaccgtgaacggcggccgccacgtcaagtga

SEQ ID NO: 319309 - DNA, 558 bp, Pseudomonas aeruginosa
atgtctaccgctcccgttaccctgctggtggcccgccgcgtcgccgccggccgttaccgcgacttcctcgcctggcagcgcgaaggcgaagccctcgccgccgacttccccggctacctcggctccggggcgctggcgccgcccgccggcggagacgaattccagatgatctttcgcttcgccgacgacgccaccctcgccgcctgggcccactccgcctcgcgccaggcctggctcgaacgcggccaggggctcttcgacgaaccgcgcgagcgccgcgcccacggtctcgccgcctggttcgacgacaaccgcaaaccgccgcgctggaagcagagcgtggcgatctggctggcgttcttcccggtctcgctggccttcaacctcggcgccggcccctacctcggcgagctgtcgctggccgcgcgggtgctgctcagcaccctggtcctcaccccgttgatgacctactggttcatccctctctccagccgcctgctcgccccctggctgcaccgccgcccgcagcgcgccgccagcctgccggaagcgcactga

SEQ ID NO: 319310 - DNA, 453 bp, Pseudomonas aeruginosa
atgaaagtcgccattctctccggctcggtctacggcaccgccgaagaagtcgcccggcacgcccagaaattgctgtccgcggccggcctcgaggcctcccatctgccccgcgccagcctcgacgaactcaaggccttcgcccccgaggcattcctggtggtgacctcgaccaccggcatgggcgaactgccggacaacctgcaaccgctgtactacgcgatccgcgaccaactgccggcctggcacggcctgccgggcggggtcatcggcctgggcgattcgagctacggcgacacgttctgcggtggcggcgagcaggttcgcgaactgttcggcgaactgggcgtgcgtgaagtgctgccgatgctgcgcctggatgccagcgaaaccgttacccccgagaccgacgccgagccttggctggccgagttcgccgccgccctcaagggctga

SEQ ID NO: 319311 - DNA, 894 bp, Pseudomonas aeruginosa
atggaattccgtcaactccgcagcttcgtcgaagtggtccgccagggcagcttcacccaggcggctcaggtccgccacgccagccagtcgaccatcagcaagcaggtcgcccaactggagcagagccttggcgtgcaggtattggaacgcaacgggccgcacgtgcgcctgaccgacgccggcgccgtggtgtttcgccgcgccgaggagatgctgcggctgcgccgcgacctgctcagcgaattggacgacctcagccagctcaaccgcggcgaactgcgcctgggcctgccgttgctcggtgccgacgcgctgttcgcccaacgcttcgccgaataccggcggcgctatccgaacatcgccgtgcacctggtggagggcggcagcaagaccatggagcaggcggtgctggccggcgagctggaattggccggcagcctcaccccggcggacgacggcttcgactaccagccgttctgcaacgaaccgctggacgtgctgctgccggccgggcatcccaaggccgctgccgccagcgtcgccctcggcgaactggcggacagcccgttcctgctctaccagcagagcttcaccctcaacgaccgcctgctgcgcgcctgcctggaggccggcttcagcccgcgcgaaggcggccgcagcggccaggccgacttcctcggcgcgctggtggcggccaaccagggagtggtgctgctaccacgagtgatcgctcgcgagatcgaacgcccgggagtggtgcgggtcctgctcagggagccggacctgcgctgggacatcgccttcatctggcgccgtggcggctacctgtcgcgggcggcgcaggcctggctggagctgctgcgcgagcagccgctggaggaaagcccggcgtag

SEQ ID NO: 319312 - DNA, 390 bp, Pseudomonas aeruginosa
atgttgcccccgctcgtccgccgtctgtcccgccttgccgccgaactggcggtactcatcgccttctggtgggctggcggctggctggcgaaggccatcggcctgccgctgccgggcggggtggtcggcctggcggcgctgttgctgctgttcgccagcggcctgctgcgtccggcctggctgcaggccggcgccggcctgttgctggcggagatgttgctgttcttcatcccggcgctgatgagcctgctcgactacggcgcgctgctacgcagcgagggctggcgcatcctcctggtgatcatgctcagcaccctgctggtgatgctggtcaccgcggtgtcggtggagtggatgtgccgctggagggcgcgccatgagtctcgataa

SEQ ID NO: 319313 - DNA, 687 bp, Pseudomonas aeruginosa
atgagtctcgataagcaagccctgttctggttggcggtgaccgtcggcggctacctgctgagccgccagctgtaccgccgggtgaagtggtactggctgtcgcccatcgtgttcgtcccggtgctgctctacgccctggcgattcccacccatacccgctacgccgactacgcccgcgacaccaattggctggtggcgctgctcggtccggcgacggtggccttcgccatcccgatctggcagcagcgcgagctgctgatgcgccactggccggcgctgctggccgggatgttcgccggcaccgcggtggccatcggcagctcctgggcgctggcccaggccctggcgctggacggccaggtcacgctgtcgttgctgccgcgctcgatcaccacgccgttcgccatggagatgtcccacgacctgggtggcgtgccggaactgaccgccgccttcgtgatgatcaccggggtgttcggcgcggtgatcggcggcaccctgctgcgcgtcctgcgcttgcgcacgccgctggcccgcggcgcgctgttcggcgtcggcgcgcacggcgccggcaccagtcgggcctacgagttcggcggcgaggaaggttcggcggccggtctgctgatggttctcaccgggctgttcaacctgctggtcgcgcccctgatcgcccactgcctgtag

SEQ ID NO: 319314 - DNA, 780 bp, Pseudomonas aeruginosa
gtgaccgccgttcactccctgcccgccgatgtgcaagcccaggtctccgccgccgaatggcagacccgcgtcgatctcgctgcctgctaccggctggtcgccctgcacggttgggacgacctgatcttcacccacatctcggccaaggtgccgggcaccgaggacttcctgatcaacccgttcggcctgatgttccacgagatcaccgcctccagcctggtgaaggtggatgccagcggcaagaagctgatggacagcccctacgagatcaacccggccggctacaccatccatagcgcggtgcacgaggtccgccacgacgtcgagtgcgtgctgcacacccataccgccgcggggatcgcggtgtcctgccagaagcagggcctgttgccgctgtcgcagcaatcgttgttcgtgctctccagcctgtcctaccacgcctacgagggcgtcgccctgaaccatgaggaaaaggcccgcctgcaggccgacctggggaccagcaacttcctgatcctgcccaaccacggcctgctcacctgcggcggttccatcgccgataccttcctcatgatgttcaccctgcaacgcgcctgcgaggtacaggtgatggcgcagagcggcggcgccgagctgatccacatcccggggcagatcctcgccggcgcgcgcgacatgatcgccggggtgatgcgcagcaagaccggcatgggcggccagctcgcctggccggcgctgctgcgcaagctcgaccagcagaacccgggctaccgccagtga

SEQ ID NO: 319315 - DNA, 897 bp, Pseudomonas aeruginosa
gtgaccgcggcgctgcccggcattcccctggaggcctggcggaggcgcggccgcactctggatttcaagggcttcccgatccgctattgggaagccgggcagggtcggccgttgctgctgatccacggttttcccagcgccgcctgggactggcactacctctgggagccgctggcgcagcgctaccgcgtgctggtctgcgacctgctcggcttcggcgattcggccaagccgcgcgcccatcgctacagcctgctggagcaggccgacctgcaacaggcgctgctcggccgcctgggagtcgacgagccgctgcacgtgctggcccacgactacggcgacagcgtcgcccaggaactgctcgcccgccatcacgaaggccggctgcggctcgcctcctgcgtgttcctcaatggtgggctgttcccggaaacgcaccgcccggtgctcagccagaagctgttgctgagcccgttgggcgggctgttcggccggctgttcgaccgccgcgccctggcgcgcaacttcgccaaggtcttcggcccgcgcagccagcccggcgagaccgagctggatgccttctggagcctgatcgaaagcaaccaggggcagcgggtgatgcatcgcctgattcgctacatcgtcgaccgccgcgagcagcgtgagcgctgggtggcggcgttgcagcacggcggggtgccgttgcgggtgatcgacggcgccgtcgacccgatctccggggcgcacatggtcgagcgctaccggcaactggtcgccgatgccgactgcgtgctgctcgatggcatcggccattatccgcagatcgaagcgccggcggcggtgctcgaacattacctggcgtttcgcgcccgactggatgattcagagttttcttaa

SEQ ID NO: 319316 - DNA, 294 bp, Pseudomonas aeruginosa
atgcacgatcccgtttctcccttgcgcgtgttcgacgagggctcttggttgttccgccagatggtgcaggcgcaaccgttcatccgccagtccgggatggtcctcgccgaactcggcctgctgctggcgctcgggctcggctacctgtgctggcaggaaggcagtcgctggtacgccgtcggcgccggcctcgcgttgctcggcagcctgctgctggtggtggtccggcacaactacgactggtggctgttcaagctcggcccgcgtggccggctgtacattccgttcgactga

SEQ ID NO: 319317 - DNA, 912 bp, Pseudomonas aeruginosa
atgagcgatgccctgcgtttcgacgaccaagtcgtgatcgtcaccggagccggcggcggccttggccgcgcccacgccctgctgttcgcgaagcatggcgcccgggtggtggtcaacgacctcggcggcagcacccatggcgaaggcgccagtgcctcggcggcggacaaggtagtggcggagatccgtgccgccggcggcaccgcggtggccaaccacgactcggtcacggacggcggcaggatcgtggagaacgcgctggacgccttcggtcgcgtcgacgtggtggtcaacaatgccggcatcctgcgtgacaagaccttccacaagatggaggacgccgactgggacctggtctaccaggtgcatgtcgaaggcgcctacaaggtcactcgcgccgcctggccgcacttgcgcgagcaggcctacgggcgggtggtgttcacctcctcgacctcgggcatctacggcaacttcggccagagcaactacggcatggccaagctcggcctctacggcctgacccgcaccctggccctggaagggcgcaagaacaatatcctggtcaacgccatcgcccccaccggcggtacgcggatgaccgaggggctgatcccgccgcaggtcttcgagcagctcaagccggagctggtcagcccgctggtggtctacctcggcagctcggcctgcgaggatacctcggggctctatgaggtcggcggtggctggatcggcaaggtacgctgggaacgcagcctgggcttcggcttcgatccgaaggccggcttcgacgccgaggacgtggccgcgcactggcagcagatctgcgacttcgagaacgccgcgcacccggcggacaacgtcgaggcgctccgtgaaatgatggccaacctgcagaagcacgcgctctga

SEQ ID NO: 319318 - DNA, 771 bp, Pseudomonas aeruginosa
atgagtgtcatcgtcgaacgcaacggcccggtcaccaccctggtcatcgctcgcccggagcggcgcaatgcggtggaccggccgaccgcccaggccctggccgacgccctgcgcgagttcgaagcggacgatacggcgcgggtcgcggtactcaccggcagcggcggcaatttctgcgccggcgccgacctggcggcggtggccgaggatggcgagcggcgcaatcgcctggaggcggagggcgacggtccgatggggccgagccgcatgcagctcggcaagccgctgatcgccgccatcgaaggttatgcggtggccggcgggctggagctggcgctgctcgccgacctgcgggtgatggccgaggacgccatctgcggagtgttctgccggcgtttcggggtgccgctgatcgatggcggcagcgtgcgcctgccacggatcgtcgggcagggccgggcgctcgacctgatcctcaccgggcgtccggtgaaggccgacgaagcgttgcagatcggcctggccaaccgggtggtgccgagcggttcggcgcgagccgaggccgaggagctggcggcggaactcgccgccttcccgcagacctgcatgctcgccgatcgcgccagcgtatacgcgcagtgggaactgtccttcgacgtggccctggccaacgaattccagggcgggctggcggtgatcgagagcggcgagaccctggagggcgcgcagcgcttcaaggacggcgaggggcgccacgggcgcttcgagtga

SEQ ID NO: 319319 - DNA, 345 bp, Pseudomonas aeruginosa
atggccctgacccttctgaaaaataccgccggcgccgatcttggcgccgccagcccggtcgcggtgccccttggcgagccggtcgcgcagacccgcgcctacgccgtggagcgcaccgaccaggtggaaaccggcatctgggaatgcacccccggacgctggcggcggcagatcgtcgagcaggagttctgccacttcctgcaaggccgctgcaccttcaccccggacggcggcgagaccatccgcatcgaggccggcgatgccttgctgctgccggagaacagtctcggcgtgtgggatgtgcaggaaaccgtgcgcaagagctacgtgatcatccaccgctag

SEQ ID NO: 319320 - DNA, 1407 bp, Pseudomonas aeruginosa
atgtcggcctggcgccacctcagcctgtggatgaatcaactggacgatccgctcgaagcgcgcccgtccctggaagaatccctcgaggtcgacgtggccatcgtcggcgccggctacaccggcctctggaccgcctattacctgaagcgccgggcgccgcagttgcgcgtcgccatcgtcgaggcagaaaccgccggcttcggcgcctcggggcgcaacggcggctggctgatgggcaacctgctcggcgaggacggcctgctcgccggcttgccgccggagcggcgccgggccggctacgacctgctgcacgggattcccgacgaagtcgcgcgggtgctgcaagaggaaggcatcgactgcgactaccgcaagggcggcgtgctctactgcgcggcgcgctacccggaacaggaacgccgcctgcgcgcctatctgcatgatctctatgccgaaggcctggacgaaagcgactaccgctggctgacgccgcaggaactcgaccagcagttgcgcatccccggcagctacggggcgatccattcgccgcactgcgccaccatccagccggccaggctcgcgcgcggcctggcccgcgcggtggagcgcctgggcgtgcggctgttcgagaagagccgggtgctgcactggcaacgcggcctgctgcgcaccgagcgcggcgaactgcgcgccgaatggatcgtaccggcagtggaaggctacgccgccagcctgccgccgctgggccactaccagttgccggtgcagagtctgctggtggccaccgagccgctgccgtcgtcggtctgggcggagatcggcctggagcgcggccaggccttcagcgaattcagccgccaggtcacctacggccagcgcaccgccgacgaccgcctggccttcggcgcgcggggcggctaccgcttcggcggcaagctgcgcagcgacttcagcctcgacgacgaggaagtcggcctgcgtcgctacctgttcggcgaactcttcccgctgctcaaggacgccaggatcagccacacctggggcggcaacctcggcatggcccggcgcttccgcccgcacatgttgctcgaccgcgccagtggcatcgccctctccggcggctacggcggcgaaggggtcggcgccagcaacctcggcggccgcaccctggccgcgctgatcctcggtgaggacagcgagctgctgcggcagccctgggtgctgggcgagcgtccgctggacagcctggcccgctgggaaccggaaccctgccgctggctcggctacaacgcgatcatccgcagtttcgtccatgaggaccgggtccttgccgacccgcacagcgcgccctggcgccgcagcctggcgcaaaccctcgcggccggcatggaaagcctgatgcgctga

SEQ ID NO: 319321 - DNA, 807 bp, Pseudomonas aeruginosa
atgcagcccgaacagaccattcccgccgaccgcgatctcgccgacgccacccgcgagacggtcatgcgttatcacctcagctggaagcaccgcgacatcgacgcggtgatggcgctctatcatcccgaggtcgaatacaacgacttcttccagaaccgccggatgcgcctggccgatctccgcgagtacgtcgaggcgaccatgcccaagggccccgacgagtcgctggagcacaccgaccgtatccgcttcgacggcgataccgccttcatccagtaccgcctgcgggtgaccctcagcggccgcctggcttcgttccgcgccagcgaggcgatcaccgtgcgcgacggcctgatctggcgcatcaacgaatacgcctcgctggtccacgaaagcggcggcggagcccaggccggcggcgacggccggccgccggccagccgcctggggctttcggccaagcagctgagcctgctggcacgcgacctggagcactacttccagcaggcccagccctatctcgatccggacctggacctgacccaggtggccaatgccaccggctatacgcgcaaccagatttcctacctgctcaaccaggtgctcggcctgagcttctaccagtacgtcaaccagacccgcctgcaacacctgctcggccagctttccggcgagctgcccggacgggtcgacgaactggccttcgccgccggcttcaattcgctgtcggccttctaccgctgcttccgccagcacaccggccagtctccgcgcgaatacctgaagcgcctgtcgtcgcgccgctga

SEQ ID NO: 319322 - DNA, 1758 bp, Pseudomonas aeruginosa
atgacaacaacaaaaaggcgcggaatcttccctctgcacgcactcgctgcggccacagccctgggttgcgccacccaggcctcggccgtgtcattcaacatcggggagatcgaagggcaattcgactcgtcgctgtcggtgggggccagctggtccatgcgttccgccgacaaggactacatcggcacccgcaacggcggccacgcctcgtcgcagacctccgacgacggccggctcaacttcaagaagggcgaaaccttctcgaagatcttcaagggcatccacgatctcgaactcaagtacggcgacaccggcgcgttcttccgtggcaagtactggtacgacttcgagctgaaggacgaacaccgcctgctctacgacatcgacgaccacaatcgcaaggagggcgccaagtcctccggggcgcagctgctcgatgccttcctctaccacaactacagcatcggcgacctgcccggcagcgtgcgggtcggcaagcaggtggtgagctggggcgagagcacgttcatccagaactcgatcaacagcatcaacccgatggacgtcgccgcgttccgccggcccggcgcggagatcaaggaaggcctgatcccggtgaacatgctctacctgtcccagggcatcagcgacgcgctgaccgtcgaaggcttctaccagttggagtgggaccagacggtgatcgacaactgcggcaccttcttctctaccaccgacgtggtcgccgatggctgcgagcggatggtctacgccggcagcgacttcgacccgaacccggccaacggctaccgctacctgccgcgcgccggcgatcgcgatgcccgcgacagcggccagtggggcctggccctgcgctggtacgcggcggagctgaacgacaccgagttcggcctgtacgcgatgaactaccacagtcgcaacccgtactacagcgtgatcgccggcaacggcctggccacctccgacccggtcaccgggcgctccaccggctattacttcatcgactatcccgaggacatccgcctctacggcctgagcttccagaccaacatcggcagcacctcggtggccggcgagctgagctaccggccgaacatgccgctacaaatcaacagcaccgacatgtcgatcgccgcgatctacccgaccaccctgttcggcaacccgatctacgacagcggcttcgccaccccgcgcgccggcgaggtgatcaacggctacgtgcgcaagccggtgacccaggcacaggtgaccgtcacccagttcttcgaccgggtactggcggccgaccgcctgaccgtggtcggcgaagtcggctacaaccacctcagcggggtcgacggcgacgacctgcgctacggccgcgacgccatctacggcatcggcgaactgccgaacaacgccttgtgcaccggcgcgctcaacgtggccaacccgcaggagtgcaacagccacggcttctacacccgcaactcgtggggctatcgcctgcgcgggatcctcgaatatcccaacgtgttcgccggggtcaacctgaagccgaacctggcctggtcgcatgacgtcgagggctacgggccgaacttcagcgagggcgccaaggccgtcagcgtcggcctcgatgccgactaccagaacacctataccgccagcatcagctacaccgacttcttcggcggcaactacaacccgatcaacgaccgcgacttcctcgcggtgagcttcggggtgaacttctga

SEQ ID NO: 319323 - DNA, 1371 bp, Pseudomonas aeruginosa
atgaaaacagcacgactcctgtcctccggggcgctggccctcagcctgctggccggttcggtgacggcggcggtttcgcccgacgaggccgccaagctcggcagcagcctgacccccatcggcgcgcagaaggaaggcaacgccgacggcagcatcccggcctggaccggcggcctcgcggccagcgccggcaaggtcgatggcaagggcttcctttccgatccctttgccgacgagaagccgctgttcaccatcaccgcgcagaacgtcgagcaatacaaggacaagctctccgacggccagttggcgatgttcaagcgctacccggaaacctaccggatcccggtgtacaagacccatcgcacggtggccctgccggccgagatcgacgaggcggtcaagcagagcgcgctgaacgtgcagccgatcaacgacggcaacggcctgtcgaatttcgagaagagccgctactacgccttcccgattccgaagaacggcgtcgaagtgctctggaaccacatcacccgctaccgcggcggcaacctcaagcgcaccatcgtccaggccaccccgcagaccaacggcagcttcacgccgatccgcttcgaggagtcggtggcattcccgcagaacatgcccgacctcgaccagagcaaggcggccaacatcctcaccttcttcaagcagcaggtgaccgcgccggcgcgcctggcgggcaacgtgctgctggtccacgagaccctcgaccaggtcaaggagccgcgcctggcctgggtctacaacgccggccagcgccgcgtgcggcgcgccccgcaggtggcctacgatggcccgggcaccgccgccgacggcctgcgcacctcggataacttcgacatgttctccggcgccccggaccgctacgactggaagctggtcggcaagcgcgagatgtacatcccctacaacgcctacaagctcaacgacccgaccctgaagtacggcgacatcatcaaggccgggcacatcaaccaggacctgacccgctacgagctgcaccgggtgtgggaagtggtcggcacggtgaagccgggcgagcggcacatctacgccaagcgccacatgtacatcgacgaggacagctggcagatcgccctggtcgaccactacgacggtcgcggccagctctggcgggtcggcgagggccacgcgcagtaccactacgaccagaaggtcgccggctacaccctggaggcgctctacgacgtgatcgccggtcgctacctggcgctgggcatgaacaacgaggagaagcgcggctacgagttcggcttcaaggcctcgtccgccgactacacgccggccgccctgcgcaacgccggggtacgctga

SEQ ID NO: 319324 - DNA, 2484 bp, Pseudomonas aeruginosa
atgaccgagccgaccgagctgcccgccgccttgccgcggctgccgccgcagcacctgccgcggccccgtttgcaccagccgctgctgcgcggcgaatgccgcctgcgactgctctgcgcgcccgccggcagcggcaagaccgtcctcctcggagaatgcgcacggcgggcgccgcctggcgtgcaggtggtctggctggcgctgggcggggaagcgctggaccccgcgaccttccgccgccgcctggccggcgctctcggcttggccgaggacagcgacgaagcgcagctgtgccggcggctgcgcaacgcttccgcgctgtggctgctgctcgacgattacccacggcatcccgaccccgccctcgacgcctgcctcgatcgcctgttgagcgcggcctcgccacgggtgggctggtggctggcgagccggcggcggccgcagtgcaacctggcgcggttgctgctggaaggggagttgctggaggtcgacggcggcctgctggcgttcgatgccgacgaggtcgccgaactgctccgcctgcacgggcgcagcgccgatgccgctgcgaccggggcgctgctggaacgcagcggcggttggtgcgccgcgttgcgcttgcgcctgctggtcggcgaagagacggccggaccgttgttgcaggaatacctccagcacgagttgctcgacgagctgccgccgccgctggccgacgccgcgcgtgccctggcctggctgccgcaagtcggtccggagctgttccgccggctgttcgaggagctgccccacgggctggacgacctgttggcgcggggcttccccctgctggccgatacgaaccagcgctacagcctgccgccggcgatccgcgaggcctggcgcgaagcgccgcagcgcccgcagcgggacttccaccgggaagcctgcgaatggttcgccgaacacggcgagacccgcgaggcggtcgaccaggcgctggccgccgacgaaccggaaaccgccgccggattgttgcagaagctcaccgaggagcaattgctgcacggccacaacatcggcatggtcctggccctgcgcgacgaactgccggcggtgctgctggccagcacgccgcgcctggtgatcctgaatgcctgggcgctgctctacgctggacgcctggccgaagccgaggactgcatcggccagttggcgcgcttcctgccgatgccctcggcgtcccgccagcgggtgctgctggcgcaatggcagggcttgttcgggatcctcctgcactgccgcggcgagcgcggcgccgccgactacctgcgcgaggcgctggagcaactgccggaggacgcctggtcgcagggactgatctgccgctcggcgctgatgcaactggcgatgatcgaggggcggatggaccaggcgcggttgatcggccgcgatgccttgcgcctggcgcgcgagcacgacagcctgatcttcgaggcgctgatcgaactggagcgggcgcagtggctggagcagcgcggcgaactgctgcgcgcggaaggcgtcctcgatcgcgcccagcgctacctggaggacctcggccagcagggcagcccgatgctcggccggatcgccctgcgccgcgcgcgcctgtgcctgcagcagggccgcgaggtcgaggccgggcactggtatcggctggggctggagcaggcacgggagaatctcgatccctgggcgctctacggctacctgggactggccttgctggaggccgggcagggcgacctggacgcggcgttcaaccgcctgctggaggtcgagcggctgatgcagcagcgccatgtccccgatccgctgtatcgcggcgcgctgctgctggtcagctccgccctgaccctgcagcagggaaggccggcgcaggcgcgggagatcctgctgcgggtccgcgcctacttccagccgggacgggcgcgcctgtcgccgccctccgaaccggagctggaagcgcgggtagagcaccaattggcactggccgaactctacagcggcgaggcagccgccgccgaagcgcggctgcgcgggctgctcgccattctcgaggcgcaggggcggcagacgctgctttgcgaagtgcgcatgggtatcgccgagtgccagttcctctccggacaattgccccaggcccagcagaccctgcgcagcggcctggagctggcggagcggctgggcctgcaactgccgcagcggcgactgcgggatcgccagccgcaactgttcgccgccctgccgggggaagaagaggaggggctcagtccgctcagttgtcgggagctggcggtgctcggcctgatcgcccagggctgctccaaccaggagatcggcgagcaactgttcatttccctgcacacggtgaagacccacgcccggcggatcaacggcaagctcggggtggcccgtcggacccaggcggtggcgcgggccaaggccctcggcctgctcgcctga

SEQ ID NO: 319325 - DNA, 813 bp, Pseudomonas aeruginosa
atggacccgcgtcaagcctgcctcgattgtctcgcccaggaaccgccagcgctgttcgaggcggccctgtggatcgccgcggagcacctcccggcgtattcgcccgcccacgccctgcgcgagctcgacgaactcgtccggcagatcggcgccagcctggacgaccgcgcctcggccagcgagcgcgcccaggggttgctgcggcgaatgagcgaacagggtttctgcgaagacgacgacttccccctgcaaccgcgctcggccctgctcccgctggtgctgcagcggcgccagggacagccgttgtcgctggcgctggtggccatggaactggcgcggcggctggacattccgctggtcggagtgaacttcccgggacgcttcctgctgcgcgtgccgcaggccgaccatctgctcgacccggccaccgggcgacgcctctatacccccgactgccgcgaactgctgctgcgcctgcaagggccgaagagcgaactgcaagccgcctacctgaagcaggcctctcccggggaaatcctccagcgtctgtcgcgcaacctgcgacaactgcacagcgccgccggcgagccgctggccgcgctgaaggatgcccagcgggtgatcgaactcggcccggtgggcgccgccgaccacgaggcccgcgccggcctctatcggcaactggattgcccgcaggcggaacgctacgacctggaacgcgcgctcttgctcagcgacgatcccaccgagcaactgcgcctcggccagcgcctgggcgaactcgccccgccgaccagccgcgccctgcactga

SEQ ID NO: 319326 - DNA, 1026 bp, Pseudomonas aeruginosa
atgttcgacatgatggacgcggcccggctcgagggtctccacctcgcccaagacccggccacgggactcaaggccattatcgccatccacagcacgcgactcggcccggcgctgggtggttgtcgctacctgccttaccccaacgacgaagccgccatcggcgacgccatccgcctggcccagggcatgagctacaaggcggtcctggccgggctggagcagggcggcggcaaggcggtgatcatccgcccgccgcacctggacaatcgcggcgcgctgttcgaggccttcgggcgcttcatcgaaagcctcggcggacgctacatcactgcggtggacagcggtacctccagcgccgacatggactgcatcgcccagcagacccgccacgtcaccagcaccacccaggccggcgacccctcgccgcataccgccctcggcgtgttcgccgggattcgcgccagcgcccaggcgcgcctcggcagcgacgacctggaaggcctgcgggtcgcggtgcaggggctcggccacgtcggctacgcattggccgagcaactggcggcggtcggcgccgagttgctggtctgcgacctcgatcccggccgggtgcaactggccgtcgagcagctcggtgcccatccgctggcgccggaggcattgctctccaccccttgcgacatcctcgcgccctgcggcctgggcggcgtgctcaccagtcagagcgtcagccagttgcgctgcgcggcggtggccggggcggcgaacaaccagttggagcggccggaggtcgccgacgagctggaggcgcgcggcatcctctatgcgccggactacgtgatcaactccggcggcctgatctacgtcgccctcaagcaccgcggcgccgatccgcacagcatcaccgcgcacctggcgcggattcccgcgcggctcaccgagatctatgcccatgcccaggccgaccaccagtcgccggcgcggatcgccgaccgtctggcggaacggattctctacggcccgcagtga

SEQ ID NO: 319327 - DNA, 1098 bp, Pseudomonas aeruginosa
atggttcacaaccggatcgacccgcctttcacccgctacctcgacagcgacggtcggcccctcggcgagttgcccgcctgggccggcgacagcgatgcgctggtcggcctctaccggcagatgctcctgacccgcctgttcgaccagaaggcggtggccctccagcgtaccgggcggatcggcacctatgcgccaaccctcggccaggaagccatcggcgtggccatcggcagccagatgcgcgccgaggacgtgctggtgccttattaccgcgataccgccgtgcaattgatgcgcggcgtgcgcatggaggacatcctcctctactggggcggcgacgagcgcggcagcgactacgccgaaccgctggcggcgcaggactttcccatctgcgtgccgatcgccacccaggccctgcatgcctgcggggtcgcctcggcgttccgcatccgcggcgagcaccgggtggcggtgaccacctgcggcgacggcgccaccagcaagggcgatttcctcgaggcgctgaacgtggcgggcgcctggcagttgccggtgctcttcgtggtcaacaacaaccagtgggcgatctcggtgccgcggcgcatccagtgcggcgcgccgaccctggcggagaaggcggtgggtgccggcttccccggcgaacaggtggacggcaacgacgtgctggcggtcgccgaacgcgtccgcgcggccctggagcgcgcgcgccagggcaaggggccgaccctgctggagtgcatcagctatcgcctctgcgaccacaccacggccgacgacgccagccgctaccgttccgccgaggaggtcaaccaggcctggcgcgaggagccgatcaagcgcctgcgcgccttcctcgccggccgcggccagtgggacgaggagcgcgagcaggcgctggtgggcgagtgccaggcgcgggtgcaggaggcggtggagcgtttcgagacgttcgccgcgcaggcgccgcaggcactgttcgagcatgtctacgcgcgctggccggcggtcctggaggagcagcgcgagcaattgctggagcgcgccgcgcggcggcagggaggggccgaacatgaatga

SEQ ID NO: 319328 - DNA, 1002 bp, Pseudomonas aeruginosa
atgaatgagcgcaacggcgaagcgaaacgcctggcccttctggaggcggtcaacctggcgttgcaccgggccatggccgaggacgagacggtggtggtgctgggcgaagacgtcggggtcaacggcggggtgtttcgcgccaccctcggcctgcgcgagcgcttcggcttcaagcgggtgctggatacgccgctggcggagaacatgatcgccgggctgtccatcggcatggccgcccagggcctgaagccagtgatggagatccagttcatgggcttcatctacgccgccatggagcaactggtgtcccatgccagccgcctgcgcaatcgcacccgcggccgcctggcctgcccgttggtgctgcgcacgccgatgggcgcggggatccgcgcgccggagcaccacagcgaggcgaccgaggcgatgttcgcgcacatccccggcgtccgcgtgctggtgccgtcgtcgccggcgcgggcctacggcctgctcctggcggcgatcgacgatcccgatccggtgatcttcctcgagccgacccggctctaccggatgaacccgcagccgctggcggacgacgcccggcgcctgccgctggacagttgcttcacccttcgcgaaggcggcgacctgaccctggtcagctggggcgccagcgtccacgagacccagcaggccgccgagcgcctggcgcagcgcggcatcgaggccgaagtgatcgacgtcgcctgcctcaagccgctcgacctcgacaccctcgaagcctcggtgcgcaagaccggtcgctgcgtgatcgtccatgaggcgccgaagagtggcggcctcggcggggaaatcgccgcgagcctctacgagcgtgtcctgttcgacctgcgggcgccgatccagcgggtcgccgcggccgatatcccgccgccgctgtaccgcctggaagcgctgtacatgcccgccgtggaggacatcctggcggcctgcgacaccgtgctcggctacgcctga

SEQ ID NO: 319329 - DNA, 1113 bp, Pseudomonas aeruginosa
atgaagcacttcaagctgcccgacctgggcgagggcctgcaggaagcggaaatcgtcgaatggcacgtcaaggccggcgacagcgtgcgcgccgaccagcgcctggtctcggtggaaaccgccaaggcgctggtggacatccctgcgccctacgatggggtggtgggcaagctgttcggcgccgagggcgacatcctccacgtcggcgaaccgctggtgggcttcgagggcgaggaggcggacgccggtaccgtggtggggcgcctggagggcggcggtagcgccctggaggaccgtttcttcatcggcgccgcaccgtccacccgcgaacacctggcaccgcgcgcgaccccggcggtgcgccagttcgcccgccagcagggcgtcgaactggccggcctgagcggctccggcccggatggcctgatcacccgcgccgacgtcgaggccgccgcccagggcgcccgcgaacgcttcggcggcgagcgcttgcgcggggtacggcggagcatggcgctgaacatggcgcgctcgcatgccgaggtggtgccggtgacgatctacggcgacgccgacctgcatcgctggaagaccgcacgcgacccgttgatccgcctggcccaggcgctggccgaggcctgtcgcgccgagccgaccctcaacgcctggttcgatggcgcctcgttgtcgctgaaactgcatgagcggctcgacctggggatcgccgtggacaccccggacggcctgttcgtgccggtgctgcgcgacgtcggtgcgcgttcggcggaggacctgcgcgccggtatgcggcgcctgcgcgaagacgtccaggcacgctcgatcccgccggcggaaatgctcggcgcgaccctgaccctatccaacttcggcaccctgttcggccgctacgccaaccccgtggtggtgccgccgcaggtggccatcctcggcgccggcggcatccgcgacgaagtagtggcctggcgcggcgagatggcgatccacccgatcctgccgctctcgctgagcttcgatcaccgcgcggccaccggtggcgaggcggcgcgtttcctcaaggtactggtgaacgccctggagcagcccgacggctga

SEQ ID NO: 319330 - DNA, 399 bp, Pseudomonas aeruginosa
atgcccgctctccccgcctcccccgtccgctcccgacgctggcgcctggaccggcgcagcctgctgctggcactgctgctgttcggcctgctggtcctgctcgccaccctgggccggcattggggctggatacgcagcttcggcggcgacctgctggcggtggtctggctctactacctgatgggcagcgcgctcagggcgccggccgcctggctggcatccgccgcctttgccgtcggcgcgctgctggaactgggccagtacctggcggcgcaactgcattggcaattctccagccccgtgctgcgcatcgttctcggcagcaccgccgacggcttcgacctgctcgcctatgccctcggcgcgctgctggcatggtggctggagcgccggcgctga

SEQ ID NO: 319331 - DNA, 585 bp, Pseudomonas aeruginosa
atgccgcgacaacttgccggcctgctgtgcgtcctcctcggcctcgccggcgcccctgccctcgcctgcccattccgggccacggacgccgagacaccggcagcctctgccggcgccgcgcaggtcctggccctgggcggcaccggcagactgcaactcgacctgcaacgggcccccgccaccctgctgcacagcggcgacctgctgatcgctcgctacgccgagggtcattacctcgcccaccgcctgctcgaaggcaacgagatgggcgcggacgagggcgaacggctcgaccttccgcgacaggttcgcctgctgttcggagccctgccgctggacggcctgcccgacgccgagcgcgagcgtctccaggcgcagcgccaggccctcggcctgtgcgaccggcgcgccagcgccagccgctaccgcgtggccggcaccgaggtctatcgcctgcgcggcagccaggccggcaagccctaccacgcgctctacctgctcgacggtccccaggtgcactacctcgacagctccggcagcgacgccttcgtcgagcagttgctcgccagcctgcgacgccgctga

SEQ ID NO: 319332 - DNA, 267 bp, Pseudomonas aeruginosa
atggccgtcgaagtggtgtaccgcagcagccgggatcaggagcgtttgttcatggacaaggctgaagccgatcgttacgacaagatgctggagctggcggaaacgctggccgaggtgctgcagaaggcggtgccgtcgctgaaggaggaacaagtggaagaactcggcatcttcatggcgaagaaccgcgacgccttcgcccgcgccttcaagaaccagccggacgccctcaacgaactgttcgaggaaaacgccgcggacgaatga

SEQ ID NO: 319333 - DNA, 270 bp, Pseudomonas aeruginosa
atgagagtgatcccgttggcacttgtcgcgctgctcggcctggcgccgctggcccaggcgcagcagcagccctacggacccaacccggactcgaaatcgctccgccagcattacgtggaagggcgcctggacatcgcccgggtgatctacaagaccgacctgtggagcgcctgtgggatcgtcccggcgcgcctggtctacgaggactcgcagggcgagcggcataccgtcgagtacaaggcctggggcagcggttgcagcggcaattga

SEQ ID NO: 319334 - DNA, 219 bp, Pseudomonas aeruginosa
atgcaagacctcggtttcgccctcctgctcatcggctacgtctggtccgtggccagcggcggcagccgttcgatcccctgcgcattgctctgcctgctgctgtttccgctggcgcaactggccttcgccatcaacgacgcgccgatgcgcccgccgctggcgctggcggcccttggcgcgggcctggcctacctcggcggcggctcggtgttcggctga

SEQ ID NO: 319335 - DNA, 516 bp, Pseudomonas aeruginosa
gtggatgcgccgttggcggagcaggatctcaaggcactgtttctcaggcatgcccggcagttgcagtcgtatctgttgcgcaagacccgcgatccgcacctggcggcggacctggcgcaggagagttttctgcgcctggccgagcagcggcacaaggagccgatcgagcatgtcgacgcctatctctaccgcaccgcgcacaacctcaccatcgaccattaccggcaggaacggcggcgccgcaccgagacccggcccaacgacgacctcgccgggttcgtcgccgaccagcccggccccgaggagtccgcggtggatgccgatgcgcttgcccgcctgcgcgagatagtcgccgaactgccgccgcgcacccgtgagatcttccgcctcaaccgtctggaggggctgacccatgccgaggtggcgagacgcctggaaatctccgatagctcggtgcagaagcacctggcccgcgccctggcccatgtgatgcaggcactcgaggattcccgctga

SEQ ID NO: 319336 - DNA, 987 bp, Pseudomonas aeruginosa
gtgaacagcccccaggaacaacagcagatccgccagcaggccgccgaatgggcgatccgcctggacggcggcgacctcgaccggtcccggcgcgaagcgctggacggctggctggcggccgacccccggcacccggccgcgctggcgctggcgcaacggacctggaaacagctgggatcgctggccgaaccgcggacgatggttcagacgccggtcgccagcgcgccgcaccgcgccggggggcggcgcaagggctggcgcggctgggccgcggcggcggcggtgctgctggccctgggcagcgcctggaacgaacgcgacgccggcgtgagctggctggccgaccacgccaccggcaagggcgaggtacgcatcctgcggctggtggatggcagcgaggtcgagctggacgcacagagtgccatcgatgtcgcctacgacagccgcgagcgacgggtgcgcctgctcgaaggcagcgcgatcttccgcgccgccccgcgtgcggggcgggagacccggcccttcgtggtggaaagcgccggcggcagcactcgcgcgctgggtactcggttcctggtcagccgcaacgaggacggcagcgtccaggtcggggtgctcgaacaccgcgtcgcggtggccctggcgcatccgcgcacggggaccgtcgggcgccgcgagctgggcgagggcgagagcctgcgctacagcgcggagggcggcgtcgaggcgccgctgggcggtcgcctcgacgacctgaccagttggcggcgcggcctgctggtcttcgacgagcagccgctgggcgaggtggtggcgcgcctcaatcgctaccggccggggcatttgctggtggctcccggtgcgttggcgcagcggcgggtcagcggcgtattccgggtcgccgacctggagccctcgttgcagtcgatcagcgatgagctgggagtgcgcagcctgggcctggcgggagtgacgctgctgtactga

SEQ ID NO: 319337 - DNA, 2676 bp, Pseudomonas aeruginosa
atgaaacatcgtggatggagtgccgtgcgaggcggtcgcaagggggcgcaactggccctggggctgggcctggtcctgctgggaacggccgcgctaccgctgcatgcgcaagacggggcggactcggcgagccagcagcagaccgcgttgcgccgggtccggctggacatcccggcacaaccgctgaaccgcgccctgctgcgattcgccgagcaggccggggtccaggtgttcttcgacagccagcgtttcgccggtctcggcagcgcggcggtgcacggcgaatacgtgctggccgacggcctgagccagatgctccagggcagcccggtggaataccgcttctccggcaaggaccaattgagcctgatccgcgtcagccaggacgacctggtgcagatgtcgccctcggtgatctccgccgcgcgtccggacgactgggtctaccagacgccgcattcggtcagcgtgatcggccgcgagcagatcgagcgcaacccgccgcggcatgccgccgacatgctcgaggaaacccccggggtgtactcctcggtgagccagcaggaccccggcctgtcggtgaacatccgtggcatccaggactacgggcgggtcaacatgtcggtcgacggcatgcgccagaactaccagcagagcggccaccagcagcgcaacgggacgctctacgtcgatcccgagctgctcagcgaggtggtcatcgacaagggcgccagctcggccatgggcggcgccggggtgatcggcgggatcgccaacttccgcaccctggaggcccgcgacctggtcaggccgggcaagcaggtcggtggccgggtacgcctcaccagtggcctgggcggcgacgccaatggcacccacttcatcggcagcgcggccttcgccatcggcaccgaggtctgggacatgctggtcgccgccagcgagcgccacctgggcgactacgacccggggaccaagggcagcattggcgagctgcgcaccggcgcctggttcaatcccgaggccgggcagcgggtcaagcattcgccggtggcctactccggctacgtgatgcgctcgcgactggccaagcttggcgtcgccctgccgcaggagcagcgcctgcagttcagctacctgaccacccaggtgtcctacgacgacgccaacatgctcaacaccgagaaccaggcgctctgggaaaagctcggcagcagcgacgtgcgtgcgcagaacttcgccatcgactacggctacgcgccggacaacccgttggtggacttcaaggccaagctctactacgtcgacaaccgcaaccgccagcagaccctgcaacgcggtatcacccccggctactcgatcacctaccagaccgacacctacggcgcgcaggcgcagaacacctcgaccttcgctctcgacgatctctccacgctgcgcgccaactatggcctggagttcttctacgacaaggtgcggccggactccagccagccgcgggcgagcacctcggcggtcggcttccctgcggccgaaggcatgacccccaagggcgaccgcgccctcggtagcctgttcgcccgtctcgactacgactacgacgactggctcaacctcaacgccgggctgcgttacgaccgctaccgcctgcgcggcgacaccggcttcaacgcgcgcaccttcatccttggcaccacccggcagaccgacatgccgctgcaatacgccgtcgaccgcgaggaggggcgcttctcgccgaccttcggcctgtcggtcaagcccggcgtcgactggttgcagttgttcgccacctacggcaagggctggcgcccgccggcggtgaccgagagcctgatcaccggccgaccccacggcggcggcgcggaaaacatgtaccccaacccgttcctcagtccggagcgctcgaaggcctgggaagtcggtttcaacgtgctgaaggagaacctctggttcagcgacgaccgcctgggcctgaaggtcgcctacttcgacacccgggtcgacgacttcatcttcatgggcatgggcatgcagccgccgggctacggcatggccgggatcggcaacagcgcctacgtcaacaacctcgacagcacgcgcttccgtggcgtcgagtaccagctcgactacgatgccgggctggcctacgggcagctctcctacacgcacatgatcggcagcaacgacttctgttcgaagaccgcctggctcggtggcgtcacccagacggtgaagggcagcggtcgccgcccgccggtgatcgacatgcggccggacgagcaggccaacgccgccacccattgcagcgcggtgctcggctccgccgaacacatgccgatggaccgcggctcgctgaccctgggcatgcgcttcttcgaccgcaggctggacgtcggcgcccgtgcccgctacagcgaaggctactcggtggctggcggcgccacggtgtcgcaggccggcgtgtacccggcggactggaaggaatacaccgtctacgacctgtacggcagctaccgggtgagcgatgaactgaccctgcgcctggccatggagaacgtcaccgaccgcgcctacctggtgccgctgggcgacgtgctggccttcaccctcggtcgcgggcggaccctgcaaggcaccctcgaataccagttctga

SEQ ID NO: 319338 - DNA, 618 bp, Pseudomonas aeruginosa
atgagcatttcgatttcctacagcaccacctacagcggctggaccgtagcggattacctggcggactggtcggcctacttcggcgacgtcaaccatcgtccgggccaggtggtggacggcagcaataccggcggcttcaaccccggtccgttcgacggcagccagtacgcgctgaagagcaccgccagcgacgcggccttcatcgccggcggcgacctccactacaccctgttcagcaaccccagccacaccctgtggggcaagctggacagcatcgccctcggcgacaccctgaccggcggcgcctccagcggtggctacgccctggacagccaggaggtgagcttcagcaacctgggcctggattcgccgatcgcccagggccgcgacggcaccgtgcacaaggtggtctacggcctgatgagcggtgacagcagcgccctgcaggggcagatcgacgcgctgctgaaagcggtcgacccgagcctgtcgatcaactccaccttcgaccagttggccgcggccggcgtcgcccatgccaccccggctgcggcagcggcggaaatcggcgtggtcggcgtgcaggaactgccgcacgacctggccctggcggcctga

SEQ ID NO: 319339 - DNA, 1791 bp, Pseudomonas aeruginosa
atgaagctccggccggcctcgccgcgcaatgaaatcctcgccaccctcggccgcttccgcccggcgctgcgcagcgtcgcgctgttcaccgcggtgatcaacctgctgatgctggcgccgtcgctgtacatgctgcaggtctacgaccgggtgctcggctccggcaaccacatgaccctgctgatgctgaccctcatggtgctcggcctctacctgctgctcggcgccctggagtgggtgcgcagcctggtggtgatccgcctcggcggccagctcgacatgcaactcaaccagcgcatctacgacgcctcgttccgcgccagcctggagcgcggcgagcaggccgtcgggcaggcgctgaacgacctgaccagcctgcgccagttcctcaccggcaacgccctgttcgccttcttcgacgcgccctggttcccgctctacctgctggtgatcttcctcttcagtccctggctcggcctgctcgccctggttggggcgctgctgctggtgctgcttgcctgggtcaacgaaagccgctcgcgcgaaccgctggccgaggccgggcaactgtcgatcctcgccacccagcaggcctcggccaacctgcgccaggcggaaaccctggcggcaatgggcatgttgccggccatgcgcgcgcgctggttcgcccagcaccaggccttccttgcccggcagaacctcggcagcgagcgcagcgcggcgatcggcgcgacctccaagggcgtgcgcctggccctgcagtcgctggtgctcggcctcggcgcctggctggcggtggaaggcctgatcaccccggggatgatgatcgccggctcgatcctgatgggccgcgtgctcagccccatcgaccagttgatcgcggtctggcgccagtggagcggcgcgcggcaggcctaccagcgactggcgcggctgctcgaggagaatccgccggccgccctgggcatgccgctaccggcgccgcgcggcgcgttgcgcgtcgagcggctctgcgcggctgcgccgggacgcgagcaggcattgttgcaggacctcggtttcgccctggagcctggcgaagcgctcggcgtgatcgggccgtccggttccggcaagtcgaccctggcgcgcttgctggtgggcgcctggcagccgctgtccggcgcggtgcgcctggacggcgccgacctgcggcattggagtgcggcggcactggggccgcacatcggctacctggcccaggacgtgcaactgttcgccggcagcatcgccgagaacatcgcgcgcttcgccgaggtggatgccgagaaggtggtggcggcggcgcgcctggccggcgtgcacgacctggtgctgcgcctgccgcagggctacgacacgcgccttggcgacggcggcgccggactctccggcggccagcgccagcgcatcggcctggcccgcgcgctgtacgggcgaccggcgctgatcgtgctcgacgaacccaatgccagcctcgacgaggcgggtgaggcggccctggccgaggccatcgcggcgatgcgccggcacggcagcagcctggtgctggtcacccacaagccggcggtgctggcgctgaccgacaagctgttgttgctgcatggcgggcgcctgcagcgtttcggcgcgaccgccgaggtgcttgccagcgcctcgccgccggccgctgcggccccggcgccgacacggccgacgccggcgttcggtttcggctaccggccgggaccggggatgccggtcggcggtgtgccgggaggagcggcgcgatga

SEQ ID NO: 319340 - DNA, 1332 bp, Pseudomonas aeruginosa
atgagcgggcaggcgcggttgcgcgaagtcggcgccggcggcgcggcgctggaactggacgagaagcgtttttcccggctcggctgggggctggtgctgctcggcttcgtcggctttctcctgtgggccgggttggccccgctggacaagggcgtcggggtctccggcacggtgatggtggccggtagccgcaaggccgtgcagcaccctaccggcggcctggtcaggcacatccgcgtgcacgaaggcgagcgggtggaggcaggacaggtgctgctggagatggacgctactcaggcccgggcccaggccgatggcctgttcgcccagtacctggcggcgctggcgagtctggcgcggctgagcgccgagcgcgatgaaaaggcgcggatcgagtttccctccgagctgctggcgctggacgacccgcgcctgccgaccctgctggaacagcagcggcagttgcacgacagccgtcggcgggcgctgcgcctggaactcgatggtctcgccgagacggtcgccggcagccaggcgcaactggacggcctgcaagccgcgctgcgcagcaaggagcagcagcgcgccgccctcgaggaacagttgcgcggcctgcgccaactggccagcgagggctacgtgccgcgcaaccgcctgctcgacagcgagcgcctgctggcccaggtcaacggcgagatcgccggcgacctcggcagcctcggcagtacccgccggcagatcctcgaactgcgcctgcgcatggcccagcggcgggagaagttccaggaagaggtgcgcgccagcctggccgacgcccaggtgcgcgccgaggagttgcgcaatcgcctggccagcgcgcgcttcgacctggccaacagcgaggtacgggcgccggtcgccggcctggtggtcggccaggaagtgttcaccgagggcggcgtgatcgcgcccggccagcaactgatggaaatcctcccggagcgccagccgctgctggtggacgctcggctgccggtggagatggtcgacaaggtccgcgtcggcctgccggtggagctgatgttcagcgccttcaaccagagcactacgccgcgggtggagggcgaagtgaccctggtctcggccgaccgcctgctggacgagcgcagcgaggcgccgtactaccgggtgcgcatccgcgtaggcgaggagggcgtacgtcgcctggccggcctggagatccgcccggggatgccggtggaggccttcgttcgcagcggcgagcgctcgctgttgaactacctgttcaagccgctggccgaccgtacccacctggcgctgggggaagaatga

SEQ ID NO: 319341 - DNA, 1356 bp, Pseudomonas aeruginosa
atgaatcgcctgcgagcctgcctgctgtcctccgcgctgctttcggcctcttcggcccaggcgctgggcctgctggacgcctaccaactggcggtgcgccacgacccgaccttccaggcggcgctccacgagcgccgcgccggcagcgaaaaccgcgccatcggccgtgccggcctgctgccgagcctgcgctacgactacaacaaggcgcgcaacgactccaccgtcagccagggcgacgcccgcgtcgagcgcgactatcgcagctacgcctcgaccctcagcctggagcagccgctgttcgactacgaggcctacgcgcgctaccgccagggcgaggcccaggcgctgttcgccgacgaacagttccgcgggcgcagccaggaactggcggtgcgcctgttcgccgcctacagcgaaaccctgttcgcccgcgagcaggtggtcctggccgaagcccagcggcgcgccctggaaacccagctggcgttcaaccagcgtgccttcgaggaaggcgagggcacccgcaccgacctgctggagacccgcgcccggctgagcctgacccgcgccgaggagatcgccgccagcgatcgcgcggcggcggcgcggcgtacgctggaggcgatgctcgggcaggcactggaggatcgcgaactggccgcgcccatcgagcgcttcccggcgctgcgcctgcaaccggcgaccttcgaaggctggcgccaggtggccctgcaacgcagcgccgagctgggcgcccagcgccatgcgctggaggcggcagcctacgaggtggagcgcaatcgtgccggccacttgcccaggctcagcctctacgccagcagcagcaagacgcactcggcttcggaaagcacctacgagcagaaatacgacaccgacagtgtcggcctgcgtctcagcctgccgctgttcgagggcgggcgggtgtcggcagcgacccgccaggccggcgacaagtacgcccaggcccaggccgagctggatgcccaggtgaccagtgtgatcaatgacctgcacagccagttcgacctgaccgccagcagcctggccaaggtgcgtgcctacgagatggcggtagcggcggcgcgcgaacaggtgacagcgacgcggcgcagcgtcgccggcggggagcgggtcaatcgcgacgtgctggacgccgaacagcagttctacggcgcccgccgcgacctggcggaagcgcgctacgcctacctcaacgcctggctgcgcctgcgccagctggcgggggtgctggaagaccgcgacctggcggtgctggctgcctatttcggcgccggcgaaggacgcgcgcaggtcgccgctgccatcagatag

SEQ ID NO: 319342 - DNA, 288 bp, Pseudomonas aeruginosa
atgaccgacagcagccctttccagctcctcaccgaggccttccaggccgagtaccgggtcaacctcagcctggagcggccggacggcagcatcgtcctcaccctctccaacgaacgcggggtcgccgccaagcgcctgatccgaccggcgcaactgcatgacctggaacagttgcagcggatgatcgagagcatccgcttcggcatcgccatcgaaaacggcaccagcgcgccgcaactgttgcaggcgatgacccaaggcaaggcacgctggccgatagctatctga

SEQ ID NO: 319343 - DNA, 486 bp, Pseudomonas aeruginosa
atgaaacagaattgggccgagcgcctgcgcgcaagtatgcaccaccaggcggagagcctcggcaacctgctggtggaggcgttccactacctggccctgttcgccatcggcgccacggtgttctgggcggcgggcgcggccttcctggggatggtgaacaaggggcatgcgtcgatcgacgacatcctcctgctgttcatctacctcgagctgggcgcgatggtcggtatctacttcaagaccaaccacatgccggtacgcttcctgatctacgtggcgatgaccgcgctgacccgcctgatgatcgccgacatccagcacaaccatacgccggacgatggcatcatcctggtctcggtggcgttgctcctgctggcgctggcgatcctggtggtgcgcttcgcctcggcgcgcttcccttcggcgaagtccgacggcgccgccgcgcggcgggtggcgagcgaggacgccgaaggggaagcctga

SEQ ID NO: 319344 - DNA, 972 bp, Pseudomonas aeruginosa
atgaagggatggaaactctttaccccgttgctgatcctcgcgatcgtcgccatcaccctctacctgcgcctgcacaatccgcccctgctgttgcagggcgaggcggacgccaccaacgtcatcgtttcctccaaggccaagggccgggtccaggtgctgcacgtgcggcgcggcgacgaggtgaagcagggcgacctgctgatcagcctcgacagccccgagctggaagcccagctcgatgccctgcacgcggcgcgcaaccaggcccaggcgcagctcgacgagtcgctccacggtacccgcgaggagagcatccgcgcgctcaaggccagcctggcacaggccgaggccgagttgcgcaacgccgagtcggatttccagcgcaaccagcagatggtcgagcgcggcttcctctcgcggacccagttcgacctctcgcggcgtgagcgcgatgtcgcccgcgaccgcgtcgccgaggcgcgggccaatctcgacgaaggcctcaagggcgaccgcgaggagcgccgccaggcgttgcaggccgcggtgcgccgggccgacgcgcagatcgccgagctacaggcgcagatcgacgacctgcaggtgcgcgcgccggtcaacggcgaggtcgggccgatccccgccgaacagggcgaactgatcaacgcctacagtccgctgctgacgctggtgcggctggacgacagctacttcgtcttcaacctgcgcgaggacatcctggccaaggtgcgcaagggcgaccgcatcgtcatgcaggtgcccggcctgggcggcgccgaggtcgagaccgagctgcgctacatcgccccgctgggcgatttctcgaccaggcgcgcgacccgcgccaccggcgatttcgacctgaagaccttcgagacccgcttctacccgttgcagccgacacccggcctgcgcccgggcatgagcgcgctgtggcgctggacgaactga

SEQ ID NO: 319345 - DNA, 1173 bp, Pseudomonas aeruginosa
atggcgtgggccgcgctgaagcgcaacgccagccgtttcgtccaggcgttcaacaccgagacgcggatcgcctgccgcagctggaccatccactggctcggctggtgctggccgctgctgctgttcggcgtgatcagcggcgtctaccaggccggtaccctgctggacatgccgctggcggtgatcgacaaggaccatagccaactgtcgcgcaagttgatccgcgaactcgacgcgacctcccacgcccaggtgatcaccgttcccgccggcgtccaggaggggctcgacgcgatccgtcgggccgatgcctacgccttgctctacatcccgccggacttcgaggccgacgtgctcggcgggcgcgcgccgaaggccgagctgtactacaacgcgctgctgtattcggccggctatgccgccacccaggacttctcggcgctggtcgccagcctcaacggcgaattgcgtccgcgcctggccgccgggatgccggcggcgctgccgcacctggcgagcatcagcgtgtcctacgacagcctgttcaatgccagcggcaactacatctattaccagcagttcgccgccatcgtgcacctgctacagctgttcgtgatcgtcaccatggtccatgtgctggcccgcgaggcgccggaactgcgcgcctcctcgccgcacatcctgcgggccaaggccctcggcgtacgcctggtgggcaaactggcgccctacacactgctgttcaccgcgctgctgatgctggaaatcttcctgctggtggcgttctccggcgcgcgcatcaacggcagcccgctggcgatgctgatgatcacgctgttctacgtgattgccgcgcagagcgtcgggttggtgctgttcgtcttcaccgccaaccgcttcaccgcctattcgctggtgggcatgctgatcggcgttgcccagacctactcgggagtgctgatcccggaactggcgatgccgaccctggcgcgggtgatcgccgaggccgagccgctgacccacaccctgcacggcctgttcgaccagttcctgcgccaggcgccgcccagttcggcgctctacacctgcgccaagctggcgctgtacccgctgatcgcctacatgatcgccaagatgcgcctgcgcagccgcctggacctgagcccgatatga

SEQ ID NO: 319346 - DNA, 1134 bp, Pseudomonas aeruginosa
atgaagaactacctgcagatcctccgggaaaccctgaaggccatgctgtccaagccgatgtggctgatggtcgtggcctcggtgtgcatcacctcgctgccgtacatgaaccacaccgccctcgacctgccggtggcggtggtcgacgaggatcacagcgacgtgtcgcgcgagctggtccggctgctcgattcggcgccgaaggtcgccgtggtcggctacgacagcctgccgcaggccaagcgcgacctggcctggcgcgagctgtacgcgatcatcgtgatcccgctgaacttcgagaagcgcctgctgcgcggcgaggcgctggtgatcccgtacttcggcgatgccaccaaccgcatggccaacggccagatccagcaggacatctcggcggtctacagcgcgctgaccaaccgctacaacgctgccctgctggaacgcgaaggcttcaccgcgacccaggcgcaggtggtgctgagcccgctggtagggcaattgaccgacctgttcaaccccggcatcagcttcgccgcgatcgtccttccggggttgctgtcgctgatcctgcaacacagcctgctgctcggctgcacccgcggcaacatcatgctgcgcggcggcaccccgcgctacatgcgccagccgctgtcgacccgcttcggccgctacagtgcgcaactgctgatctggaccgtgctggcgatgctcttctacgtgatctggccgcacctgctgggctatcgccagtcggcctcgttcttcatgctgctggggatcgtcctgccgttcctgatcgcggtgatcgccctcagcgagttcatcgccgagctgctgcccaccgaggaatcggtgtacctgaccatgaccttcatcaccctgccgctgttctacatggccggctacagctggccggaacaggccatgccagactgggtacgctggctggccgacgcgatcccctcgacctgggcgatccgcgccatcgccgagatgaaccagatggacctgccgctgcgcgaagtcagcgaccatgccctggtgctgctgggcatggccgccacctatgcgttgctgggtacgctgctgtaccagtaccgcaactggcgctgggacaacgtcaagggttggtga

SEQ ID NO: 319347 - DNA, 342 bp, Pseudomonas aeruginosa
atgtttcgttcggggctttctttgctggtgcttctggggctcgccacgctcggcgggtgcggttccgtcaacacgctggtgcgcgacgacgccagcgccgcccacgacctgcgcctgaaggcgaccgcctgcaccagcctgccgcgggtgtacagcggggtcagctacaccttctgccggctcaacgtgaagaccgggtcgccggtggcgccggcgcaagccgacggcatcctcgaggtgctggccctcgacttcgcgctgtccggggtgattgacaccctcgcgctgccctatacctcgtaccgccagtaccgcgacggcaacctgtccctggccaactga

SEQ ID NO: 319348 - DNA, 927 bp, Pseudomonas aeruginosa
atgaaattcaccctccgccagctcgaggtgttcgtcgccgtggcccagcaggagagcgtctcccgtgccgccgaggggctgtcgctgtcgcagtcggcgaccagcacctcgctcggcgagctggagcggcagttcgactgcaagctgttcgaccgcgccggcaagcgcctgaccctcaatgccctcggccgccaactgctgccgcaggcggtggcgctgctcgaccgcggcgaggaaatcgagaacctgctcaacggcaagaccgccttcggctccctcgacctcggtgccaccctgaccatcggcaactacctggccacgctgctgatcggcgccttcatgcagcgccagccggactgccgggtgcgcctgcacgtgcacaacaccgcccaggtggtgcagcaggtcgcccactacgagctggacctgggcctgatcgagggcgactgccggcatccggacatcgaggtgcaaccctggatggaggacgaactggtggtgttctgcgccccccagcatccgctggcgcggcggggcggcgccgacctggaacggctgacgcgggaggcctggatcctccgcgagcagggctccggcacccgcctgaccttcgaccaggccatgcgtcatcacccgcggccgctgaacatccgcctggagctggagcacaccgaggcgatcaagcgtgccgtggagtccggcctgggcatcggctgcatttcccgcctggccctgcgcgacgctttccgccgcggcagcctggtgccggtggaaacgcccggcctggacctgcgccggcagttctacttcatctggcacaagcagaagtaccagactgcgaccatgcgcgagttcctcgacctgtgccgcagcgagaccgccgggatcagccgcagcgacgagatcgtgctgccgctgattccctga

SEQ ID NO: 319349 - DNA, 777 bp, Pseudomonas aeruginosa
atgagcaatctgtacaccgagcgcgttctcagcgtgcaccactggaacgacaccctgttcagcttcaagaccacccgcaacccgggtctgcgcttcaagaccggccagttcgtgatgatcggcctggaagtcgacggtcgtccgctgatgcgcgcctacagcattgccagcccgaactacgaagagcacctggagttcttcagcatcaaggtcccggacggcccgctgacctcgcgcctgcagcacctgaaggaaggcgacgagctgatggtcagccgcaagccgaccggcaccctggtgcacgacgacctgctgcccggcaagcacctctacctgctcagcaccggcaccggcatggcgcccttcctcagcgtgatccaggacccggaaacctacgagcgctacgagaaggtgatcctggtccacggcgtgcgctgggtcagcgaactggcctacgccgacttcatcaccaaggtcctgccggaacacgagtacttcggcgaccaggtgaaagagaagctgatctactacccgctggtgacccgcgagccgttccgcaaccagggccgccagaccgacctgatgcgcagcggcaagctgttcgaggacatcggcctgccgccgatgaatccgcaggacgaccgtgcgatgatctgcggcagcccgagcatgctggaagagaccagcgccgtgctcgatagcttcggcctgaagatctcgccgcgcatgggcgagccgggcgactacctgatcgagcgcgccttcgtcgaaaagtag

SEQ ID NO: 319350 - DNA, 537 bp, Pseudomonas aeruginosa
atgcaacgtcataccctccccctgcgccctctgctcggcacgctcctgctcggcctgctgctggccggctgcgatgcgtcgcgggacgacgccacggcactcggcccggtgccgatcgccagcggcgacgaatgccacgtctgcggcatgctcatcgaggaaatgcccggtcccaagggcgaggcggtgcttcccggcgcggtgcgcaagttctgctccaccgccgaactgttcggctggtggctgcaaccggaaaaccgccagggccaggcgcgcctgtatgtccacgacatgagccaggccgactggcggcaccccgacgatgcccgcctgatcgacgccacccgcgcctactacgtggtcggcatccagcggccgggcggcatgggcgccaccctcgcctcgttcgccgacgaagaggccgcgacgcgcctggcggccgaggaaggcggccgggtactgcgcttcgacgagatcgaccaggcggtactgcaaggcgtgggcggcgaccacccgcaccggcacccggcgcactga

SEQ ID NO: 319351 - DNA, 828 bp, Pseudomonas aeruginosa
atgcccgtagtctggaccatcgcccgcaaggaactggccgacggcctgcgcaatcgctggctgctggcgatcagcctgctgttcgccctgctctcggtgggcatcgcctggttcggcgccgccgcggccggccaggtcggcttcacctcggtgccggcgacggtcgccagcctgaccagcctggccaccttcctgatgccgctgatcgccctgctgctggcctacgacgccatcgtcggcgaggaggaaggcggcaccctgctgctgctcctgacctacccgctggggcgcggccagttgctgctcggcaagttcctcggtcacggcctgatcctcgccctggccaccctgatcggcttcggcagcgcggcgctggcgatcctcgcgctggtgccggaggtcgaggcggccatcctgctgggcgccttcggccgcttcatgggttcctcgctgctgctcggctgcgtgttcctcgccctggcctacgccctgagcagccgcgccagcgagaaatccagcgccgccgggcaggcgctcggcctgtggttcttcttcgtcctgctgttcgacctggccctgctggcgatcctggtcctcagccagggtcacctgagcccgcggctgctgccctggctgttgctgctcaacccgaccgacctctaccggctgatcaacctgtccggcttcgacgcagccgccgccggcggggtggttcccctggccagcgacctgccggtgtccgccagcgccctctggctggccctggccctctgggcctgcgctgccctggcgctggcccacggcctgttccgccgccgccccatctga

SEQ ID NO: 319352 - DNA, 915 bp, Pseudomonas aeruginosa
atgagcctggtcgagatcgacggcgcgaccctgcgctacggcgccctcaccgccctgagcgggctcaacctgcgcctggagcccggcgaggtgctcggcctgctcggccacaacggcgccggcaagaccaccaccatcaagctggtcctcggcctgcgggcccccagcgaaggccgcgtgcgggtcctcggccacgatgcgaggagcctggaggcgcgccgccagctcggctacctgccggagaacgtgaccttctacccgcagctcagcggcgcggaaaccctgcgccacttcgcccgcctcaagggcgtggcgccggccgaagccgcgcgcctgctggaacaggtcggcctcggccatgccgccaggcggcgcctgaaaacctactcgaagggcatgcgccagcgcctcggcctggcccaggcgctgctcggcgaaccgcgcctgctgctgctcgacgaaccgacggtgggcctcgacccgctggccaccgtcgagctctaccaattgctcgaccgcctgcgcggccagggcaccgggatcgtcctttgctcccatgtgctgcccggcgtcgagacgcacatcgaccgcgccgcgattctcgccggcggccgcctgcaagtggccggcagcctcgccgaattgcgccgcaaggcggctctgccgacccgcgtgcgcctggccagcccgcataacccgcagtggctcgaacgctggcaccgggccggcctggcggcgcggagactggacgaccagcgcatcgaggtactgctggacgatgccgagcgcgacggcgtgctggaagcgctgctggccgcgcgcgagttcgacctggaaatcctgccgccgtcgctggaggacctctatcgccaccacatgtcccccgcccccgccggagccacgccatgcccgtag

SEQ ID NO: 319353 - DNA, 933 bp, Pseudomonas aeruginosa
gtgatccgcggcaacgacctgcgcggcgcgggcttcggcgtctggcttgacgccacggcgggcgcgcaggtgctcgacaaccgcatcgagggcgacgaaagcgtgcgctcccaggatcgcggcaacggtatccacctctatgcggtgaaggacgccctggtccgcggcaaccgggtcagccacacccgcgacggggtctacatcgacacttccaacgacagcagcatcgaagccaaccgcttcgaggagctgcgctacggcgtgcactacatgttcacccacaacagccgggtgaccgacaacctgacccggcgcacccgcaccggctacgcgctgatgcagagccgcaagctgaccgtgaccggcaaccgctccatcgacgacgagaactacggcatcctgatgaactacatcacctactcgaccctggccggcaaccgcgtcgagggcgtgcgcagcggcagcaccggcgacgcgatgatttccggcgccgagggcaaggcgctgttcatctacaactcgctgttcaaccgcatcgaaggcaacagcttcgccgacagcgccctgggcatccacctcaccgccggctcggaggacaatcgcatcgccggcaacgccttcataggcaaccgccagcaggtcaagtacgtcgccagccgcgagcaggagtggtccgccgacggccgcggcaactactggagcgactacctgggctgggaccgcgacgacgacggtctcggcgacgtcgcctacgagcccaacgacaacgtcgaccggctgatctggctgtacccgcaggtacgcctgctgttgaacagcccgagcatcgagctgctgcgttgggtccagcgcgccttcccggtggtgcgctcgcccggcgtgcgcgacagccatccgctgatgcggatgcccgccgcggagccgaggccatga

SEQ ID NO: 319354 - DNA, 1911 bp, Pseudomonas aeruginosa
atgagcgacgacacgaaaagcccccacgaagaaacccacggcctgaaccgccgcggcttcctcggcgcctcggcgctgaccggagccgccgccctggttggcgccagcgccctgggcagcgcggtggtcggccgcgaggcccgggccgcgggcaagggcgagcgcagcaaggccgaggtcgcccccggcgaactggatgagtactacgggttctggagcggcggacattccggcgaagtacgcgtgctcggcgtgccgtcgatgcgcgagctgatgcgcataccggtgttcaacgtcgactcggccaccggctggggcctgaccaacgagagcaagcgggtcctcggcgacagcgcgcgcttcctcaacggcgactgccaccatccgcacatctcgatgaccgacggcaagtacgacggcaagtacctgttcatcaacgacaaggccaacagccgggtcgcgcgcatccgcctggacgtcatgaaatgcgaccgcatcgtcaccattcccaacgtccaggcgatccacggcctgcgcctgcaaaaggtgccgcatacccgctacgtgttctgcaacgccgagttcatcatcccccatcccaacgacggctcgaccttcgacctgtccggcgacaacgccttcaccctgtacaacgccatcgacgccgagaccatggaagtggcctggcaggtgatcgtcgacggcaacctcgacaacaccgacatggactacagcggcaggttcgccgcctccacctgctacaactcggaaaaggccgtcgacctcggcggcatgatgcgcaacgagcgcgactgggtggtggtgttcgacatcccgcgcatcgaggccgagatcaaggcgaagcgcttcgtcaccctcggcgactcgaaggtgccggtggtcgacggccggcgcaaggacggcaaggacagcccggtgacccgctacatcccggtaccgaagaacccccacgggctgaacacctcgccggacggcaagtacttcatcgccaacggcaagctctcgccgacctgcaccatgatcgccatcgagcgcctcggcgacctgttcgccggcaagctggccgacccgcgcgacgtggtggtgggcgagccggaactgggcctcggcccgctgcacaccactttcgatggccgaggcaacgcctataccacgctgttcatcgacagccagttggtgaagtggaacctggccgacgcggtgcgcgcctacaagggcgagaaggtcgactacatccgccagaagctcgacgtgcagtaccagccggggcacaaccacgccaccctgtgcgagaccagcgaagccgacggcaagtggatcgtggtgctcagcaagttctccaaggaccgcttcctgcccaccggtccgctgcacccggagaacgaccagctgatcgacatttccggcgaggaaatgaagctggtccacgacggcccgaccttcgccgaaccgcacgattgcatcctcgcccgccgcgaccagatcaagacccgcaagatctgggaccgcaaggacccgttcttcgccgagacggtcaagcgcgcggaaaaggacggcatcgacctgatgaaggacaacaaggtcatccgcgagggcaacaaggtccgcgtctacatggtctcgatggcgccctccttcggcctcaccgagttcaaggtgaagcagggcgacgaagtcaccgtgaccatcaccaacctcgacgagatcgaggacgtgacccacggcttcgtcatggtcaaccacggcgtctgcatggagatcagcccgcaacagacctcgtcgatcaccttcgtcgccgataagcccggggtgcactggtactactgcagctggttctgccacgccctgcacatggaaatgtgcgggcggatgctggtggaaaaggcttga

SEQ ID NO: 319355 - DNA, 2148 bp, Pseudomonas aeruginosa
atgcgcgcccttcgtttttccgccggatcgtggcggtgtgtcttcgcctggatgctcctgctggtcggcctcgccgcccagggtgccgaactcagcgatttggagcgcctgcgcatcgcccaggtattccccgcggtcgagcggatcggcgaccccgaaggcgactacggcgtacgccgcctgagcaagggcgaggaaaccctcggctacgccttccagaccctcagcgtcaccgacatcctggcttactccggcaagccgatcaacctgcaggtgatcctcgatccgcaggcggttatccgcgacgcctacgtcctcgaacaccacgaaccgatcctgctgatcggcatcccggaagagaagctgcacgccttcagcgccaggtacgacggcgtgcgcgccgaccagcgggtggtggtcggccgctccagcgacccgcaggcggttaccgtcgacgcggtgagcggcgccacggtgacggtgatggtggtcaacgagatcgtcatgcgcgccgcacatacggtggcggtttccctcggcctgatcgaggaccgcggcaatgtgcggcccaagccggcgcaggtgcgccagcaaccggcagcgacggcgagctggagcgaattgctcggcaacggtgcgatccgccgcctgcagttgagtcgcgggcagatcgacgacgccttcaagagcagcgaggccgaaggcatcggcgaagccgacgcggcgcaccgcgacgagccgttcatcgatctctacagcgccctgctcaaccctcccgcggtgggccgcagcctgctcggcgacaaccagtaccgcgaactgatggcgtcgctgaagccaggcgaatacgccttcgtcgtgctcggcgacggcgagtattccttcaagggttccggctacgtgcgcggtggcatcttcgatcgggtccaactgcgccagttcggcgacatcatcagcttccgcgacctcgactaccagcgcctgtcggacgtctacgccgaaggcatgccggagttccgcgagatggcgatcttcgtcgcccgcgccagccagcgtttcgatccgggctcgccctggaccctggagttgctcgtgcggcgccagaccggcccggtggcgggggtattcaccagcttcgagctggcctgccagacgcccgaggaatacctggagcggccgcagccaacggccgaggaactggccgccctggaagaggctgcccggccgctgtggctgcgggtctggtaccagaagagtttccaggtcggggtcctctgtaccgccctcgtcctgctcctggcgatcctcttcctccaggaccgcctggtgcgacggccgcgcctgatgcagcgactgcgcaccggctacctggcgttcaccctggtctacctgggctggtacagcctcggccagctatcggtggtcaacgtgctgaccttcgtccacgcgctgttcgaaggcttccgctgggagctgttcctcagcgacccgctgctgttcatcctctggaccttcaccgcagccagcctgctgctctggggccgcggcgtgttctgcggctggctgtgcccgttcggtgcgctacaggaactgctcaacgaactcgcgcgcaagctccgcgtgccgcagttccaggtgccgttcgccgtgcacgagcggctctgggcgatcaagtacatcatcctgctggtgctcttcggtctctccctggaatccctggcgctggccgagcaggccgcggaggtggagccgttcaagaccgccatcaccctcggcttcgaccgccagtggtggttcgtcgcctacgccgtcgcgctgctggtggtcaacctgttcacccgcaaggtctattgccgctacctctgcccgctgggcgcggccctggcgatcccggccaaggcgcgcctgttcgactggctcaagcgccgcgcggaatgcggcaggccctgccagctctgtgcccgcgaatgcgagatccaggcgatccatcccgacggccgcatcgaggccaacgaatgccactactgcctcgactgccagatgacctaccacgaccaggacaagtgcccgccgctggtgaacaagcgcaagaagcgcgcgaagagcgcgccggcggacaacgcgcggatacccgcggagaacctctga

SEQ ID NO: 319356 - DNA, 414 bp, Pseudomonas aeruginosa
atgtccgaccgccctgcccgcccctcccgtctcaacggcctgcgtcacctcgccctgctggtgcccaacctggaagaatgcgagcgcttctatgtcgacgtgctgggcatggaagtgctgaaccgcgccaacgaagacctggtgtatctcacctgcggcaacgacaacctttccctcggccgcgcccacgccgccagcaacggcctgcagaccatggatcactatggcttcgtcgtcgacagcgtggaggaactggaggcctggtaccgttacctgaaggcgcagggcgtgaccctgctcgaccaacccttcgaccacggcgacggcgcgcgcagcttccacctgctcgacccggcgggcaacaaggtgcagccgctgtaccatccggcggtatccgggcagcgtctggcctga

SEQ ID NO: 319357 - DNA, 303 bp, Pseudomonas aeruginosa
gtgtactgcatctttatcaagacccgcctcaggcccggctgcgccgaggctttcatcgatgccatccaggtcaacgccgccgcttccgtgtccaccgagcccggctgcctggtgttcgacgtttcccgcgaccgacaggaccctgacctggtctatctctacgaggtctatcgcgatgacgcggcctacgaggcgcacacccgcaccgcgcatttccgcgacagccggccgttggtcgagccgctgatcctcgaacaggaagtcttcgaaagcgacgcgctggcgctcaatccgctgcgctga

SEQ ID NO: 319358 - DNA, 696 bp, Pseudomonas aeruginosa
atgacccacagcgtttctcccatcggctacatccgctcctgcttcatggagaagttcgccatcccgcgccagccgctgctcgcgccggcggcgcgggggaccctggaactgctgccgccgttcgaccaggcggaagcgctggaaggcctggagcaggtcagccatgtctggctgctgttcctcttccaccaggccctggaagacaagccgcggctgaaggtgcgcccgccgcgcctgggcggcaaccgctcgctgggagtcttcgccacccgcgccacccatcggccgaacggcatcggccagtcggtggtgcgcctggagggcttcgaagcggggcgcctgtggctgtccgggatcgacctgctcgacggcaccccggtactcgatatcaagccctacgtaccctacgccgacgccgtggccgacgcccgcaacggcatcgccgacgcgccgccgccgggcatcgcggtggagtggagcgagcaggcgcggcgccaggcccatgagcacggccagcggttgcggcagccggtggccgagctgatcgagcaatgcctggcccaggacccgcgtccggcctaccagaagccggagcccgagcgccgctacggggtgcgcctgtgggacctcgacgtgcattggcactacccgcgcccggacctgatccgcgtgctggacgtcgccggcggcgactga

SEQ ID NO: 319359 - DNA, 771 bp, Pseudomonas aeruginosa
atgcatccctatttcagtctcgccggtcgcatcgccctggtcaccggcggcagccgcggcatcggccagatgatcgcccagggtcttctcgaagccggcgcccgcgtcttcatctgcgcacgtgacgcagaggcctgcgccgacaccgccacacgcctctcggcctacggcgactgccaggcgatccccgccgacctttccagcgaagccggtgcccggcgcctggcggaggcgctcggcggactcagcgcgcggctggatatcctggtgaacaacgccggcaccagttggggcgcagcgctggaaagctatccggtgtccggctgggaaaaggtcatgcagctcaatgtcacctcggtgttttcctgcatccagcaactgctgccgctgctgcgccgctcggccagcgcggagaacccggcgcgggtgatcaacatcggctcggtggcgggcatcagcgccatgggcgaacaggcctatgcttacgggccgagcaaggccgcgctgcatcaactgtcgcggatgctggcgaaggaactggtcggagagcacatcaatgtcaacgtgatcgctcccggacgcttcccgagccgcatgacccgtcacatcgccaatgacccgcaggcactggaggcggacagcgcgtcgattcccatgggccgctggggtcgcccggaggagatggcggcgctggcgatcagcctggccggcaccgccggcgcctacatgaccggcaacgtgatccccatcgacggcggttttcatctctga

SEQ ID NO: 319360 - DNA, 366 bp, Pseudomonas aeruginosa
atgagctatcgcctggccgccgatgccctggtctggctgcacccgggcttcatcctgttcgtcctgttcggcggcctgctgccgttgcgctggccacgcctggcctggctgcacctgccggcggtggcctggggctgcgccgttgagttcctcggcctgccctgtccgctgaccccgctggagaatcgtctgcgccgggccgccggggacgccggctacagcggcggcttcgtcgagcactacctgttgccgctgatctatcccgccggcctgaccccggcggtgcaatggatccttggcgccatcgttctgctggtcaacctgatcgcctacctgtatctgtggcattgccgcagtagccgctga

SEQ ID NO: 319361 - DNA, 327 bp, Pseudomonas aeruginosa
atgcgcccactgaaacaggcaactcctacctactccagccgtaccgctgacaaattcgtcgttcgtctgcccgagggcatgcgtgagcagatcgcagaagtcgctcgcagccatcaccgcagcatgaactccgagatcatcgcccgactcgagcagagcctgctccaggaaggggcgctgcaagacaatctcggtgttcgcctggacagcccggaactcagcctgcacgagcgcgagctgctgcagcgtttccgccagctgacccaccgtcagcagaacgcgctggtcgccctgatcgcacacgatgcggagctggcccaggcctga

SEQ ID NO: 319362 - DNA, 837 bp, Pseudomonas aeruginosa
atgagcgcggtgatccgtgtcgacagcctgaacaagacctttgcccgcaagcaggcgcttttcaacctgaggctggagatccaggcgggcgagatggtggcgttgatcggtgcatccggctccggcaaatccacgctcctgcgtcacgtcgccgggcttgcccgctgcgaccgcgacaacggcggcagcatcgacgtgctgggtcgccgcctgcaggcgtccggccgcctgagcggcgaagtgcgtcgcctgcgcgccgacatcggctacatcttccagcagttcaacctggtcaaccgcctcagcgtgctggacaacgtcctgctcggcttcctcggtcgcatgccgcgctggcgcggttcgctggggctgttcagcgccgagcagaagcgccaggccctggaagcgctggcgcgggtcggcctggccgatttcgccgggcagcgcgcctcgaccctttccggcggccagcagcagcgcgtggccatcgcccgcgccctgacccagaaggccgaggtgattctcgccgacgaaccgatcgcctcgctcgacccggagtcggcgcgcaaggtgatggacatcctcgccgacatcaaccgccacgacggcaagaccgtggtggtgaccctgcatcaggtcgactacgcgttgcgctattgcccgcgcgcggtggccctgaagggcggccggatcctcttcgacggcagcagcgagcacctttccgaaggcttcctcaacgaactctacggcgccgaaggggacaccccgctgctgttttccgaccgtgcccggcgcggggcggagagccagccggaactgaccctcgcgcgcgcctga

SEQ ID NO: 319363 - DNA, 1005 bp, Pseudomonas aeruginosa
atgttgaaacgcttcagccgtgtgctcgcggcttccgccctgctcgccggctcccttgccgggatggcgcacgccgaccagccggtgatcaatttcgggatcatctccaccgagtcgtcgcagaacctcaagagcatctgggaacccttcctcaaggacatgagccagcagaccggctaccaggtgaaggccttcttcgcccccgactacgccgggatcatccagggcatgcgtttcgacaaggtcgacatcgcctggtacggcaacaaggccgccatggaagcggtggatcgcgcccacggcgagatcttcgcccagaccgtcgccgccagcggcgcgccgggctactggagcctgctgatcgccaacaaggacagcaagatcgacagcgtcgaggacatgttggcgaacgccaagagcctgaccttcggcaacggcgatccgaactccacgtccggctacctggtgcccggctactacgtgttcgccaagaacaacgtcgacccggtcaaggccttcaagcgcaccctcaattccagccatgaggtcaacgcactggcggtggccaacaagcaggtcgacgtcgccaccttcaataccgagggcatggagcgcctggaattgacccagccggagaaggccaggcagctcaaggtgatctggaagtcgccgctgatcccgggcgacccgctggtgtggcgcaacaacctgagcgacgagcagaagaacaagctgcgcgacttcttcttcaagtacggcgccaacgccgagcagaagaaggtcctcgccgacctgcaatggtcgaagttccagccctccgacgacgaccagttgctgccgatccgccagctcgagctgttcaagcagcgcaccgacgtggcgaacaacgccaacctcggcgccgaagagaaggtcgccaagctgaaggccctcgacgaggagctggccaagctggagaaacgcatggccgagcgcgagcagaaaaccgccgccaacgccggctga

SEQ ID NO: 319364 - DNA, 795 bp, Pseudomonas aeruginosa
atgagcactctgagcaccactgccgcggcggccgccaccggcaagccatcctggggacgcctggtcggctggggcctgttcctcgccatcctcgcctggtcctggaagggcgcggaaatgaacccggccgtgctgttccgcgacgccggcaacatggcgaccttcgccgccgacttcttcccgccggacttcggcaactggaagctctacctcagcgagatgctggtcaccgtgcagatcgccctctggggcacggtgctggcgatcgtctgcgccatcccgctgtcgatcctggcctccgagaacatcgtgccctggtgggtctaccagccggtgcggcgggtgatggatgcctgccgttcgatcaacgagatggtcttcgccatgctcttcgtggtcgccgtcggcctgggcccgttcgccggcgtgctggcgctgttcatcagtaccaccggggtgctcgccaagctcttcgccgaggcggtcgaggcgatcgaccccggtccggtcgaaggcgtccgcgccaccggtgccagcgccctgcaggaggtcatcttcggggtcatcccgcaggtcctgccgctgtggatctcttattcgctgtaccgcttcgagtccaacgtacgttccgccaccgtggtcgggatggtcggcgccggcggcatcggcgtgatcctctgggaggccatccgcggcttccagttcggccagacctgcgccgtgctgatcgtgatcatcgtggtggtgagcctgatcgacgttctgtcacaacgcctgcgcaagctgttcatctga

SEQ ID NO: 319365 - DNA, 723 bp, Pseudomonas aeruginosa
gtgcgccctttccaaaccatgcacttgtctagacaaagcgaaccgctgtaccgcgaactggccgaacggctgcgccaggaactgctggcctaccgccccggcgactacctgcccggcgagatccagctggcccagcgcttcgcggtgaaccgccataccctgcgccgggcgctcgacgaactggtgctcgaaggccgcgtgctgcggcgccagggcaagggcacccaggtcctggaggcgccgacgatctacccgatgggcgccgccaacgcctacaccgagtcgctctcggcccagggccaccgggtcgaggcccggctgctggaggcgcgccagcgtccggccggcgccgccgaggccacccacctggggatcggcgagggcgggcgggtgctggaagtgaccaccctgcgttacctcgacggacagccagtgagcctgatccgccattgctacgccgtttcccgcagcgagctgctcgccgactaccagggcggttcgctgcgtcgctacctggccgacaaaggcctgccgctgacccgcacctacagcctgatcggtgcgcgcctgcccaatcgcgaggaggcggcgcgcctgctgatgccccgccatgcgccgttgctcaccgtcctcaccctgtcccgcgaccgtaccggccaaccggtggaactggcccagtcgatcagccgcgccgatcgcttccagtaccaggtcgccccctag

SEQ ID NO: 319366 - DNA, 459 bp, Pseudomonas aeruginosa
atgaccgccttgcattccgatcccaccatcgccgcacgacagcgctggatgggcgtgctcgcccgcgcccgtcgcgaggagctggacgcccatgcggacgccctgcgcgatgccgactatcacctgctgcgcgccgccgagaccggcatgaccctggtgcgcggacgcatgggcggcaccggcagcccgttcaacctcggcgagatgaccgtgacccgctgcgtggtgcggctcggtgacggacgcaccggctacagctatgtcgccgggcgcgacaagcgccacgccgaactggccgccctggccgacgcgcacctgcagggcgccgacgcggcggcctggcaggcgcgcctgatcgaaccgctggcccgcacccaggccgagcgccgcgccgcccaggaggcggaaatcgccactaccaaggtggagttcttcaccctggtccgaggagaagattga

SEQ ID NO: 319367 - DNA, 630 bp, Pseudomonas aeruginosa
atgaccagcgcttcgcttcccagcccggcggataccgccgcgctattgcaaccggcgttccaggacccggtcctggatgcccagcggagtttccgcgcggcgctcaaggccctcgccgaaccggggctggtgcgcaacctcgaccgcgcaccggcgctggccgcgttgcaaccggccagctacgcgctgtgcctgagcttcctcgactccgacaccccgctgtggctggcgccgggtctcgacagcccgacgttgcgcgccaacctggccttccattgcggctgcccgatcgtcgccgagcgtgagcaggcgctgttcgccttgctcgacgaaggcgagctggacgacctgagcggcttcgacagcggcagcgaccgttatccggaccagtcctgcaccctgctgatccagcttgccggcctcgatggcggcgcctcgctggagtggcgcgggccgggtatcgccgaggtgcgccaggtggcgttgccggtgagcaccgggttctgggcgcagcgtgccgcacgcaccgaattccccaggggcctggatgccttcttcgccgctggcgagcgcatcctcggcctgccacgcagtacccgggtcagcgaacccgtcgaggaggtggcctga

SEQ ID NO: 319368 - DNA, 1101 bp, Pseudomonas aeruginosa
atgtacgtagccgtcaagggtggcgagaaggccatcgacaacgcccatcgcctgctggcgcgcaagcgccgcggcgataccgcgctgccggagctgtcggtggagcagatccgccagcagatgccgctggccgtgtcgcgggtgatgaccgagggttcgctgtacgatgagcaactggcggcactggcgatcaagcaggcggccggcgacctgatggaagcgatcttccttctccgcgcctaccgcaccacgctgccgcgcttcgccgccagcctgccgctggacaccgccgggatgcgtctgcaacgacggatctcggcgacctacaaggacctgccgggcgggcaactgctcggtccgaccttcgactatacccatcgcctgctcgacttcagcctgctcgccgagggcgactaccccggccccgaagtggagcggggcgcgtccctggagccttgtccgcgcgtgctcggcctgctcgaccgggaaggcctgatgacgccggagtacgagctgcccggcgcggtgccggatatcacccgcgagccgctcgacttccccaccggccgcgcccagcgcctgcaggccctggcccgcggcgacgagggcttccttctcgccctgggctattcgacccagcgcggctacggccgcaaccatccgttcgccggggagatccgcatcggcgcctgcgaggtctggctggagcccgaggaactcggcttcgcggtgccggtgggcgagatcgaggtcaccgagtgcgagatggtcaaccagttcgtcggttcccgcgaggagctgccgcaattcacccgtggctacggcctggccttcggctacgccgagcgcaaggcgatgggcatggccctggtcgaccgcgccctgcgcgccgaggaatacggcgaggaggtggtgtcgccggcgcagcaggaagagttcgtcctgatgcactgcgacaacgtcgaggccggcggcttcgtctcgcacctgaagctgccgcactacgtcgatttccagtccgagctggagctgattcgcaagctgcgtcgtcccggcgtcgccgaatccgcgcaacccactgaccaggagaagcgcgcatga

SEQ ID NO: 319369 - DNA, 885 bp, Pseudomonas aeruginosa
atgagcctttccccgcaagccagcgccgcgccggagcagggctacaacttcgcctacctcgacgagcagaccaagcgcatgatccgccgcggcctgctcaaggcggtggcgatccccggctaccaggtgcccttcggcggccgcgagatgccgctgccctacggctggggcactggcggcatgcaggtgaccgcggccatcctcggtgccgacgacgtgctcaaggtgatcgaccagggcgccgacgacaccaccaacgcggtatccatccggcgtttcttcgcccgcaccgccggggtcgccaccaccgaacggaccccggaggcgacggtgatccagacccgccaccggataccggaaaccgccctgagcggcgagcagatcatggtctaccaggtgccgatccccgagccgctgcgcttcatcgagccttccgaggcggagacccggaccatgcatgcgctcgacgactacggggtgatgcacgtgaagctctacgaggacatcgccaccttcggccatatcgccaccagctatgcctacccggttacggtggacgagcgctacgtgatggatccctcgccaattcccaagttcgacaaccccaagctggacatgagcccggcgctgatgctgttcggcgcaggtcgcgagaaacgcctgtacgcggtgccgccgttcacccgggtggcgagcctggacttcgaggaccaccccttcgaagtccagcgctgggaagaaagctgcgccttctgcggcagccacgagtcctacctggacgaactgatcgtcgacgaccgtggcggcaagcgcttcgtctgttccgacaccgattactgcacgcagcggcgtgcctgccaggaagaaggggaggacgcgcaatga

SEQ ID NO: 319370 - DNA, 816 bp, Pseudomonas aeruginosa
atgaacgcggtctgcgaatccatcgatgcgaacctcgacgcgcgcgaccggccgctgctctcggtgcgtggcctgacccgcctgtacgggccggaaaagggctgccaggaggtcgacttcgatctctaccccggcgaggtgctgggcatcgtcggtgagtccggctcgggcaagtcgaccctgctctcgttgctctccgggcgctgtccgccggacgccggcacggtcgcctaccgcgacgacggcgaccgctggctggacctctacgccgccagcgaagccgagcggcgcaccctgctgcgcaccgagtggggcttcgtcgagcagaacccgcgcgacggcctgcgcatgggcgtgtccgccggcgccaacatcggcgaacggctgatggcccagggcgtgcgccactacggtcggctgcgccaggccgggctggactggctggaacaggtggagatcgatccgctgcgcatcgacgacctgccgcgaaccttttccggcggcatgcagcagcgcctgcagatcgcccgcaacctggtctcggcgccacgcctggtgttcatggacgaacccaccggcggcctcgacgtgtcggtgcaggcgcgcctgctcgacctgctgcgcggcctggtgcgcgagctggacctggcggtggtgatcgtcacccacgacctggcggtggcgcgcctgctcgccgaccgcctgatggtcatgcgccgttcgcgggtggtggaagccggtctcaccgaccagattctcgacgacccgcagcatccgtacacgcaattgctggtgtcgtcggtcctgcaaccctga

SEQ ID NO: 319371 - DNA, 717 bp, Pseudomonas aeruginosa
atgaacaacctgatcgaggtccgcgacctcagcaagaccttcaccctgcaccagcaacagggcgtagtgctcaatgtgctgcgcgggctcaacttcaatgtcgccggcggcgaatgcctggtgctccacggacgctccggcgccggcaagagcaccctgctgcgcacgctctacggcaactacctgccggccggcggcagcatccgcctgcgccacgccggcgactggttggaactggtcggcgccgagcctcgcgaggtgctcgccgtgcgtcgccagaccctcggctacgtcagccagttcctgcgggtgatcccgcgggtggcgaccctcgacgtggtcatggagccggccctggcccgtggctggagccgcgacagcgccgaactgcgggcgcgcagcctgctggcccggctgaacatcccggaacgcctctggcaactggcgccgggtaccttttccggcggcgagcagcaacgcgtcaacattgcccgcggcttcatggtcgagtggccgatcctgctgctcgacgagccgaccgcgtccctcgacgaagccaaccgccaggtagtgctggagctgatcggtgaagccaaggccgctggcgccgcgttgatcggcatcttccacgaccgcgccgcccgcgaggcggtggccagccgctacctggacatgagccaggagctttcccgccaggagcaagcccatgtcgtctga

SEQ ID NO: 319372 - DNA, 1164 bp, Pseudomonas aeruginosa
atgtcgtctgaacgcgttctcagcaatgcccgggtagtcagcgccgagcgggtcttcgtcggcagcgtgctgctgcgcgacggcctgatcgccgcggtcgacgaaggccgcagccacctggccggggccgaggacctggggggcgactacctgctgcccggtctggtcgagctgcacaccgacaacctggagaagcacatgaccccgcgtcccggcgtcgactggccatcggcctcggcggtgctggcgcacgacgcgcagatcgtcgccgcgggaatcaccacggtgttcgacgcgctgtccatcggcgacgtcaaccccaagggcaagcgcatgcagcagttgccgaagatgctcgaggccatcggcgaggccgccgccagcggcgacgcgcgcgccgaccatcgcctgcacctgcgttgcgaggtcagccatccgcagacgctggaggtgttccgcgaactggtcgagcatccgctggtgcaactggtctcggtgatggaccacgcccccggccagcgccagttcgccaggctggagaagtaccgcgagtactaccagggcaagtaccacctgagcgatgccgagatggacgccttcatcgtcgagcaggtagccaactccgagcgctacagcgacgccgcccgtgcggccatcgtcgatgtctgccagggacgcggcctgtcggtggccagccatgacgacgcgaccctcgcgcatgtccgcgagtcggccggctacggcatggccatcgccgagttcccgaccaccgtggaggccgccagggccagccacgagcacggcctgcaggtgctgatgggcgcgcccaacgtggtccgcggcggttcccactcgggcaacgtggcggcggcgcaactggcgggaatcggcgtgctggatatcctttccagcgactactatccggccagcctgctgcatgcggccttgctgctcgccggcgagcacagcgagtatgatgcgatccgctacgacctgccgcgcgcggtggcgatggtcagccgtaccccggcgctggccgccgggctgaccgatcgtggcgaaatccgcgtcggcctgcgcgccgatctgctgcaggcgcgggcgctcggcaacaaccagccggtggtgcgtcaggtctggcgcggcgggcagagagtgttctga

SEQ ID NO: 319373 - DNA, 558 bp, Pseudomonas aeruginosa
atgacaggcagactgatttatctgatggggccttccggctcgggcaaggacagcctgttgcaggccgcgcgcgagcccctggcgctgcgcggctgccgtatcgtgcggcgggtgatcacgcgctccgcggaagcggtgggggaggacgcccaggcggtgactccggcgcagttcgacaccctcgagcgggcctcggcgttcgccatgagctggcgcgccaacggcctttgctatggcattccggtgcagatcgacgagtggctggcgcagggctacgacgtgctggtgaacggctcgcgcggctacctggcgcaggcccgccggcgctatccggatctgctcgcggtcctgctcggggtgaaacccgaggtgctgcgccagcgcctgctggcgcgcggccgggaaagccccgaggaaatcgaggcgcgcctggcgcgtaacgccgagttcgccgccggcctggagggcccgctgttccaactggacaactccggtgatctcgacgacacgctacgcaccctcctggcccgtctcggcagcgaccgcgcatgcgcctga

SEQ ID NO: 319374 - DNA, 771 bp, Pseudomonas aeruginosa
atgcgcctgaccctgctcggcaccggcgacgcccgccaggtgccggtctacggttgcgattgcccggcctgtcgcaacgcccgcgccgacgccggcctgcgtcgccgtccctgtagcgcgctgctggagtgcgccggccagcgttggctgatcgacagcggcctggtcgatctctgcgagcgcttcccgccccatagcctcgatggcatcctccagacccattaccacgccgaccacgcccagggcctgctgcacctgcgctggggccagggtctggtgatcccggtgcacggcccggccgacccggagggcctcgccgacctctacaagcatccgggcatcctcgatttcagccagcccttcggcgccttcgagcggcgccagtggggcgcgctggcggcgaccgcgttgccgctggtccactcgaagccaaccttcggctacttgctggagggggcttccgaggagggaacgatacggcgcctggcctacctcaccgataccgtcgggctgccggcggacagcgcctcgcgattgctcgcggcgccgctggacctgctggtgctggactgctcgatgccgccgcaggagcagccgccgcgcaaccacaacgacctcacgcgggcattggagtgcatcgaatcgctgcgtccccggcgggccgtgttgactcacgtcgggcatacgctggacgcctggctgctggaccaccccgctgcgttgcccgaaggggtggaactggcgcgcgacggcgtgtgcctgccgctgtga

SEQ ID NO: 319375 - DNA, 186 bp, Pseudomonas aeruginosa
atgtcacgatccgccgtcattcttctgttcgtagtgatcgccagcgcgatcctggcgctgagcctgccgcccgacgccaccctcctcgcctggtgcgcctggggtctgctgggcatttccggcgcatggctgatgtttgcactggtggtaggtcggcgaatccgcttcgatccaagcctggactga

SEQ ID NO: 319376 - DNA, 147 bp, Pseudomonas aeruginosa
atgtggatcctggctttgccgctgaccgccctggccctttcggtcggcgtctacgggctgctctggctgatagagcgcggaggagacgaatatccagcgaagcttccgctgagcgacaagggcgccacggaacctcggcgccactga

SEQ ID NO: 319377 - DNA, 279 bp, Pseudomonas aeruginosa
atgagcagctcacgcaacctggtcggcaccggacttctttccctgctggctctcgtagtcttccagaacagcgcactgggcgacgaggacaggacgcaggaacgcaacggcgaaaggccggtagtgctggacagcaacgcaacgccgcagtgggcacccgctgcgcaacaactggtgatccaggcgcccgacgaatccccgcgcatcgtcaccgtaggcgaggacgagcgcggcacggcgctggtgaccgcggccgacgaacaggcctggacattctga

SEQ ID NO: 319378 - DNA, 519 bp, Pseudomonas aeruginosa
atgaaccagaccgtcgccattcccgccgcacaggacctgccggacgccccgcgccagccgcggataccggactcccccttcgccagcttcgacgtgcggatcgccagcgagcacgacgcgccgcgcctgtcgttgctgctacagcaactcggtagcgccgatccgcgcccggacccggcgttgctggccatccagctgcaacgaccgcgcggcgaccgggtcaccctggtggccgagcgcggcgagcgcctgctcggcacctgcaccctgcatctgatcgaacacctggcgcacgatttcgcccgctcggcgattctcgaagacatggtggtcgaccgccacgcccgcggccagggcgtaggccgcgaactgatcggccgggccgtggagcgcgcgcgcagttggggctgctacaaactggcgctttccagccaccaggaccgggaaaccgcgcagcgcttctatgccgcgctagggttcaccagccacggcgtaagcctggcgctgcatctgggctga

SEQ ID NO: 319379 - DNA, 1284 bp, Pseudomonas aeruginosa
atgacgcacaacaaaatctgtgccaaaatcgcctcagtagctattgttgggtggcgctcagggggtagtgtggagcagtacgttgacagtgggagtgcccggtatagggattatcaggatatttctgaacgaaagggttcctgtctcatattttttgccgcttttctatcgcttttctggccgacctcggtagggggagtgattgtcagctatctaccaatagtatcaattttgttatcttgctttcttttgcttatctattcggttggtgggaaatttatagcggtcaatgtttttgttttttgctttttctttttgttgctgcttttttttacaataatatctccgtttcaagagtatacttttggcgccatttttccctatttggcaatgggcgtggttcttatgatttcgccttctattgatgttggcgattgctcaagaagactgtttcatctgatggctgttctccttataattttagggtttggggtggtgtttcatgtggattttataaggcagtttatatttaaattttatcaggcgtactatgaagacctgtatttgtatatggtcgaatatggggataagccagtagggccttttgcgactcattctatatctgcttttatatacgctgttttcgctattatttatcttcgtctatcgcatgtttctagcggggctaagtcggtagcttatttcttgctgtcgctcttgtttttttctttgattgttcttcttaaatcattttcagctattgcgatttcttccttgcttgcgtctatgtattttctttggttgctgtctcgcgctaaagtgctggcaatactatttatgggatttttgattgtttgtgtgttttccctcgttgatcttacatctttctatgagctcattgagaaacttttgtcgagcgacgccaatggcttgcgcggcaggtattccgccggtaatcgacttgatggaacttatgaatttttgcttaataatcctctgatggcgatcgggatgacgtcttctccgcagatagcgtttggtgataattttatatctgactatgtgattaggactggtgtttttggttatcttgcagttcttttttccgtttttgtttattttctttcctccttgagggggatggttgctattgcttttgctgtcggaatagttgttttggcggatctcggttatccgctcctcacgaacttcagagcaatttttcttttcccagtattcattgccatgtggtgttaccctggggattccccgcatcgctcctga

SEQ ID NO: 319380 - DNA, 1041 bp, Pseudomonas aeruginosa
atgcgtcacggcgatatttccagcagcaacgacaccgtcggagtggcggtggtcaactacaagatgccgcgcctgcacaccgcggcggaggtcctggacaacgcccggaagatcgccgacatgatcgttggcatgaagcagggcctgcccggcatggacctggtggtgttccccgagtacagcctgcagggcatcatgtacgatccggcggagatgatggaaaccgcggtggcgatccccggcgaggaaaccgagatattctcccgcgcctgccgcaaggccaacgtctggggcgtattctccctcaccggcgaacggcacgaggagcatccgcgcaaggcgccgtacaacaccctggtgctgatcgacaacaacggcgagatcgtccagaagtaccgcaagatcattccctggtgccccatcgagggctggtatcccggtggccagacctacgtcagcgaagggccgaagggcatgaagatcagcctgatcatctgcgacgacggcaactacccggaaatctggcgcgactgcgcgatgaagggcgccgagctgatcgtgcgctgccagggctacatgtatccggccaaggaccagcaggtgatgatggccaaggccatggcctgggccaacaactgctatgtggcggtggccaacgccgccggcttcgacggcgtgtattcctacttcggccactcggcgatcatcggcttcgacggtcgtaccctcggtgagtgcggcgaggaggaaatgggtatccagtacgcccagctgtcgctttcgcagatccgcgatgcgcgcgccaacgatcagtcgcagaaccacctgttcaagatcctccaccgcggctacagcggcttgcaggcgtccggcgatggcgaccggggcctggcggagtgtccgttcgagttctaccgcacctgggtcaccgacgccgagaaggcgcgcgagaatgtcgagcgactgacccgctcgactaccggtgtggcgcaatgcccggtcggccggctgccctacgagggactggagaaggaggcctga

SEQ ID NO: 319381 - DNA, 1116 bp, Pseudomonas aeruginosa
atgccttttctgagcgacatgctcgaccagtcccgccggcagcaggacgaggaacaggccctggcgcgggagaatcttgccgaggcaagtctgctccaggcccacctgagtcaccgcagcgccctgcacagccgtttccgtttcgacccggcggcggtgatggactgcctgcgcgccgaggtactcggccaggaaccggcgctacaggccgtcgaggacatgctcaaggtggttcgcgcggacatcgccgacccgcgccgtccgctgttcagcgcgctgttcctcggccccaccggggtcggcaagaccgagatcgtgcgcgccctggccagggccctgcacggcgacgccgaggggttctgccgggtggacatgaacaccctgtcccaggagcactatgccgccgccctcaccggtgcgccgccgggctacgtcggggcgaaggagggcaccaccctgttggagcaggacaagctggacggcagtcccgggcgccccggcatcgttctcttcgacgaactggaaaaggccagcccggaagtggtccatgcgttgctcaacgtactcgacaacggcctgctgcgggtcgcttccggcgaacgcacctaccatttccgcaataccctggtgttcatgaccagcaatctctgcgcccatgagatccagcgctacgacgagcgtcgccagcgcctgccctggcgcctgctgccggtcggcggcgagcgccggcggcgggacatcgacgggatggtccgggcccggctgctgaagactttctcgccggagttcgtcaatcgtctcgatagcgtggtcaccttcaactggatcgaacgcgacgtcgtcgcgcgcctggtcgagctggaggtgcagcggctcaaccggcgcctggagaagcatcgctgccgcctggaggcgaccccggaggtgctggcgaagatcgcccgcgccggcttcgaccggcagttcggcgcccgtgcgttgcgccgcagcgtccgtcatcatctcgaggtaccgctggccgagcatctgctcgaccaccaccagccgggcgacgggaactgcacgacctacctggcgagcctggagcacgagcgggttcgcttcgtgcggcgctga

SEQ ID NO: 319382 - DNA, 1158 bp, Pseudomonas aeruginosa
atgggatcgcaccaggagcggccgctgatcggcctgttgttctccgaaaccggcgtcaccgccgatatcgagcgctcgcagcgctatggcgcattgcttgcggtcgagcaactgaaccgcgagggcggcgtcggcggtcgcccgatcgaaacgctgtcccaggaccctggcggcgacccggaccgctatcggctgtgcgccgaggacttcattcgcaaccggggggtacggttcctcgtgggctgctacatgtcgcacacgcgcaaggcggtgatgccggtggtcgagcgcgccgacgcgctgctctgctacccgaccccctacgagggcttcgagtattcgccgaacatcgtctacggcggtccggcgccgaaccagaacagtgcgccgctggcggcgtacctgattcgccactacggcgagcgggtggtgttcatcggctcggactacatctatccgcgggaaagcaaccatgtgatgcgccacctgtaccgccagcacggcggcacggtgctcgaggaaatctacattccgctgtatccctccgacgacgacgtgcagcgcgccgtcgagcgcatctaccaggcgcgcgccgacgtggtcttctccaccgtggtgggcaccggcaccgccgagctgtatcgcgccatcgcccgtcgctacggcgatggcaggcggccgccgatcgccagcctgaccaccagcgaggcggaggtggcgaagatggagagcgacgtggcagaggggcaggtggtggtcgcgccttacttctccagcatcgatacgcccgccagccgagccttcgtccaggcctgccatggtttcttcccggagaacgcgaccatcactgcctgggccgaggcggcctactggcagaccttgttgctcggccgcgccgcgcaggccgcaggcagctggcgggtggaagacgtgcagcggcacctgtacgacatcgacatcgacgcgccccaggggccggtccgggtggagcgccagaacaaccacagccgcctgtcttcgcgcatcgcggaaatcgatgcgcgcggcgtgttccaggtccgctggcagtcgcccgaaccgattcgccccgatccttatgtcgtcgtgcataacctcgacgactggtccgccagcatgggcgggggagcgctcccatga

SEQ ID NO: 319383 - DNA, 591 bp, Pseudomonas aeruginosa
atgagcgccaactcgctgctcggcagcctgcgcgagttgcaggtgctggtactcaacccgccgggagaggtcagcgacgccctggtcttgcagctgatccgcatcggttgttcggtgcgccagtgctggccgccgccggaagctttcgacgtgccggtggacgtggtcttcaccagcattttccagaatcgccaccacgacgagatcgctgcgctgctcgccgccggaactccgcgcactaccctggtggcgctggtggagtacgaaagccccgcggtgctctcgcagatcatcgagctggagtgccacggcgtgatcacccagccgctcgacgcccaccgggtgctgcctgtgctggtatcggcgcggcgcatcagcgaggaaatggcgaagctgaagcagaagaccgagcagctccaggaacgcatcgccggccaggcccggatcaaccaggccaaggcgttgctgatgcagcgccatggctggaacgagcgcgaggcgcaccagtacctgtcgcgggaagcgatgaagcggcgcgagccgatcctgaagatcgctcaggagttgctgggaaacgagccgtccgcctga

SEQ ID NO: 319384 - DNA, 519 bp, Pseudomonas aeruginosa
atgatgctgggactggttctgctgtacgttggcgcggtgctgtttctcaatgccgtctggttgctgggcaagatcagcggtcgggaggtggcggtgatcaacttcctggtcggcgtgctgagcgcctgcgtcgcgttctacctgatcttttccgcagcagccgggcagggctcgctgaaggccggagcgctaaccctgctattcgcttttacctatctgtgggtggccgccaaccagttcctcgaggtggacggcaagggcctcggctggttctgcctgttcgtcagcctcaccgcctgcaccgtggcgatcgagtcgttcgccggcgccagtggtccgttcggcctgtggaacgcggtcaactggacagtctgggcgttgctctggttctgtttcttcctgctactggggctgtcccgcagcatccagaagccggtggcctacctgaccctggccagcgccatattcaccgcctggttgcccggcctgctgctgctcgggcaggtgctcaaggcatag

SEQ ID NO: 319385 - DNA, 348 bp, Pseudomonas aeruginosa
atggcaacacaaggagtgttcacccttcccgccaacacccggttcggcgtcaccgccttcgccaactcgtccggaacccagacggtgaacgtgctggtcaacaacgagacggccgcgaccttcagcgggcaaagcaccaataacgccgtcatcggcacccaggtgctcaactccggcagcagtggcaaggtacaggtccaggtcagcgtcaacggccgcccctcggatctggtctcggcacaggtaatcctgaccaacgagctgaacttcgccctggtcggctctgaagacggcaccgacaacgactacaacgacgccgtcgtggtgatcaactggccgctcggctag

SEQ ID NO: 319386 - DNA, 1059 bp, Pseudomonas aeruginosa
atgactcccgatcaacgatttgcccgttgggttcaagtcgctatcgcggtattcgtgttgctgttcgtctacttcctggtcgccgacctgtggatgccgctcaccccgcaggcccagttgacccggccggtggtgcgcgtcgcgccgcgtgtcagcggtcaggtcgccgaggtgctggtgtccaacaacggccacgtgcagcccggcgaagtgttgttccgcctcgatcccgagccgttccaactggccgtgcgccaggccgaactggcactggaggaagccgagcgcaccaaccgcgagctggatgccgccatcgcctcggccaaggccgacctcctggccgcgcgcagcagcgccggcgagctggacagcgaggcgcgccgcaccgcccaactggtgcagcgccaccatgtgtcgcagcagatgcacgagcaggtcagcgcccaggcccaggccgcccgtgcccgggtcgccgcggcccaggcgcggatcggcgagctgaccgcgcgacgcggcacggccggcgaggacaacctgcgcctgcgccaggcgcgtaacgccctggcccaggcccgtctgcaactgcaatacagcagagtccgggccgaccgtgccgggaccctgagcaacctgcaactgaccccgggcacctacgttccggccggaacgccggtggcggcgctggtggacgaccgcatcgacatcgtcgccgacttccgcgagaaatcgctgcgctacgtgcgccctggcgaccgtgcggcggtggtgttcgatgcgcgtcccggcgaagtgttcggcgcgcgggtggcggctatcgacgccggggtcaaggagggccagctggacgccaacggcgacctcgccgcgccggtcacctccgaccgctgggtccgcgacgctcagcgccagcgcctgcacgtggtgctcgacgaacttcccgaaggcttgctgcccaccggagccaaggccaccgtgcagctgtatcccggcgacggcctgagccacctgctcggtcgcgcgcagatcgtcgccatcagcctgctgcactacgtctactga

SEQ ID NO: 319387 - DNA, 1029 bp, Pseudomonas aeruginosa
atgccggccaagctcgcgatgtccgccaacgacctgcgtcagtgcctgcgcatcgccggcggcggcaccctggggttcttcgtctgcaagctgatgaactgggactacggctcgttcttcggcgtctacccgatgctgctgctcggcctgacgccggtgatcaacctgcacatcgtccgccagttcctcgccaactcggtggtgatcagcgtcgaggtactggtgctgtacgggttgttcggcgaccggccgctgctgatgacgcctatcgtcttcggcctcttcgtctaccgcttcgccctgatggcgcgcggcccgctgttcttcttcggcgcactgagttcggtgttcctctcgatgctgctgcactttgccagctatccggacgtcgatctgttcgacatgctcgccagcaacatggtcgccacctggctgacggtggccatcgccgtgctgatgttctacctgttccccgacgtcgaaccgcggccgccgcgccaggcgccggccaaggacgcccccagccggcgccacgagacgctgctcggggccacggtggcgaccctgtccttcgtggtcttccagaccttcgacctgaaggactcgctgtcggcgcagatcgcctcgatcctggtgttgttccccatgcactggaagggcgtgcacttcgccgggcgcatccgcgccctcggtacgctgctcggctgtgcgctggcggtgggcttgcaggtgctgctctacgatcactacgacatcctgcccttcgtcgccctgttgctgtggatctcggcgatgttctgcgcgcgcatccacatgctggagaacggcgtaccggggatcggtttcggcgcgctgaccaccctggcgatcgtcctcggccagtacctgacgccgacccacgacatgatgtacagcgtgctctaccgatttacctcggtgtgcttcgcggtgctgatcacgctgatgacggtgctggtgatccacctgttcctcaaccgcttcgccgccacccggcactacagccactga

SEQ ID NO: 319388 - DNA, 879 bp, Pseudomonas aeruginosa
atgcgcacacccgcctggctcggcagcggcatgccgctgctcttcgtgctgctctggagcactggattcctcggcgccaagttcggcctgccgtacgccgagcccttcaccttcctggccatccgcctgctcctcgcggccgccctgctggccgccttcgccctgctcagcggtgcgccctggccgggctcggcacggctggccgggcatgtcgcggtcgccggcctgctggtccatggcctgtacctgggcggggtgttcctcgccatcgagcacggcatgtcggccggcctgacctccctgttggtcggcctgcaaccgctggctaccgcggccctggccggcatctggctcggcgagcaggtcagccgccggcaatggctgggactggcgctcggcctggctggcgtagccctggtggtactcggccgcatccacggtggcgccgacggcctggcctgggccgcggtgctggtggcactggcggcgatcacctgcggcacgctgtaccagaagcgcttctgcggcggcatggacctgcgcaccggcggcgtcgtccagtacctggccagcggcgccctgctcggcctcgccgccctgcttttcgaaagccgcgaggtgcagtggagcacgccgttcgtgctgaccctcggctggctggtgctgggactctcgttcggcgccgtcggcctgctctacacgctgatccggcatggcgccgcgtcaaaggtggcgagcctgttctacctggtgccgccagtgaccgcgctggcctcctggctactgttcgacgagcgcctggcgccggcggcgatcggcggcatgctgctggtgatgctcggcgtcgcgctggtcaactggccgggccggcgcgcctga

SEQ ID NO: 319389 - DNA, 1335 bp, Pseudomonas aeruginosa
ttgattctcggaacacccaaggccgactggctcgccgaattcccgcgcctggccgacctgatcgccctgcgtccgagcgagtggttcaacccggccatcgcgccgagcgccgaagccctggccgacgtcggcctcggcgccgccgacgtggccgacgccagcgcccgcctgcagcgcttcgccccgctgatcgcccggctgtttccggaaaccgccgccagcggcggcatcatcgagtccgacctggtcgaggtcgccaccttccacgatgccctgcgccagcattacgccgccgaactgcccggccggctctggctgaaacgcgatagccacctgccgatctccggctcgatcaaggcccgcggcggcatctatgaagtgctcgcccatgccgagcgcctggccctggagcacggcctggtcggcctcgacgacgactactcgcggctggccgaggcggattgccgggcattcttcgcccgccaccggatagcggtgggctccaccggcaacctgggcctttccatcggcatcatcggcgccgcgctgggcttccaggccagcgtgcacatgtccgccgacgcccgccagtggaagaaggacaagctgcgcgcccacggcgtgacggtggtggagtacgcctccgactacagtgtcgcggtggaacagggccgccgcgaagcggccggcgatccctacacccatttcgtcgacgacgaaaactcccgcgacctgttcctcggctacgccgtcgccgccgagcgactgcgcggccagttggacgccgccggcatccgcgaacagcgggtgctcgctgtcgacgcggatgccggcggcggtcccggcggggtggccttcggcctcaagctggcgttcggcgacgcggtgcactgcctgttcgccgagccgacccattcgccctgcatgttcctcggcgtctataccggccgccacgagcaggtttcggtgcaggacttcggcatcgacaaccgcaccgccgccgatggcctggcggtggggcgtccgtcgggcttcgtcggccgcgccatgcagcgcctgctcgacggctactacacggtggacgacgacgagttgttccgcctgctcgccttgctcgagcgcagccagggcatccgcctggaaccctcggccctggccggcgcgccgggcatcgcccgggtcacccgtgagccgcagggctatcgcgaacgcatggggctgacctcggcgcgcctggccaatgccacccacctggtctgggccaccggcggcggcatggtgcccgagacggaaatgcgcgcctacctggagcgaggccgctcgctgctggactga

SEQ ID NO: 319390 - DNA, 1344 bp, Pseudomonas aeruginosa
atgactatcgaaggccaaggctcactcgccgaacggctggctggagttgaagaaatcgaatgcgtcacccccgacctcaacggggtgccgcgcggcaaggtgatgaccggcgagggcttcctcagcggccggcgcctgcagctcgcccgtggcgtgctgctgcaatgcatcatgggcggctacccgccggcgcgcttctatggcagcgacgatggcgacctggcgctggtcgccgagccgacccaggtccatcgcctgccctggagcaacactccgcgcgccttcgccatctgcgatgcgcaggaactggatggcacgccgtccgggctgtccacccgcggcctgctcaagcaggtggtggcgcgctacgccgcccacggctggcaaccggtggtggccaccgaactggagttcttcgtcttcgccccgaacaccgatcccaacgagccgttccaggccccgctggggccggatggccggcgcgagctgggctattcggccttcagcgtgtcttccaacaacggcctgcggccgttcttcgaggacgtctaccgctgcatggatgcgctgggcctggtgcgcgacaccttcatgcacgagatgggcaccagccagttcgagatcaacttcctgcatggcgacccggtcctgctggccgaccagaccttcctgttcaagcacctgctcaaggaggtcgcgctcaagcacggcctgatcgtggtgtgcatggccaagccgctggcgaagacgccgggcagctcgatgcacatccaccagagcatcgtcgaactggacggcgggcgaaacatcttcagcgaagccgatggcgagccttccgccgcgttccgccacttcatcggcggccagcaggcctgcctggcggacttcacgcccttcttcgcgccgcacgtgaactccttccagcgcctctgccatccctacgcatcgccgaacaacgcctgctggtcccacgacaaccgtgccgccggcctgcgcatcccggccagcggagcctccgcgcggcgcgtcgagaatcgcctgccgggcgccgacgccaacccttacctggccatcgccgccagcctggccgccggtctctacggcctggagcacgaactggagccgagcccggcgatccagggcgagttcgaggtaccggaggagttgaccctgccctgcaccatgtacgatgccctgcggcgcctgaaaggcagcgcgctggcgcgcgaactgttcggcagcgagttcgtcgaaggctacgtggcgaccaagagcatggaactgaccagcttcttcgacgagatcagcccctgggagcgtcgcgtcctggcagcccaggcctga

SEQ ID NO: 319391 - DNA, 1305 bp, Pseudomonas aeruginosa
atgcggcggattttcttctcttttcgcgctctctattttgctaccctgctgatgctcaccggctccggcctgctcagcacctacctggcgctgcgcctggcggcggacaaggtcgacggcctgtgggtcggcgcgctgatggcagccaactacttcggcctggtgctgggcggcaaggtcggtcaccggctgatcgcccgggtcggccacatccgcgcctacgtcgcctgcgccggggtggtcaccgccgcggtcctcggccatggcctgctgccctggctgccggcctggatcgccttgcgcatggtgatgggcctgggcctgatgtgccagtacatggtgatcgagagctggctcaacgagcaggctgatgccagccagcgcggcgcggtgttcggcggctacatggcggcttcctacctgggcctggtgctcggccagatgatcctggtggcgcatccgcaactggggccggagttgctgatgctggtggccttctgcttcgccctgtgcctggtgccgctggccctgacccacaagatccaccccgcagcgctgcgcccggcgccgctcgaaccacgtttcttcatccgccgggtgccgcagtcgctgaccaccgtattggtctcggggctggtggtcggctccttctatggcctggcgccgctgtatgccaaccagttggggttgcccaacgagcaggtcggcctgtacatgggcgcctgcatcttcgccgggctgctggtgcagtggccgctcggctggctgtccgaccgtcgcgaccgcgcctggctgatccgcgcctgcgccatcctgctgtgcctgttcgccttgccgctggcattgttgcaacagatgccgctggcgttgctgctggccctgggaatcgccgcgagcatgttgcagttcaccctctatccgctggcagtggccttttccaacgaccacgtggagaccgagcgacgggtttcgctgaccgccatgctgctggtgaccttcggcgtcggtgcctgcatcgggccgctggcggccggcgcgctgatgcggctgtttggcgctaacatgctatatgcgttcgtcagcgcctgcgcgctgatcctggtctggcgggtccatccggagaaggtcagcggcctgcaccgggtcgacgacgcgccgctgcaccacgtgccgaccccggacaacatgaccagctccccgctggtcgcggcgctcgatccgcgggtagacgaacaggcggtgcaggagcagatggtcgatggcgagcccgacgcgccgcaggccgacggtgcgacgcagaactga

SEQ ID NO: 319392 - DNA, 750 bp, Pseudomonas aeruginosa
gtgcccaacccgttcgtcgaagaagcggggccgcaacccccgaaggtgctcaaggcccccgtggaaatccaggccaacctgcgcctgctgcaggatagccgcgactccctgctgatcacctttgccgatcgcaaccagcgcttccagagcttcctggtggacatcgaccgcgaccgcgggatggtcgcgctggacgaactcatccccaacaccggcgaacgtttcctgcagaacggcgaggcgtttcgcgtcgaagccttccacgaaggcgtgcgtatcgcctgggaatgcgagcgcccggtgcagttcggcgaacacgacggcgtcccctgctactgggccgcccttcccgccgaagtgctctaccaccagcgccgcaacgcctaccgcgccagcatcaagcagagccagccgatcgccgcggaaatcgccggggaaaaactccgcgcgccgctgagcggacaactgctggatatctccgccaccggcgccaagctgcgcttcgccggcaatgtcgccgaacgcctgcatcccggcgagatctacgaagacttcagcgcccagctgccacagggcgcgatcagtagcgcgatcgaactgcgtcacgtgcgcttcgacgaaaagctcgacgcgaccttcgccggcgtccgcttcagcgagatgagcggcctcgcccagcgtcaggtggatcgcttcgtctaccagttacagcgcgaagcgcggcgcttcgagaaagacgaactgttctga

SEQ ID NO: 319393 - DNA, 471 bp, Pseudomonas aeruginosa
atgcctgactcccctaccctgctcgatctgttcgccgaggatatcggccacgccagccaactcctgcagttggtcgacgaagaattccaggccctggaacggcgcgagctgccggttctgcaacagcttctcggggccaagcagccactgatgcagcaactggagcgaaatggccgggcccgcgcggaaatcctccgcgaagccggcgtttccctcgaccgcgaaggccttgcccgctatgcccgcgagcgcgcggatggcgccgagctgctggcgcgcggcgacgaactgggcgaactgctggagcgttgccagcaggccaatctgcgcaacgggcggatcatccgcgccaaccaggcttccaccggcagcctgctgaacatcctccgcggccaggacgccccgagcctgtacgacagccgcggcggcaccgcctcgagcagccggcaacgtccgctcagccaggcctga

SEQ ID NO: 319394 - DNA, 324 bp, Pseudomonas aeruginosa
atggtcatcgacttcaaccggctgaatcccggcagcacgccagccaccaccggccgtaccggcagcaccgccgcaggtcgccccgacgccactggcgccgacaaggcaggccaggccgcgacttccgctccgaagagcggcgagtcggtgcagatcagcgaaaccgcccagaacatgcagaaagtcacggaccagctgcagaccctgtcggtggtcgacaacgataaggttgcccggatcaagcaagcgatcgccgatggcacctatcaggtcgacagcgagcgtgttgccagcaagctgctcgacttcgaatcccagcgctga

SEQ ID NO: 319395 - DNA, 738 bp, Pseudomonas aeruginosa
atggcatgtagccatacttctctacggtttttacccgttttgctcgggctcggctacctgtgcgcggctaacaacagccaggcccagggttttaccgctcccgaggtacttatcggctccacccaggggtttcttgaattcaaggtagaagaatatctgcagaatagcggactcgacgggcgctaccagattcaggtcaatcgcgtcgacccgcgcttgcgcctggccgaatgcgacagggacttgacgctcagccaggaaagtccggcacaaccgatcggcagggtcaccgtgcgcatcagttgcgaaggcagtgcgccctggaccatcttcatgccggcgcaggtgaaactgttccgccaggtagtggtcgcggtgcagccactcaagcgcgcgcacgtgctggaggatgccgacatcgccctggtcgagcgcgacgtcggcctgctgacccagggctacctgaccgatccggcccgcgtcgtcgggcagaagctgcgccgaccggtggtcaacgaccaggtgctggcgccggtcttcctcgagcaggccgaggccgtgcgcaagggcgaccaggtggtgatcctcgcacgcactgccaccatcaacgtcaagatgcccggcgaggcgctgtccgatggcgccccgggccagcagatccgcgtgcgcaacctgcgctcgcagcggataatcaaggcccgcgtgatagaacccggcacggtcgaggtgaatatgtag

SEQ ID NO: 319396 - DNA, 933 bp, Pseudomonas aeruginosa
atggccggtgttttggattcagtcaaccagcgtacgcagttggtcggacagaaccgtctggagctgcttctgttccgtctggacggcaaccagctctacggcatcaacgtgttcaaggtgaaagaggtgttgcagtgcccgcgcctgacggtgatgcccaagtccagcccggtggtgcgcggggtggcgaacatccgcggaggcaccattccgatcctcgacctggcgctggccaccggccgccgcgggttgcaggacctgaccaacagcttcgcgatcatcaccgagtacaacaccaaggtgcagggcttcctggtgcgctcggtggagcgcatcgtcaacatgaactgggaagagatccatccgccacccaagggcgccggccgcgagcattacctgaccgcggtgacccgggtggacaagcagttggtggaaatcatcgacgtggaaaaagtgctcgcggaggtcgcaccgacgtccgaggaagtgtcccacggagtggtggacgccgagacccagagccgcgcggtgaccaagcgggtgctggtggtggacgattcgtcggtggcgcgcaagcaggtaatccgttgcctggaggcggtcggcgtggaaatgaccgcgctcaacgacgggcgccaggccctggagtacctgcagaacatgctctccgagggacggcgtccggaagacgagctgctgatgctgatctccgacatcgaaatgccggaaatggacggttataccctgacggcggaaatccgtagcgatccccgcctgcagaaactgcacattctcttgcatacttcgttgtccggggtcttcaaccaggcgatggtgaagaaggtcggtgcggacgacttcctcgccaagttccgtccggacgatctggcggcgcgggtggtggagcggatcaaggcggtggacgcgggctga

SEQ ID NO: 319397 - DNA, 825 bp, Pseudomonas aeruginosa
gtgtcggcagctaatgcggatttcgagttgttcagggtcttcctcgagaagacctgcggcattgtgctgggcagcaacaagcagtacctggtctcgagccggctgaacaagctgatggagcagcagggcatcaagagcctgggagagctggtgcagcgcatccagacccagcgcggcggcctgcgcgagatggtggtggacgcgatgaccaccaacgagaccctgtggtttcgcgatacctacccgttcgaggtgctcaagcagcgggttcttcccgaactgatcaaggccaacggcgggcagcgcctgcggatctggtcggcggcctgttcgtcaggccaggagccatactcgctgtcgatggccatcgacgagttcgagaagaccaacctggggcagttgaaggcgggcgtgcagatcgtcgccaccgacctgtcggggtcgatgctcaccgccgccaaggccggcgaatacgacaccctggcgatgggccgcggtctgtccccggagcgtctgcaacgctatttcgacgccaagggaccggggcgctgggcggtcaagccggcgatccgcagccgcgtcgagttccgtgccctgaacctgctggacagctacgccagcctcggcaagttcgacatggtgttctgccgcaacgtgctgatctatttctccgccgaggtgaagcgcgacatcctgctgcgcatccatggcacgctcaagcctggcggctacctgttcctcggcgcctccgaggcgttgaacaacctgcccgaccactaccagatggtgcagtgcagcccgggcatcatctaccgggccaagtag

SEQ ID NO: 319398 - DNA, 306 bp, Pseudomonas aeruginosa
atggccatcactgcgctgccctcggccgatgggcaagagttgaccatccagatccaggggcgcttcgacttcggggcccatcaggatttccgcgacgcctacgagcgcgtcgcgatcactccgcgacgctatgtcgtcgacctgcgcaacgccacttacctggacagctcggccctcggcatgctcctgctgctgcgcgaccacgccggcggcgagaacgcgcagatcagcctggcgaactgcagcccggaagtgcgcaagatcctcgccatctccaacttcgagcagttgttcaagatcagctga

SEQ ID NO: 319399 - DNA, 1716 bp, Pseudomonas aeruginosa
atgaatcccccggcggcgcggatcgagagcctgacgattctcatcgccgaggacaacgcggccgaccgcctgctgctgtcgaccatcgtcagccgccaggggcatcgcgtgctgaccgccggcaacggcctggaggcggtggcgctgttcgagaccgagcggccgcaactggtcctgatggacgtgataatgccggtgatggatggcttcgaggctgcccggcggatcaagcagcaggccggcgaggagttggtgccgatcatcttcctcacctccctcagcgaaaccgaggcgctggtgcagagcctggaggcgggcggcgacgacttcctctccaagccgtacaaccgggtgatcctcgaagccaagatcaacgccatgggacgcctgcacctgctgcaacgaacggtgctggagcagcgcgacctgatcgtccggcacaacgagcacctgctcaacgaacagcgggtggccaaggcggtgttcgacaaggtggcccattccggctgcctgaacgccagcaacgtgcgctacctgcaatcgcccctcgcgctgttcaacggcgacctgctgctggccgcctacaagccgtccggcggcatgcacgtgctgctcggcgacttcaccggccacggcctgccggcggcgatcggcgcgatgccgctggccgaggtgttctacgggatgaccgccaagggctatccgatggccgacatcctccgcgagatgaacgccaagctgaagcgcatcctgccggtcggcgtgttctgctgcgccaccttgctcaacctgagcttccagcgcgaactggtggaggtctggaacggcggcttgccggacggctacctgctgcgcgccgccagcggcgagcgggtcgccctggtgtcccgccacctgccgctgggaatcctcgaaccggcggcgttcagcgaccgttgcgaaacctatccgctggatatcgaagatcggatattcctgttttccgacggggtcctcgaggccagcaacaaggctggcgagatgttcggcgaggcgcggctgctccagctgttcgagcgcaatcgccagccgtccgcgctgttcgacgagatccagcgcagcctggcgcagttccgcggcgcggtgcaggacgacgtgagcatgctcgaagtgcggctgcagccggatagcggcctgcaatgcccgccgctggcgttttccgatagcggcgtgagcagtccgctggactggtcggtgagcttcgaattccgcgccgaaaccctcaagcatttcaacccgctgccccatgtgctgcaactgctgctcgaggtccacgacctgcgcgcgcgcggcggcgcgctgtatacggtactcgccgaactctattcgaacgccctggaacatggcgtcatcggcctcgattcgacgatgaagagcgacgcggcgggattcgcccgctattaccaggagcgggtcagccgcctgcaggccttgcgcgacggctacgtgcggctgcacctggacctggcgccgcatggcgcgggggggcgtctgctggtgcgggtcgaggacagcggcgaaggtttcgacgtggagcgcgcgctgaatgccgtggagcgccaggaacgcctctgcggcaggggtttgcgcctgatccgcgaattgtccgatcgttgccagtggtcggccgacggaaaggtggtgtccgtggagtttttctggtcgcctcaggcataa

SEQ ID NO: 319400 - DNA, 351 bp, Pseudomonas aeruginosa
atgtccgcgccgcatctcgatgatcgtgttctggcttcgctgcaggaggtcatggaggacgaatatccggtcctgctggataccttcgtgctcgactccgaggagcgcctgcgcagcctgcatgccgccctccaggccggcgatgcccaggctttgcggcataccgcacacagcttcaagggaggcagcagcaacatgggcgcggtactcctcgccggctactgcaaggagctggaggaaagcgccaggcgcggcgacctgcaacgggcgccggcgctgatcgaacagatggagcgcgaattcgccatcgtccgcatccttttcaaacaggaacgtcagcgctatcgctga

SEQ ID NO: 319401 - DNA, 2139 bp, Pseudomonas aeruginosa
atgcgcgagcaagccctacgcatcctcaaagacgttttcggttacgacgccttccgtggcaaccaggcacggatcatcgagcgggtggccgagggtggcgatgcgctggtactgatgcccaccggcggtggcaagtccctgtgtttccaggtcccggcgctgctgcgcgaaggcctgacggtggtggtgtcgccgctgatcgcgctgatggaggaccaggtcgccaccctggacgaactcggcgtgccggcggtggcgctgaactccaccctcaaccccgagcagcagcgggacatcgccgagcgcctgcagcgtggcgagatcaagctgctctacctggcaccggagcggttggtccagccgcgcatgctggccttcctgcaacgactgccggtcggcctgttcgccatcgacgaagcgcactgcgtgtcgcaatggggccatgacttccgtcccgaatacctgcagctcggccagcttgccgagctgttcccgcaggtgccgcggatcgccctgaccgccaccgcggacatgcgtacccgcgaggagatgatccagcgcctgcacctgcagaacgccgagcagttcctctccagcttcgaccggccgaacatcttctaccgcatcgtgcccaaggagcagccgcgcaagcagttgctcggcttcctctccgagcggcgcggcgatgccggcatcgtctactgcctgtcgcggaagaaggtcgaggaggtcgcggagttcctcggcaaccagggcttccccgcgctgccgtatcacgccggactgtccaacgaactgcgtgcccaccaccagaagcgcttcctcaacgaggaaggcttgatcatggtggcgaccatcgccttcggcatgggcatcgacaagcccaacgtgcgtttcgtcgcccacctcgacctgcccaagagcctcgaggcctattaccaggaaaccggccgcgccggccgcgatggcctgccggccgacgcctggatggcctacggcctgcaggacgtcctgctgctgcggcagatgatgcagagttccgagggcgacgagcggcacaagcgcgtcgagcggcacaagctggaagccatgctggcgctctgcgaggaaacccgttgccggcgccaggcgctgctggcctatttcgacgaggagatgccgcagccctgcgggcattgcgacaactgcgtggacggcgtggaaacctgggatgccaccgaatccgcgcgccaggcgctgtcggcgatctaccgcagcggccagcgctacggcgtcggccatctggtggatatcctgctcggccgcgagaccgagaagatccgcagtctcggccaccagcacctggcggtgttcgggattggcaaggggcgtggcgaagacgaatggcggaccctgttccgccagttggtcgcgcgcggcctggccgacgtcgacctggacggcttcggcggcctgcgcctgaccgaggcctgtcgtccgctgctgcggggcgaggtgcggctggagctgcgccgcgacctcaaaccacagcgcgccaagggctcctccagcggcggcgccagcgccgccagccaattggtgcgcagcgaagagcgggaaatgtgggaggccctgcgcgcgctgcggcgcaagctggccgaagagcattcggtgccgccctatgtgatcttccccgacgcgaccctgctggaaatgctccgcagccagccgcgctcgctatccgacatggcccaggtcagcggggtcggcgcgcgcaagctggagcgctacggccaggccttcctcgatgtcctcaccgactcgccggcggcgcccgccgcgccgccgcaggacctgcgccacgaattggccagcctggcctgtgcggggatgaccccggcgcagatagcccgccagctcaattgcagcgagaagaacgtctacgcgatgctcgccgaggccatcgccggtcagcaggtgagcctggagcaggcgctggatctgcccgaggaactcctcggcgaaatccaggacgccttcctcgaggaagacggcgaactgccgccggtggcggcgctggaggagcgtttcggcaagcgggtgccgagtggcgtgctgcactgcgtacgcgccgccctgcaggtggaactggagtcgtga

SEQ ID NO: 319402 - DNA, 1164 bp, Pseudomonas aeruginosa
gtgacacagaaggaccggttggacgactcccgttccaacctctatgccgaccaattgaaccgcggtttccgcggtctgcgtttccttcccgaactggagcgtgactaccggcgctacatgctggaggacagcttcgcgctgaaacgcatcgccctcagcgtcggcatgctcgtctggctggcgttcatcggcatcgacctgctgatcctcgctggtcccccgctgtggggcgtactggcggtgcgccttggcgtgctggtcctgctactggtctgcggctgcctgatcatgctgcgccggcacatccagctgatggtgccgctgagcatcgcctgcgtcctcgcccttggcgtcggtgcggcggcagtggtcggcctggcgcaccgggcggatcccggctatccctacgaaggcctgctgctggtcagtttcgccgcctatttcctcgccggcctgcggttgtcgcaggcattgagctgtgcgttggtcgtgctgctcgcctacctgggtttcgagtggtgggcgggtacccaggagccgctgggcaacaacctgctgttcctgctgttcggtaacctgatcggcgcggtcggctgctacctgctggagttcaagtcgcgcgagcatttcctcatcagccgcctgttgcgggtgatggccgaccacgacagcctgaccggcctgcacaaccggcgcagcttcaaccagcacctcgaccgcctctggcgccaggcccagcgcgaacagaagaccctggcgctgctgctttgcgacgtcgaccatttcaaggcctataacgaccgctacggacaccaggctggcgatgcggtcctgcagcgcatcggcgcggtgttcgaggcgaatgccaggcgtccgctggacatggcggtgcgcctgggcggcgaagagttcgccctgttgctgtacggcgccaacgagcacgaggcgaggctgcgcgcggaagcgctgcgcgcacaggtccaggcgctgcgcatggagcacgaggcgtcggacacggcgcgcgaagtgaccctgtcggtcggcgtgtcctgcctgtggccgaccccgggcaacgacctgaagcgtctctacgatctctacgagcatgccgatcgcgcgctttacgaagccaaggcgttcggccgcaaccaggtggtggcctga

SEQ ID NO: 319403 - DNA, 1017 bp, Pseudomonas aeruginosa
atgcagcgcttgatccaggccaacggccaaccgcactacggcatcttcccgagtgccccgcagcacatcaattaccgcgatttcgacttccgttcgccgatgggccggcgcgtgggggccctgggcaaatggcgacgcttccatcagttccagtactttggcctgatcagcccggagctgatcggcggctgcgccctggcccagctgagcttgcttggcgtcggcttcgtctacctctaccagccttccagcggacgcatgctggagcggcgcttcaagctgccgctggggttcggaacccggttttcccagaccccggacgacggcgtctgcgaactgcgccaggggcgcaacctgctacgcctggagaaccgtatggctcaccgggagaaacgcctgctggtggaactcgacgatggcacccgcatcgacgcctgcttcagcgaggaggcgccgagcttccagccgatgtgcctgtgtacgccgaccgcggtgaacggctgggtctacgcgcagaaggtggccggcgtgcgctgtcgcggcgacgtgcgcagcgccctcggcgaccacgacctgcaggcgctggacgccttcgcccatcacgactggtcggcgggctacatgcgcccggaaaccttctggaactgggcttgcctgtccggcgaggcggacggcttgcgggtcggcctgaacctgtcgtgcggggtcaacgagaccagcttcaccgagaactgctactggctggacggcgaactgctgaaggtcgacagcgtgcgcttcgacttcgaccgcgaccagccgctgcggccctggaccatccgttcatacgatggccaggtggagctgcgcttcgaggctcacggcatgcatcaggagcggctgaacctcggtctgctggcgagcaacttcaagcagatattcggttgtttcagcggtgtgctgcgtccgcgaggtcgtgccgaggtgaggatcgagcggctctggggcttcgtcgaggaccagtacgcgaagtggtag

SEQ ID NO: 319404 - DNA, 435 bp, Pseudomonas aeruginosa
atggctcagacagacaagcactatttcggcaccttgctagcccagacttcccgtgcttggcgcgctgaactcgaccgccgcctcagtcacctcggcctgtcccaggcgcgctggttggtgttgttgcatctggcgcgccatcgcgattcgcccacccagcgcgagttggcccaatcggtcggggtcgaaggcccgaccctggcgcggctgctcgacggcctcgagtcccagggcctggtacggcgcctggcggtggcggaggaccggcgggccaagcacatcgtgctgacgcccaaggccgatgtgctgatcgccgatatcgaggccatcgccgccagcgttcgcaacgacgtactgaccggcatcgacgagtccgagcaggcgctgtgccagcaggtgctcttgcgaatcctggcgaacctggaaaagcgctga

SEQ ID NO: 319405 - DNA, 2052 bp, Pseudomonas aeruginosa
atgcccggtaaagccttgcgtgtcatgttgtgtgcctggtcgtgcctgttggccgggcaggcgagcgccctgggagtgggagacatcaccctgcattcggcgctcaaccagccgctggatgcggatatcgaactgctcgacgtcggcgatctcggcgcggacgatatcgaggtccgcctggcgggcgccgacgtcttcgccgcggccggggtggaacgcttgcagttcctcaacgagctgcgtttcagtccggtgctccaggggcgcggtggcaatcgcatccatgtgtcctcgatccgaccggtgcaggagccctacctgaatttcctggtggaggtggcccgccccaacggccgcatcgtgcgcgaattcaccgtactgctcgatccgctcggttatacgccgcgcatgcttccggccgcgcgcagcgggatcgagccgcagcggcaatcctcgacgccggtgcctgcgccgcgtagtgccgcggtcgtcgtagacccggcactgctggagccgggcgacgaatacctggctcgccccagcgacaacctctgggccatcagcggacgcctgcgtggtgccggcaacgccgatcgcgcgcaactcatggaggccctgtaccagctcaatccgcaggccttcgtcaatgccgaccggcaccggctcaaggccggcgcgcgcctgcgcctgccggccggctaccagccggagcgaggcgcgcccggcgccgtgaaggaggcggccgtggaagtcctgccgccagccgatgccgccgtggtggaaaacgctccggcggctctcgtcgaggcgcagcgccaggcggatgccgaggccgaggcgttggcccggcaacgggaggaactgagccagcggatggacgatctgcaacgccagttgcaggccttgcaggaacaactgcagcagcgcgatcaccaggtcgccgaactgcaacagcaactggcccggcgccaggcggtgcggcccgcggcgccgccgcccgccgcggccgcgccttcggttgcgcaaccggttgaaacgccgacggactcgcagtactggcgctggatgatcgtcctgctgctggtcctcgctctgctcggcgtgttgctgttgcgtcgccgccgcgaagaggctcctgtcccggcggtcgaaccgaagcgccgggtcgccctgaacctgccgctgcggcgtgcgccgcgctccccggcggccgcaccggcgccggcaaaggtcgaggaacaggccaggccgccggtcgccgctccctccagcccgccgccgtctcctccgcctgctccggccgccgctccgcgcgccgccatggctgcggcggacaagctggacggcgccgacatctatatcgcctacggtcgctacggacaggcccgcgacctgctgcgtcaggtactcgccgagcagccgcagcgcctgagcgcgcggatgaagctgttgctggtgctggctgagctgggcgatgcggccggcttcgacgcgctggccgaggaaaccctggccagtggcggcaacccggaggccatcgacgagttgcgcggacgctacccagcgctgctacagatgccggcgaccgagacgccggcggcaacaaccaaggacgacgactggagcgacctgccgctggccgagcctcccgttttgcagcaaccggatgcgacctcgggcgccgacggcttcggcgacctcaacctcgatctcgatctcgactggggcgccctggagaatcccctggacaaccccgacctgccgcgccgcgccgctgccggcaaggcggaaccggcggaggaggagcccctggcgttcgagagcaatctccatgaactgccggatgtcgccgagtacgaacacctcgaactcgaccagccagagccggccacggtgccgccggaggaggcctcggccagcctggaccgggcccgcgcctgcatcgacagcggcgatctcgaccaggccagccgcatcctgcgcctggtggtggcgcacggcgacccgtggcagaaggccgaggcgcgcgagttgctggcgctgatcgcctga

SEQ ID NO: 319406 - DNA, 2187 bp, Pseudomonas aeruginosa
atgcgccgcctgctgctcgtactgctgctcctgcttcccctgtccgccctcgccgcggaggcccggccgaagatcggtctggtcctctccggcggtgccgcccgcggcctggcccatatcggcgtgctcaaggccctcgacgaacagggcatccagatcgacgccatcgccggcaccagcatgggcgcggtggtcggcggcctgtacgcctccggctacacccccgccgaactggagcgcatcgccctggagatggactggcagcaggcgctgtccgacgcgccgccgcgcaaggacgtgccgttccggcgcaagcaggacgaccgcgacttcctggtcaagcagaagatcagcttccgcgacgacggcaccctcggcctgccgctgggggtgatccagggccagaacctggcgatggtgctggaaagcctgctggtgcacaccagcgacaaccgcgacttcgacaagctggcgatccccttccgcgccgtctccaccgatatcgcaaccggcgagaaagtggtgttccgcaagggccacctgccccaggcgatccgcgccagcatgtcgatccccgccgtgttcgccccggtggagatcgacggcaggctgctggtggatggtggcatggtcgacaacatcccggtggacgtggcgcgcgacatgggcgtggacgtggtgatcgtggtcgacatcggcaacccgctgcgcgaccgcaaggacctgagcaccgtgctcgacgtgatgaaccagtcgatcaccctgatgacccggaagaactccgaagcccagctggccacgctcaagcccggcgacgtgctgatccagccgccgctttccggctacggcaccaccgacttcggccgcgtgccgcaactgatcgacgccggctaccgcgccaccacggtgctcgccgcgcgcctcgccgagttgcgcaagccgaaggacctcaacagcgaagcgctcgacgtggcgcgcacgccgaaccagcgcaagccggtgatcgacgcgatccgcgtggagaacaactcgaaggtcagcgacgaggtgatccgccactacatccgccagccgctcggcacgcgcctcgacctcggccgcctgcaggacgacatgagcaccctctacggcctcgactacttcgaccaggtgcagtaccgggtggtcaaggagaagaagctcaacaccctggtgatccacgccaccggcaagaaaggcggcaccgacttccttcgcctgggcctcaacctgtccgacgacatgcgcggcgaaagcaccttcaacctcggcggcagctaccgcatgaacggcctcaaccggctcggcgccgagtggctgacccgggtccagctcggcgaccgccaggaactctacagcgagttctaccagccgctcgacgtcggctcgcgctacttcgtcgcgcccttcctgttccacgaggcacagaacgtcgacgtcaccgaggacaacgacccgctgctgcgctatcgcctggagcgctacggctacggcctcaacgtcggccggcagatcgccaacaacggcgaaatccgcctgggcgcggtgcaggcctacggcaaggccgacgtgcgcatcggcgacccgagcctgccggacatcgacttcaccgagggctactacgaactgaagtactcgttcgataccgtcgacgacgtcaatttcccccacgagggcgaggagatcggcctgaccatgcgccgctacgacaagtccctcggctcggacgacagctaccggcagtgggacctgcggctgaacaaggcgctcagcttcggcgccgacacctgggtgttcggcggcggctacgggcgcaccctggacgacgccgaggtggtcacctccagcttcaccctcggcggcgcccgcgagctgtcgggcttccgccgcgacgcgctgtccgggcagaactacagcctgggacggatcgtctattaccggcgcctcaccgaacgttccttcctgccgctggacttcccgctgtacctgggcggcagcatcgagcgcggacgcatctggaacaacgacaacgaatacgacagcggctacatcaacgccgccagcctgatgatcggcttcgatacgccgctggggccgctgaccttcagctacgggatcaacgacgagaacttcaaggcgttctacctgaacctcgggcagaacttctga

SEQ ID NO: 319407 - DNA, 291 bp, Pseudomonas aeruginosa
atgcccaccgccaagcccgaaatcgtcatcacctattgcacccagtgccagtggctgctgcgtgccgcctggctggcccaggaactgctcagcaccttcgccgacgatctcggaaaagtctgcctggagcccggaaccggtggcgtcttccgcatcacctgcgacggcgtgcaggtctgggagcgcaaggccgacggcggcttccccgaggccaaggcgctcaagcagcgggttcgtgaccgcatcgacccgcaacgcgacctcggtcacaacgatcgtccttcccgctga

SEQ ID NO: 319408 - DNA, 993 bp, Pseudomonas aeruginosa
atgagcatcatcgtcaccggcgccgccggcttcatcggcagcaatctgctgcaggcgctgaaccggcgcggcgagaccgacatcatcgcggtggacgatctcaccgacggcgagcagttccgcaacctggcggacgccgatatcgccgactacctggaccagaacgacttcctcgagcgttacgcccgcggcgacttcggcacggtccgcgcgctgttccaccagggcgcctgcgccagcaccctggaaagcaatggccgctacatgatggagaacaactaccgctacagttgccgcctgctggaaagcagcctggaactcggcgtgccgttcctctacgcctcgtcggcggcggtctacggcgccggccggaccttccgcgaggcgcgccagtacgagcggccgctgaacgtctacggctattccaagttcctcttcgaccagcgtgtgcggcgggcgctgccgcaggcgcgcagccaggtggtcggcctgcgttacttcaacgtctacgggccgcgcgaggaacacaaggggcggatggcctcggtggcctaccactgctaccagcaattgcgccgcgacgggcgggtcgaactgttcggcgaacacggcggcttcccgcccggcggccacctgcgcgacttcgtcgcggtggaggacgtggcgcgggtaaacctgcatttcttcgaccatccgcagcgttcgggaatcttcaacctcggcagcggccaggcacggaccttcaacgaggtcgccctggcggtgatcaatagcgtccgcgccaacgccgaccagccgcccctgtcgctgcaacaggccgtggaaagcggcctgctcggctaccgcgagttccccgagtcgctgcgggcgcgctaccagagccatacctgcgccgacctggagctgctgcgcgaggcgggctaccgcgacgatttccagagcctggaagagggcgtcgccggctactgccgctggctggcgcgcagcgcctga

SEQ ID NO: 319409 - DNA, 1167 bp, Pseudomonas aeruginosa
atgcctttgattgtctacgtgctcggtgccgcgatcttcgccctgaccaccagcgaatacatggttgccgggctgatgccggcgctggccgccgaattcggcgtgtccttcgccgcgatcggctacctggtcaccttctacgccggtgcgatggccgtcggcggcccgctgttgaccaccgccctgctccgggtgccgcgcaagaacgccctgctcggcctgatcgcgctgttcgtggtcggccaggtcatcggcgccctggcgccgggctatgcggtgatggtcgcggcgcgactggtcaccgcggtcgccgccgcggccttcttcggcgtggcgctgaccgcctgcgccgaactggtcgaaggcaaccagttcggccgcgcgtcgtcgctggtgctcggtggcctgatggtcggcaccgtgctcggcctgcccgtcgccacctggctgggcgaatggtacggctggcgcgcgagcttcttcgcggtggcgctggtggcggtgctggtcggcctgctggtgttgcagctgatgccggcgatcccggggtcggcgggcagcggctcgctgcgcgaggaactgaaggtgttcaggaacgcccatctatggtgggtctacgccaccagcctgctgctgatcggcgccaccttcgccggcttcacctatttcgtgccgatcctcaccgaggtcagcggcttctccgcctcgaccgtaccgctgctgctggtggtctacggcctggcgacgctggtgggcaacaacatcgtcggccgcctggccgaccgccataccatcgcggtcctggccttcggcctgctggcggccatcgccgcgatggtggccttcgccctgttcggacaggttccggcggtggcggtggcggcgctggtggtgatcggcctgaccggggtgtcgatgaacccggcgctggtgacccgcggcgcacgggtcggccataacaacatgctggtcaactcggtgcacactgcctgcatcatgctcggcgtgatggccggttcctggatcggcggcctgggcatcgccggcggattcggcctgcagggcgcgctctgggtcggcgcggccctcggagtactggcgctgctgaccctgctgccggagctgcgcttcgcccgcgccccggtaggcggggcactgggccgctga

SEQ ID NO: 319410 - DNA, 753 bp, Pseudomonas aeruginosa
gtgagtcagaacatggatctcacgatcgggacgcatcgggagtcggctttctacgagctggagttcggaccgaggacgataatgaccctggccaactttccggacgacgtgctgccgttgttgcaaatggaaagcctgatgaccttcgaggcgatggcctacctgcgctgcgacgcactggtcgagctaggctgctacgacggccgggcgctggaaatcgcgcgcctgctcaatgcccgctatctcggcgtcgaccttgaccagcgggcgatcgagacgctgcgcacgcggatcgagcgcgagggcatgagcgatcgcgcggacacggtggtcgacgacatcctcaaccacaccaggcgcggtgcctcggtcggctcgcgcgcgctgtacctgctgccgttcaacctgctgggcaacttccgcgagccgaaacggctgctcgactccctcgccgagcgcagcgtggcggcggtggtctcggtgttcggcgacagcgccgaggccacccgcgtccgccagagctactaccgccgttgcggggtgcagggcctggagttgcacacgcgggacgacggcaccgtgttcaccggcagcgacggcttctactcgcgctcgtattcacgcgcctgcctccacgccctgctcgccgagtgcgggctgaccgtggtgcgcagcgcttcgaatctattcgcccactgcgtgacggtgctgcccgaaggcgccgaccagggcttcggttcgtcggcggcatga

SEQ ID NO: 319411 - DNA, 240 bp, Pseudomonas aeruginosa
atgcccaacgacatggaagaccatctcctcaccgtgctcagcgtcgccagcggcgtgccgaaggaggaaatcagccgggacagcaggatggaagacctggctttcgattcgctggtggtcagcgagctgtcgctgaagctgcgcaaggagttcggcgtcaccggggtcgacgacgaactcgacctgctggaaacggtggacgaactgttccagctggtcgagaagcaccgcgccgcctga

SEQ ID NO: 319412 - DNA, 993 bp, Pseudomonas aeruginosa
atgccgcgcgccgccgtggtctgcggcctgggcagctacctgcccgaggccgtgctcagcaacgacatgctcgccgccgagctggacacttccgacgcctggatcagcagccgcaccggcgtgcgccagcggcatatcgccggcgacctcggcagcggcgacctggccctgcgggcggcctccgccgcgctcgcctcggcggggctggagcgagtcgatgcggtggtgctggcaaccagcaccggcgacttctgctgcccggccaccgcgcccagggtcgcggcgcgcctggggttggtcggcgcgctcgcgttcgacctgtccgccgcctgcaccggcttcgtctacggcctggccagcgtcggctcgctgatcagcgccgggctggcggacagcgcgctgctggtcggggtggacactttcagccataccctcgaccccgccgatcgctcgacccgcgcactgttcggcgacggcgccggagcggtggtgctgcgtgccggcgatgccgaggaagaaggcgcgctgctggccttcgacctcggcagcgacggccaccagttcgacctgctgatgacccccgccgtcagtcgcgccgaacgcagttccggacaggcctccaactacttccggatggacggcaaggcagtgttcggccaggcggtgacgcagatgagcgactcggtgcggcgggtgctcgaccgggtcggctggcaagcttcggacctccatcacctggtcccgcaccaggccaacacacgcattctcgcggcggtcgccgaccagctcgaccttcccgtcgagcgagtggtgagcaacatcgccgaggtgggcaataccgtcgccgcctcgattcccctggccctggcccacggcctgcgccaaggcatcctgcgcgacggcggcaacatggtcctcaccggtttcggtgccggactgacctggggttcggtcgccctgcgctggccgaagatcgttccgacaatggactga

SEQ ID NO: 319413 - DNA, 426 bp, Pseudomonas aeruginosa
atgaatgccaaggaaattcttgtccacagcctgcgcctcctggaaaacggcgatgcccgtggctggtgcgacctgttccatccggaaggcgtactcgaattcccctacgccccgccgggctggaagacccgcttcgagggccgcgaaaccatctgggcgcacatgcgcctgtttcccgagcacctgaccgtgcgcttcaccgacgtgcagttctacgagaccgccgaccccgacctggccatcggcgaattccatggcgacggcgtggccaccgtttccggcggcaagctggcgcaggactacatctcggtgctgcgcacccgcgacggacagatcctgctctaccgcgacttctggaatccgctgcggcacctcgaggccctgggcggggtcgaggccgccgccaagatcgtccagggagcctga

SEQ ID NO: 319414 - DNA, 1257 bp, Pseudomonas aeruginosa
gtgcctgatcgcaaactgagactgggcgaggaactgatctcgccactgcacgcgctctacgacggcctgcaggtggacggcgcgccgcgtcccgcgcatcgcgccgccgagcatccggtgtgggtggtgacgcgctaccgcgacgcgcgcaaggtcctcaaccatccgggcgtccgccgcgacgcccggcaggccgccgaactctacgcgaagcgtaccggcagcccgcgcgcggggatcggtgagggactcagccaccacatgctcaacctcgacccgccggaccatacccgcctgcgctcgctggtcggccgcgcgttcaccccgcgccaggtggagcgcctgcaaccgcatatagaacggatcaccgaggaattgctggacgccatggccggccgcgaacaggccgacctgatggccgacttcgcgatcccgctgaccatcgcggtgatcttcgagctgctgggcattcccgaggccgagcgcgaacacgcccgccagtcctgggagcgccaggcggaactgctgtcgccggaggaggcccaggccctggccgatgcgcaggtcgactacctgcgcgtgctgctcgaggccaagcgccggcagccagccgacgacgtctacagcgggctggtgcaggccgccgacgagagcggccaactgagcgaggcggaactcgtctccatggcccacctgctgatgatgagcggcttcgagaccaccatgaacatgatcggcaacgcgctggtcaccctgctggtcaacccggagcaactggcgttgctgcgggcgcagccggaactcctgcccaacgccatggaagaactggtccgccacgacagcccggtgcgcgcctcgatgttgcgcttcaccgtggaagacgtggaactggacggggtcaccattcccgccggcgaatacatcctggtctccaacctgaccgccaaccacgacgccgagcgcttcgacgatcccgaccgcctcgacctcacccgcaacaccgatggccatctcggctacggcttcggcgtgcactactgcgtcggcgcctcgctggcccggctggaggggcggatcgccatccagcgcctgctcgcgcgcttccccgacctccagttggcggtgccccacgcggagctgcaatggctgccgatcaccttcctccgcgccctgatcagcgtgccggtgcgcaccggatgcagcgccccggcgaacaccgcttcccacgccaacccgatcgagaggatcgcccaatga

SEQ ID NO: 319415 - DNA, 915 bp, Pseudomonas aeruginosa
atgtttttcaccagcaaacctctctcgccccagggccgccacgtgctgatcaccggcgcctccagcggcctcggccgggaaaccgcgctgcacctggccgaacagggtttccaggtgatcgccggggtgcgccgccaggaggatggcgagcgcctggcgaacgcctgcccgtccggccggatcagcacgctgctgatcgatgtcaccgacgaggaatccattggccgggccgccgcgcaggtggcggagaaagtcggcgataccgggctctggggcctggtgaacaacgccgggatctgcatttccgcgccgctggaatgcgtctccagcgacctgctgcggcgccagctggaagtcaacctgatcggccagctcgcggtgacccgggcgatcctgccgctgctgcgccgtggcggcgcggcgcgcctggtgaacgtcacctcgggcctcggctcggtcgccattccctacctgggcgcctactccgccgcgcagttcgccaaggagggagtgagcgacgccctgcgccgcgagctggcgcccatgggcatccaggtctcggtggtcagccccggggcgatctggacgccgatctggggcaagatcgccagcgagggcgagcgcgccctggccgacgcccccgacgccgtcgccgacctctatcgcgatacctacctgcgcttcctccaggccaacgaggacggcgcgcgcaacagcgcgaccaagcccgccgacgtcgccgccgcggtgcatgccgcgctcaccgcggccaagccgcggacccgctaccgggtcggcgccgacgtgcgccgcggcaccctgctggcgcggctgctgcccgatagcgtgatcgacgggatgttccgccccatcgtcaccgccgccccggcggcgaaggaggagcaacgtgcctga

SEQ ID NO: 319416 - DNA, 1326 bp, Pseudomonas aeruginosa
atggccgagatacgacgcccgctgtccgcggtggaacgctggtactggctcagcgaccagttctccgcgctgaacgtgatttcccgggtgcgggtccatggccggttgtccatcgacgacctgcgccgcggcctcgacgcgctgcaggcgcggcatccgctgctgcgcgcgcggatcgagcacgatgccgggctcgatccgcgctgggtgccctgcgagcggcccatcccgctgcgcgaggtgcgcggcggcggcgaggagcaatggctgcgggaaatcaacgagcgcgaattgccggaacgcatcgatccggacagcgggccactgatccgtaccgtggcgatcgccaccgacgccggcgcccacgacctgctggtcgtggtaccgcacatcatcgccgacggcactaccgtgctgaccctcgccgaacaatggctgaccctggccgccgaccctgccgcgcaaccctggaccgccagcgccctgccgccggcggaggatctgcgtccgcgccgcttcaccggcgacgaaggcgcggcgcgcctggccgagcagaccgcccaggacgaagcgctggtcggtcgccaccgcccgggccggatcgagccgagcaacccggtgccgctggaagcgcggcgtacccgcctgctgcaccgggagctggacggcgcgcagctggaacagctgcaacgacgcgcccgcgaacacggcaccacggtacacggcgcgctgaccgcggcgctggccatcgccgccggccacgaccaccagcgccgccctagccacatcgccatcggctcgccgatcgacttccgcgacgaactggagccgccggtgcgccccgacgaagtaggcacctacgtcgccacggtaccggtggtgctggacatcgcccggccgttctgggaggtcgcccgcgcgctcaccgacgacctcggcgaacgccgtcgccagggccatcatttcaacctggtcaccctggtcgccagcgctgcgccgcgctgcatggccgacgcgcggccattcatggccttcatggaagccgaagggccgatcaacctgtgctcctccaacatcggtcgctatccgttccccgagcggatcggcgccttgcgcctctccgacgcgcagttcctcaccggcatctcggtgaacggctacttcgtggccgccatcaactccagccatggccggctgttctggaacttcacctatatcgacgaagcggtccccggcgaacgcgccgaacgcctggccgaagattgcctgggcaccctgctgtcggcgatccacgccccccaacgatccgccctcgaggagcaatga

SEQ ID NO: 319417 - DNA, 1167 bp, Pseudomonas aeruginosa
atgagcagacaccccctgaagatcgtcatcgccggcgccggcatcggcgggctcgccgcggccgcctgcctgaaggccgccggcttcgaggtcgaactctacgagcgggccagggagctgcgcgcggtcggctcggcgctgtcgctgatgcccaacgcgctgaccgccctggagagggtcggcgtgcgccctgaccttacccgcgcccaggccttcgactcgctgcggttcctcacccggcgcgggcgaccgatccgcgccatcgacttcggcggcctggcccgtcagctcggccagccgagcctggcgatccaccgcgcgagcctgcagcaggcgctgctggaacaggcccgcgactgccgtatcgaactgggcgtgagcgccaccggctacctgcgccacgccgacggcgaaggcgtcaccgtgctctgcagcgacggccgcgaagtgcacgccgacgtgctgatcggcgccgacggcttcaactcggcgatccgcgccaccatgaccggcccggagcgtcccaccgactggcactacgtgatctggcgcgccacgccggcgttccgccatccgaaggtgacgccgggctacgtcgcccattactggggccgtgggcagcgcttcggtctcgccgacatcggcgaaggcaacgtctattggtggggcacccgcaacatgccggccgaacaggcgaaggactggcgcggcggcaaggcgggcatccagcgcctctacgccggctgggccgacgaagtgcaggcggtcatcgaggcgaccccggaggccgacatcagcagcctgccggcccaggaccgaccgttcctggagcgctggggcgacggcccggtgaccctgctcggcgatgccgcgcatccgatgctgaccagcctcggccagggcgccgccatcgccatcgaagacgccgcggtgctggcccactgcctggccaccatcgacgacccgcaagccgccctgcgcgcctacgagaaccgccgtcgcgaccgcgccagggcgatggtcgagacctcgcgggcgctgagccgcatcgagcagttggagcatccgctacgcaccgtcgcccgcgatctctacttccgcttcgctccggagcgaaccttcgcccggcagaacgaactggcactgaccttcccaggagtcgaatga

SEQ ID NO: 319418 - DNA, 7059 bp, Pseudomonas aeruginosa
atggttcgtttcgctcgcttgccgctatcgccctaccaacgggacatctgggtcgccgccgcgcagtttccggaactcgaccagtacaccatcttcagctacgaccgcttcactggcgaggttgatacccaggccctggaacgggcgctgctgcaggcggcgcgagacaccgaggcgttccgcctgcgcctcggcgagacggacggtacgccgtaccagtggctggacgcggatgccgagttcgaggcgcgccacgtcgacctgcgcgccgaccgcgaccccgaggccgccgtgcgatcctggctgcgcgacgccttccgccacgcctacccgctggacggccgcagcctggtggacctggccctgctgcatagcgaccaggcgctctacgtctacgtgcgcacccaccatatcgtcagcgacgcctggggcctgcagctattcctcagccgggtgcgcgccggctacctgggcgagctaggcgagccacaggcgcagatgccgacggcttccctcctggcgcagatcgagaccgacgactactccggttcggaacagtaccgcggcgaccgcgcctatttcgccgaggccctggagggcctggagccggccctcttcacccgcaggcgcccggccgggctgcgccgcaccgcgcgccacaggctgacgctggaacgcacactgctcgatgcgatccgcgatcgtggcgaatcgcccttcctgttcctctccgccgccgtggcgctgtacctggcgcggatccaccagaacgacgacgtggtcctcggcgtaccggtgttgaaccgcgccgaccgcgcggccaagcaagtggtcgggcacttcgccaataccctgccgctacgcatccgcaccgcgccggaacagaccgtcgacgaattcctggcgcagttgcgcgaggcgacccggacgctgctgcgccaccagaagatgcccctcggcgacctgttgcgcggcgcctcgccactgttcgacaccaccctttcctacatgcgctggcccgccgcccaggcgatcccgaacgccagcgtcgagaccgtggcgcaaacccacgcccatgacccggacgcgctggccatctgggtctccgagttcgacgggcacagcgacgcgcaggtggatttcgaatacgcctgcgatgtgttcgacgccgacttccccatggacgccgcggcgcggcatatcgaaaccttcctgcgcgccctggtggagggcggcgagcgccgcctcggcgaactcgatccgctgtcggccgccgagcgcgaggaactgatccacacccgcaacgccaccgaccaggcattccccgagcaggctaccctgcccacgctgttcgccgagcaggtggcgcgcaccccgcaacgcaccgcgctgctggaagccgacggcggcacgctcagctatgccgagctggacgccaaggtccaggccgtggccgacgccctgcgcgcagcgggtgtgaggaccgacgagcgggtagcgctactggtcgcccgcggtccccacctgctgccggcgatccttggcgtgcagcgcgccggcggcgcctatgtgccgatcaatcccgaccatcccctggagcgcgtccgcctgctgttggaagactgcggtgcccgcgtggtgctggtggacgagcgcgcagcgacactcggcgagagcctcggcgagacgcgcgtgctgcacctcgaacgcctgccgcagagcaccggcgacctgccggcggccaacgtggcgcccggcgacctggcctatgtcatctatacctccggttcgaccggcatgcccaagggcgtcatggtcgagcaccgctcggtggtcaaccgcctgaactggatgcagcgtcgttatccgatcggcgaacgcgacgtgcttctgcaaaagactccggtgacgttcgacgtgtccgtctgggaactgttctggtggagtttcaccggcgcccgcctgtcgctgttgccgcccggcgccgagaaggacccgcgggaaatgctgcggagcatccagcgcgacgcggtcacggtcatccacttcgtgccgtcgatgctgacgccgttcctcgacctgctcgacggcgacccgaccgcccgcgcggcggcaagctcgctgcgcctggtgttctgcagcggcgaagccctcgcgccgttgcaggtcacgcgcttccgccggctgttcggcgacgccgtgcgactggtcaacctgtacggaccgaccgaggccaccgtcgacgtgtccgaccatgaatgcgccagcgacaaccccacgcgggtcccgatcggccggccgatcgacaacctgcgcctgtacgtcctcgaccgcgcgctcaggccgcagcccctcggtgccgtcggcgagctatatataggaggcgtcggcgtcgcccgcggctacctgaaccggccggagctgaacgccgagcgcttcctcgtcgaccccttcgtcgccggcggccgtctctaccgtaccggcgacctggcccgctggctggccgacggcaacctcgaatacctcggccgcgccgacgaccaggtgaagatccgcggcaaccgggtcgaacccgacgaagtacgcgaccgcctcgccgcgcttcccggcgtacgcgacgccgcggtcgtggcacgcgattcggcggtacgcggcacgcacctggtcggctactacgtggctgcggcggaactcgaccccggtcaattgcgcgccggactttcggcgacgctgccggacttcatgctgccagccttcttcgtgcgcatcgacagcctcccgctcagcgccaacggcaagctcgaccgccggcaactgccggcaccgccggaacaggtggcggcggttgcgccgcgcacggcgaccgaggccgaactggcggcggtgtgggccgatgtcctcggcgtggcggaggtcggcgtgcacgacgacttctacgccctcggcggcgactcgatcctgatgctgcgcatccgcgccgccgcacagcggcgcggcctgggcttcgaactcgccgacctgatgcgcaacccgacggtggcgggcctcgccgagcgcctggtgcgtccgctcgcggagcgaagctaccagcccttcgaactggtttccgaagtcgacaagccgcgcctggaagggctggaggacgccttcccgaccagccggctgagtctcggcctgctcttccatagccgccagcgccccgactcgtcggtctaccacgacgtgttccactaccgcttcgacctggcctgggacgaagccgcgttccgccacgcgctggaccgggtggtcgccgcctatcccgcgctgcgttcgtcgttcgacctcagcggtgcatccgaaccgctgcaactggtgcatgcccaggcgcgcagcgaaccgctgatcctggacctgcgcggcaacccggaggccgggacggtgctcgacgagcacatccgccaacgccgcttccatcgctattcgctgcaacagcccgggctgttcctgttcgccgcgttcgtccgcgaggacggcctggacctggtgttcagcttccaccatgcgatcctcgacggctggagcgtggccaacctgatcgtcgcgctggtcgccgcctaccgtggcgagccgctgccgggccccgcgccggcgctggcctgccatgtccgcgaggagctggccgcgctggcttcgccggccgccgtggggtactggaccgggctgctggagggcgcgaggatgacccgcctcgacggcttcggcgcccacgagccgcaagccgcgcaaggtccggccagccatcgcgaagcgctgccggacgggctgctcgaacgactcaaggccactgcggcgcaacgcggactgccgttgaaatcgctgctgctcgccgcccattgcctgaccctgcatctgttctcccgcagcgacagcgtggtcaccggcgcgatcagcaacggccgccccgaactgcccgacgccgaccgcatggtcggcctgttcctgaataccgtgccggtccgctcggagattgccgggcatagctggatcgaggtagccgatgcactgttccgccaggagcgcgacggacacgcccatcgccgctatccgctcagcgccatccagcagatcgtcggcgacgaactgagcagcgccttcaactacgtcaacctgcatgtcctcgaaccgctgtggcaactgcgcgacttccgcgtctgggaagaaaccaacttcgccctgctggtcaacgtgatcgccacgcccagcgacggcatgtacctgcgcatcgacagcgacggccgcggcatcagccgcagccaggccgcgctgatcggcgcgaccttcgtcgagctcctgtggcgcctcgccgagcatcccgacgaagccgccgacttcgccttcctcgcccctcgccgcgacgccgcttcccagcccgagccgctggtcgacgtcgtcagcctgttcgaacgccaggtcgaggcgctgccgggcagcgccgcgctggccttcgaggagcaacgctggacctatcgcgacctcgaccatgtggcgcgctgcgtggccacccgcctggtccgcgccggcgcgcgccgcggcgatgcgatcggagtggcgctgaaccgttcgccggagatgatcgcgacgatctggggcatcctgcgcgccggcctggtctgcgtgccgctggacgtcagctatcccgcgcagcgcctggcgctgatcctggagaccgcacagccgttccgggtggtcgcgcatcccgagcacgcccatgtcgccgcggcggaacgggtgctgccggtagaggaactggtcgccgacatcgagcccgaaaccttcgccgcgccgcagctcgacgagctggccatgctgctgttcacctccggttccaccgggcggccgaagggcgtcgagcttagccatcggatgtgggccaactacacccagtggcaattgcgcgtcgccagcggcgtaccggggctgcgcaccctgcagttcgcgccgctgagcttcgacatggccttccaggagatcttctccacgctgtgcggcggcggcgagctgcaactcatctccaaccgcgagcggatggacccctccgcgctgctgcatgtcctcgaacgccgccaggtccagcgcgtgctgttgcccttcgtcgccctgcaacgcctcgccgaggcctccaacgcactgggcgtgcgccccggcgccctgcgcgtggtggtgtcctccggcgagcagttgcgcatcaccgaagacgtccgcgcgttctgcgcggcgatgcccgggctgctgctggagaaccagtacggccccaccgagacgcaccaggtcacctaccactcgctgagcggcgacccggcgcactacccggacctgccgccgatcggccggccgctggacggggtcgaggtgcaggtgctcgacgccgcgctgcgcccggtaccggtcggcgttaccggcgagctgtacttcggcggcgactgcctcgcgcgcggctaccaccgcgcccccgaactcaccgccgagcgcttcgtcgaacatccctggcgccccggcgccaggctctaccgcaccggcgacctcgggcgcatcctcggcaacggcgagatcgtctggctcggccgcgccgatacccaggtcaaggtccgcggcttccgcatcgagccggccgaggtcgagctggcgatcatgcgccaggccgagcgccagccgggcctgcgcggcgcggcggtggtggctcgcgagcgccagggcaacgatgcattcctcgctgccttcctgctcggcgagcccgaggcggtggatctcgccgaactgaagcaggcactgcgcagcgaactgccggaacacatggtgccggcacacttcgcctgggtcgacggcttcgccctcacccccagcggcaagcgcgacgacgccgccctgcgcgcactgccgctggagcacgggacgaacatcgagtacctggccccgcgcgacgactacgagcgcaccctggccggactcctcggcgagttgctggatcgtccccgggtaggcatccgcgacagcttcttcgacctcggcggcacctcgctcagcgcgatgcgcttcatgctgctgatcgagaagcgctatggcgtcgacttgccgatggccgcgctgatcgagacgccgaccgtggagggcctggccgaacgcctgcgggaacgctcggcggtgcgcgccttcgacccgctggtaccgatccgtgccggcggcagccgcccgccactgttcctcgtccacccgctcggcggccacgtgctctgctacctgccgctggtccgcgcactgccgccggaccagccggtatatgccctgcaggcggccggcaccggccagggcagtacgccgctggcggtcctcgaggacatcgccgccagttacctcgcggcgatccgccgggtgcagccggaaggcccctattacctcggcggctggtcgttcggcggcttcgtcgcctacgagatggcccggcaactgcgcgcgctcgacccgcaggcggtcgcccaactgatcgtgctcgactccatcaccgtcgaccgcaaccacgccggcagcgccagcgacgaagccctgctgctgttcttctactgggaactggtctggttcgagcgcagcgacgaggaggtcgagccgctgcctgaaggcgcgagcctggagcagaagctcgaccacatcgtcgaacgcgccatcgaggccggcgtacttcccgccggcaccccgcgcgccaccgtgcagcggctctacgagctgttccgggcgagctggcaggcactcatcggctatcgcccggaagtcagcgaccaggacatgaccctgctgcgcgcggacggcccgctgccgctggcgctgaagccgatgcacgacgccgccggcacccactacggcgacccgaagaacggctggcagcactggaccagtggccgcctcgatgtgatcgacgtccccggcgaccacctggtgctgatgaaagaaccctatgtcgagacggtcgcggcagagatcgccgcgttgctcgaaccctccacctccagcgaacggacccgcccatga

SEQ ID NO: 319419 - DNA, 606 bp, Pseudomonas aeruginosa
atgaaaaccgatgacaaggaccgcgaaggcggcgactcccacggcgccatcggcgccaagctgatggagtacgcgctcaaggtcaggaaggtgttcgtcaccggcggggtcgacgagaagatggccaaggacgtcgtccagcagctgcacatcctcgcctcgatcagcgacgatccgatctacatgttcgtcaattccccgggtggccacgtcgaatccggcgacatgatcttcgacgcgatccgcttcatcacaccgaaggtcatcatgatcggttccggcagcgttgccagcgccggcgcgctgatctatgccgcggcggacaaggaaaaccgctattcgctgcccaatacccgcttcctcctgcaccagccgtcgggcggcatccaggggccggcgagcaacatcgagatctaccgccgcgagatcgtgcggatgaaggaacgcctcgaccggatcttcgccgaagccaccgggcagacgccggaaaagatcagcgccgacaccgagcgcgacttctggctgaacgcggaggaggccgtgcagtacggcctggtcaataagatcatcgtttcggaacgggagatcacgctgcctggccagtga

SEQ ID NO: 319420 - DNA, 888 bp, Pseudomonas aeruginosa
atgagcgaattccaccacaagctggtccagcgcaaggtccgcttcgacttcagcgatacccccctgcactgggttcccggcgaagcggaagcgtcccaggtgatgaacgtcctgcacatgctcctgccttccggcgaactgtggttctgccgcctctacaacaaggccctgccgctggttagcgacgcccgcctgcgcgacgacgtgcagggtttcatccgccaggaagcgatgcattcgcgggcccacgacggcgcgatccagcgctacctgagcaggttcgacatcgactccaagccgttcaccgacaagatggatttccttttcgaacgcctgctctgcgactacccgctggggcagaaccgcctgacccgcgccctcgacggctggtggctgcgccagcgctgcgcgatcatcgccgcggtggagcatttcacctgcgtgctaggcaagtgggtgctggaggcccgggagctggatcgccgcggcagcgacccggtgatgctcgacctgctgcgctggcacggcgccgaggaagtagagcaccgcagcgtcgcccacgacctgcacgtgcatctgggcggcagcttcgtcacccggcaactgaccatgctgttggtcatcgcgatactggtctacctgctcgccgacggcacccgcaccctcctcgaccaggacccgagcctgcgcggcgccaagcgccagggattcctacgaacctggtggcggctcggcaagcagggcctgctgccgaacctcgcgcgcaccttccgcgacgtcgcccgttacttcaatccctggtaccaccccgagcacgaggcgaatacccaggaagccctggaatacctggccaactcgccggcggcccggcgcgcggcgaacgcctga

SEQ ID NO: 319421 - DNA, 1779 bp, Pseudomonas aeruginosa
atgaacgcgctcctcgccctccccgacctgcagccggaacgcctgttcgtgcaatccggcgacgtgcgcctggcggttcattgctggggcgcgccggacaacggcaagccgacgctgctgatggtgcatggctacccggacaaccacgagacctggctgccgctgatccgccaactggccgggcgctaccgcatcgtcgcctacgacgtgcgtggcgccggcgcttcggacaagccacgctggagccgcgactaccacctgcagcggctcagcgaagacctgcaggcggtgatccgcgccaccagcccggaccgcccggtacacctgctggcccatgactggggctcgatccagacctgggaaagcgtcaccgatccgcagtgccgaccgctgatcgcgtcctatacctcgatctccgggccctgcctggaccatgtcggtttctggatgcgcgaacacctcaggcagcgcagtccgaaggccctgaaagcggtattcggccagttgctccactcctggtacatcgccttcttccatacccccgtcgtacccgagctgctctggagcgccggcctggcccggctctggccgcagttcctgaagcacgccgaaggagtccgccatccgcaggtcaacccgacccaggccagcgacggccggcacggggtcaagctgtaccgcggcaacttcatccgcagcctgttccgtccgcgcaagcgccacaccgaagtgccggtgcaactgatcgtaccgacccgcgaccgttacgtcggcgcccagctgttccagcacctcagcctgtgggcgccacgcctgtggcggcgcgaggcgagcgtcggccattggcaactgctggccgagccggagcaactggccggctggctcggcgagttcatcgacgcccaggaaaccggcgagtcgccgccggccctgcaacgcgcccaggtccggcccgacgcgcgctcgatgagcggcaagctggtggtggtcaccggcgccggcggcggcatcggccgttcgaccctgctcagcttcgccgagcgcggcgccagcctgctcgccgccgatctcgacctggaagccgccgaacgcagcgccgaactggcccgcgcccttggcgccacggcccatgtctaccaggtcgacgtcggcgatacccaggccatggagaccttcgccgagtgggtgcgcgacaccctcggagtcccggatgtggtagtcagcaatgccggcatcggcatggccggaccgatgctcgacacctcgcccgcggaatgggagcgcctgctgcgggtcaacctgtggagcgtgatcgacggctgccgcctgttcggccggcagatgatcgcggcgaacaagccggggcacctggtcaatgtcgcctccggcgtggccttcgcgccgtcgcgcaactaccccgcctacgccaccagcaaggccgcggtactgatgctcagcgaatgcctgcgggcggaactggccggacgttcgatcggagtcaccgcggtgtgcccgggcttcgtcgataccggcattgtccaggccacccgcttcgtcggcatggacgccgaacgccaggcgcggcgccaggcgaagatccagcgcttctacaagcgacgccggctcagcccggacaccgtcggggaaaagctggtgcgcgccgtggagcgcaacaaggcggtggtctcggtgggcagcgaggtgcacctcggcgccctgcaatggcgcttcgcgccctgggccacgcggtttctcgcgcgcttcgacctgacttcctga

SEQ ID NO: 319422 - DNA, 876 bp, Pseudomonas aeruginosa
atgtcccaaggcgcctgggtacccactcccgacgatctcgatcacttccgccaggtccagcgactggcctatacctgctgcgaaaccatccacggcgaactgcgcgccggcatcagcgagagggaagccgcggcgctgatgaagacctggctgcaggatcatggcgtcgacgactggttccaccagcccttcgcctggttcggcagccgcacctcgttcaagggcttcgacggcctgcgtcatctcggtggcttcaacctggccttctaccccggcaagcagcgcctggaggaaggcatgccgttcatcctcgactgcgcgccgaccctcggcgcctataccgccgatgtcggctactccggcgcactaggccacaacctgttgcaggagcggctgatggacgacctgctgatacaccgacgcaccatccttgacctggtccgcgaacggcgccccctggccgaaatcagccaggcggtcgaccggctctgcgtgatccagggcaccctgccacggcacaaggcctatcccttcgaagtgctcgcccatcgcgtggaaaagctcggcaaccgccgcggtccctcggtggcgcgcttcggcgtgcgcaacctgtacaccctgacgcgcaacgcgctggtcaccggcaagcgcgaaggctggtcgccgctgtggtccagcggcaagcgctccgagcacccgccgacgcccggtctctgggcggtggaaccgcacctggggctacgcggggtgggcgccaagttcgaagaactgctggtggtcaccgaagacgacgcctactggctcgacgacgacctgccgcacgtccgccgctggcaggcgcgcggcctgctgccgcaagcacgggaggccgcatga

SEQ ID NO: 319423 - DNA, 813 bp, Pseudomonas aeruginosa
atgagcacacccctgacccttctgcagcgcctgctgcaacgtggcgagcagccgtccgccgaggatgcccgcgaatacagcgtcgacgaactggctcgcgcggccggcagcagcgtgcgcaacgtacgcgcctaccaggaccgcggcctgctgccgccgccggagcggcgcggccgggtcggcgtgtatttcgacagtcatctcaagcgcctgcggctgatcagccagttgctcgagcgcggctattccagcgccaacatcaaggaactgctggaagcctgggaacagggccgcgacctcgaccatgtgctcggcctggaccaggcgatcatcggcgagtggaacctggagacgcccggcagcatcggcttcgacgaactccaggcgatcttcggcgacgaactgaacgaccgggtgatcgacaaggcccaggcgctgggcctgctgctgttcgacggcgagcgcatgaagatccccagtccacggctgttccaggccgggctggaactgtaccgcagcggcatcccgctggaggcgctgctcgatcaactcggcgagttgcgcagcgacaccgagcatctggcggcggggatcgtccgcctgatcgtcacccacctggtggacgaccgcggcaccgacctgctgcccggggcgccggacctgcaggagctggccaaggtgttcctgcgcctgcgcccgctggcggaacacgtggtccaggtggaactggcgcgcggcctcaagctgtcggccaacgaaatgctcggcgagcgtgtcggcgagatgctgcgcaagctggaaaagccttcctga

SEQ ID NO: 319424 - DNA, 915 bp, Pseudomonas aeruginosa
atgcagcagattcatgacctacgccgtatcgacctcaacctgctggtggtgctcgacgcgctcctcagcgagcgccacgtgtcccgcgcggcgcagcgcctggccatgtcgcagccggcggtcagccacgccctcgggcgtctccgcgaactgttcggcgatccactgctggtgcgggtgaaaagccgcatgcagttgaccagcctggcgctggagctggcgccgaagctccaggccagcctcgaccaggtacgcggggtgatcggcgggccgaccttcgaaccggtgcgcagccgacgccacttccgcctgggcatgtccgactacggcgcctgggtggtgctgccggcgctgctgcgccagcaacaggcgctggcgcccggggtgagcttcgggatagtccaggaaccgcgcctggaaaccgcccggcaggtcgccgaaggacagctggactgcgcgctgggggtattccccctgcttccggagggcgtgcgcgccaggcgcctgttcgaggagcgtttcgtctgcgtctgtcggcgcagcctgttcgaccgccccgacggcctgtccctcgaccgctacctggcggcccgccacgtgcgcgtctcgctacaggacaacccggccgaggaagtcgacagcgccctggaaaaacgcggcctgcgccggcaggtggcgctgaccctgccgcacttcaccgtggccccggcgctgctggccggcaccgacctggtactgaccatcgccgaacgcaccctcgaaaggttgcggctacccgaggaactggcgctctgcgagccgccgctggcgatcccgcgcttcgactatgtgcagatctggcgcggcgacgccgagcgcgaagcggccggcgcctggctgcgggaacagatccaggcggcggcgcggaagatctga

SEQ ID NO: 319425 - DNA, 456 bp, Pseudomonas aeruginosa
atgcccaattatctgatggtactgatggcagtttcggtgggcggcatggtggtgctgcaggccggcagcaacgccttgctcgggcgcctgctcggccatccgctgagcgccagcctgacttcgctgggcgtcagcctcggggtggtcagcctgggcctgctgctggtgcgggtgccgctgccggctaccgccagcctcggcggcgcgccctggtggagctggctcggcgggctgttcggcgcggcctacctgacggtggcgatcctggtcgcgccgcgcctgggtgccgccactttcatcgcgtgcgtggtggccgggcagatgctggtctcggcgctctgcgaccagttcggctgggccggtttcccggtgcgccggttgtcctgggagggctatctcggcctggcgctggtggtggcgggggtattgctcctgcaatggcggggaagagcgtga

SEQ ID NO: 319426 - DNA, 2079 bp, Pseudomonas aeruginosa
atgatttcgaaaagcagaagaagcttcatccgcctggccgccggtacggtcggcgccaccgtcgccaccagcatgctgccgtcgagcatccaggcggccctggcgattcccgcgcaccgccggcatggcaacctcaaggacgtcgagcacgtggtgatcctgatgcaggagaaccgctccttcgaccactatttcggcaccctcaagggcgtccgcggcttcggcgaccgcatggcgatcccgctgcccgatggccagcgggtctggcaccagaagggcagcaagggcgagatcctgccctaccacttcgacaccagcaccaccagcgcccagcgcgtcgacggcaccccgcacacctggccggacgcccagcaggcctggaacgaagggcgcatggacaagtggctgccggccaagaccgagcgttccctgggctactacaaggagcaggacatcgccttccagttcgcgatggccaacgccttcaccatctgcgacgcctatcactgctcgttccagggcggcaccaaccccaaccggctgttcctctggaccggcaccaacgacccgctcggccagcacggtggtccggtaaccaccaacgaccacgacagcaacggcccggtggagcagggctacacctggaccacctatcccgagcgcctgcaggctgccggcatcacctggcgggtctaccaggacatggccgacaacttctccgacaacccgctgatcggcttccgccagtaccgcgccgcggcgcctgactcgccgctgatcgtcaacggcctgagcacctggaagctcgatgcgctgaagcgcgacgtgctggccaatagcctgccgcaggtgtcctggatcgtcgccccggccaagtactccgaacaccccggcccgtccagcccgatctggggggccgagtacacttcctgggtactcgacgcgctgaccgccaacccggaggtctggagcaagaccgcgctgctggtgatgttcgacgagaacgacggcttcttcgaccacgtcgccccgccggccgcgccgagcctgaacaaggacggcacgctgcgtggcaagaccaccgccgacgccaccctcgaatggcacaccaagggcgatatccgttatcgcaaccagccctacggcctcggcccgcgggtgccgatgtacgtgatctcgccgtggagcaagggcggctgggtcaactcccaggtgttcgaccacacctcggtgatccgcttcctggagcagcgcttcggggtcatggagccgaatatcagtccctggcgtcgtgccgtctgcggcgacctgacctcggcgttcaacttcgccaacccgaacaacgagccgttccccgaactgcccgacaccagccaggccgacgccatcgtcgccagccagatcaagctgccgaagccgaagccgccggcggtggccgccatgcccaagcaggaaatgggcatccgtccggcccgcgccttgccctacgagctgggcgtgcatgcgcgctaccgcagcggcggagatgcgctgagcctgaccttcgccaacaccggcaaggccggcgcggtgttccaggtgttcgacctgctcgacagcgagaacccgccgaaacgctacaccgtcggcgcgcgcaagcgcctgcacgacagcttccagggcgacgccagcggcgactaccacctggaagtgcacggtccgaacggtttcctccgggtctttcgcggcaacctgcggcgcgacctggcggagcgcaaggcgccgctgccggaagtgcggatcgactacgagccgctgttcggcaacctgcgcgtgcaactgatcaaccgtggccgccatccggtcaagctgacggtcaaggacaacgtctatcgccagggcgagcggcgtaccgtcaacgtgccgccgggacagcgccgggaagtccgctattcgctgcgcagcagcggcaactggtacgacttcagcgtcagcgcgcagggggcggacagcttcctgcggcgtttcagcggtcgcatggaagatggtcgctccggcttcagcgacccgggcatgggcctgggcacgctgaccttctga

SEQ ID NO: 319427 - DNA, 501 bp, Pseudomonas aeruginosa
atgaaccgcttttcactgccccgccccgacgcacgccagtgcgtcgccggcctgggtttctccgcccttctgctgctggcctcctcggccaacgccgccgcctgccgcgacatcaccagcgtgcagcaaagcgccgacgccacgcgcaatacctcgatgggcggccacgtgacccagcacatctacgggatgacgccgccgtccggctcgtcgcagaaagacaagaccctgttcaagtcgagaggcaactacgacgcggcctggcgccagtacggatacatcgacaatccggtggcctgcagcggcaacagcaagttccaggcggtttccctggagaagctgcacatgggcaagatcgatgcctactcctgcaagcaggccgacggccagggcgcctgcacgcgctgggatacgtacatggccaaggagatttcgtacggtttcgtcctgaaggacggcaagtggatcctcaataccctctacccggttcccctcgactag

SEQ ID NO: 319428 - DNA, 729 bp, Pseudomonas aeruginosa
atgcgcaaaccactgctatccgcattactgctgggcctgctggccctcggcggctgcagcctgccccaacagcaggccggcgcgccgaccgagcagcggctcggcacccaatggggcgaaggcgtcgcctcgccggtcacctcggtggccctgcgacgtctatcggagcaaccggtcgatcgccgccaggtgttctacagcgcgagccgcttcgatggacgtgccatcaaggaactgcccctggccaagggcagggtgggcttcgccgtactcgacgaggatggcggcaagttcgacctcgtgcagcaccgcagcaccctgcaattgcagggtcgtgaaggccagcgctaccgactgtggctgaacaacctcggcagcgcgacctacgaggtggtctccacggtagacggcctggacgtgctcaacggccagccgggcagcctgaagaaccgcggctatgtgctggaaccgggcgagagcctggtgatcgagggcttccgcaagaacgaacgggaagtcgcggcgttccgcttcgccagccccgacgatgcctacgccagcaacagcgcggccggcgacagccgcaacctcggcgtgatcggcgtggccctgttcgagctggacgctccggccagcggtcgcgaggcgccggccgacggaccgcaggcatttcccgccgacgcccggaacggcggcggctacgcgccgccaccacgctatcgcgactga

SEQ ID NO: 319429 - DNA, 771 bp, Pseudomonas aeruginosa
atgagccggacctggcgcctgctgctctggccgctgctggtggtggccgcggtgggcgcctcgttcgcctatctggacatggacaccgcaggtcttttcagcggcaagggactgggccagatggccgcctacgccagcgagttcttcccgcccgacctgtccgctccgcacctgcgggcgattggccgggggctgctggaaaccctggccatgtcggccatcggcaccctgctggcggcgctgctcggcctgctcttcgcgctgccggcggcaggtcgcttcggcgtgccggcgcagagcctggcgcgactcctgctcaatgcgctgcgcgcggtgccggagctggtctggggcgcgctgatggtgctggcggccgggctcgggccgaacgccgggaccctcgccctggcgctgcacaccggcggcgtgctcggccggctgttcgccgaagccctggagaacaccccggcgcagcccgccgaggccttgcgcctggccggcagcggacgcctcgcggcattcgcctatggcaccctgccgggggtctggccgcaactggtggcctataccctgtaccgctgggagaacaatatccgcatggccagcgtgctcggcttcgtcggtgccggcgggctcgggcagatgctctatttcagcctgagcctgttccagcaggcccaggccgccacggtgatcctggccatgctggtcctggtgctcggggtcgacagcctgagcgcctgggcgcggcagcgctgggtcagccaatag

SEQ ID NO: 319430 - DNA, 834 bp, Pseudomonas aeruginosa
atgctgaacgccgcttctccgccgcgcgaccccgccgccctgccgcgcctgctgctgaccctggccgcgttgctgctgctctggccggggctgcgcctcagcgaactggatatccccggcctgttcagcggcgacaacgcgcgcaccatgggcggtttcctcgccggcttctggccgccggcacacgatcccgggttcctcgccctgctcggccgcgccaccctggaaaccctcgccatcgccaccgccggcatggccctggcctggctcctggcgtttcccgccgcactgctggcgacccgcgccctgtcgctctcggcactgccgcgcggcggcctgccggcctggtgggcacgggcactgcgctggccggtgcgcggcctgctgatcctcctgcgcagcgtgccggaaatcgtctgggcgctgctgttcgtccgcgccgtgggcctggggcccaccgccggggtgttggccatcgccatcacctatgccggcatgctcggcaaggtctacgcggaaatcttcgagtcggtggatccgcgccccacccgcgccctgctgttgggcggcggatcgcggctggcggcgttcgcctacggggtgctgccgaacgccgccggggaaatgatttcctacactgtctatcgctgggagtgcgcgatccgtgcttcggtggtgatgggcttcgtcggcgccggcggcctcggccagcagatcgacctgtcgctgcggatgttcgccggcggcgaggttgccagcatcctgctgaccttcctcctgctggtcctcctcgccgacctgctgagccgcttcctgcgcgggaggctggcatga

SEQ ID NO: 319431 - DNA, 804 bp, Pseudomonas aeruginosa
gtgagcctgagcctcgacggcgtggacctggtccacgccgacggccaacgcgcccttgccgacatccgcctgcgcctggccgctggcgaacgggtggccctgatcggaccttccggcgccggcaagaccagcctgctgcgggtgctcgccagccaatggcggcccagcgccggccgtgtcgaactgctcggcgaggagccctgggcgctatccgccgccgcccgccaacgcctgcgcgcgcgcatcggcctggtccaccaggcaccgccgctgccgccacggcagcgggtggtcagcgcggtactggccgggcgcctcggccagtggccgctatggaagagcctggtcagcctggtctatccgctggaccgcgccggcgcccacgacgcactgcaacgcctggatctcggcgacaagctgttccagcgctgcgaccagctttccggcggccagttgcagcgggtcggcatcgcccgggtgctctaccagcgcgccgagctgatcctcgccgacgaaccggtctcggccatggacccggtgctcgccggccataccctggccctgctcaaccgcgaggccgccgcgcgcggcagcaccctgctggccagcctgcacgcggtggacctggcgctgcaacacttcccccgggtgatcggactgcgcgccggacgcatcgccttcgacctgcccgccggcgaagtcgaccgcgccgcgctggacgccctctacgccaacgaacaactgcaggccgagcgcgccagcccggccggcgaacccgccgtggtgcacatcccacgatgctga

SEQ ID NO: 319432 - DNA, 858 bp, Pseudomonas aeruginosa
atgttgaaacgctccctggcgctcgccgccggcatcgccctgtccctgtccgccgcgctcgcccacgccgaaaccctgaaagaactcaaggtctcggcgatccccgacgaggcgcccaccgagctactgcgcaaattcaagccgctcggcgcctatctggagaagcaactcggcatgccggtgaagttcgtcccggtggccgactacgccggggtggtcgaggcgctggccgccgaccgcctggacatggcctggctgggcggcttcaccttcgtccaggcgcggctgaagaccggcaacgccattcccctggtgcagcgcgagcaggaccagcagttcaccagcaaattcatcacggccgatccccaggtgaaatccctgcaggacctgaagggcaagaccttcgccttcggctcggtctcctccacctcgggcagcctgatgccgcgctacttcatgcagaaggacggcatcgtccccgagcagttcttctcccgcgtcgcctactccggcgcccacgacgccaccgtagcctgggtccaggccggcaaggtcgacgccggcgtgctgaacgcctcggtctggcagaagctggtggacagcggcaaggtcgataccgccaaggtcaaggtcttcgccaccacgccgacctactacgactacaactggaccgtgcgcggcaacctcgacccggccctggccgagaagatcaagcaggccttcctcgccctcgacccggcgaaaccggccgacaaggagatcctcgacctgcaggccgccagccgcttcatcgagaccaatccggacaactacaagggcatcgaggagtccgcacgcgccgccggcctgctgaagtga

SEQ ID NO: 319433 - DNA, 891 bp, Pseudomonas aeruginosa
atgtccgcttccctgccttcccttgccttcgccggtctcggcctgatgggcgtgcccatgtgccgccggctgctggccgccggctatccgctggcggtgtggaaccgttcgccgggcaaacgcgagttgctcgtggccgagggcgcgaaagccgtcgaggtcccggccgaactggccgccgacgcggaaatcctgatgctttgcctagccgataccgcggcggtgcgtgaagtggtgttcggcgccggcggcatcgtcgagaacgccaggcccgggcagttgctggtggatttctccagcgccgagccggccgccacccgcgagatggccgccgagctggaggcgcgctgcggcgtgcgctgggtcgacgcgccggtctccggcggcacgccgggcgcggaaagcggcagcctggcgatcatggccggcggacgcgcagcggatatcgaacgcctgcggccggtcctctcccggcttggccagcgcctgacgcgcatgggcgaggtgggcgccgggcaggtgaccaaggtctgcaaccagatgatcgttgcctgcaacgccctggtgatcgccgaagtggtggcgctggcggagcgggccggggtcgacgccagcctggtcgctccggcgctggcgggcggcttcgccgactcgaagccgttgcagatcctcgccccgcaaatggccgagagccgttacgagccggtcaagtggcacgtacggaccctgctcaaggatctcgataccgcggtgaagctgtcccgcgagcaaggcgcggccaccccgatgagcgggttggccgcgcagttgatgcgtctgcacggcagccagggctatctcgaacgcgatccggcgaccctggtggagcaataccggaccgccgtcgagtga

SEQ ID NO: 319434 - DNA, 2181 bp, Pseudomonas aeruginosa
atggattggcaaggcctgcgcttcctcggagagtctcccatcgacggctacgtgctgcagaactgcacctattcgccgtcgctggtggcgctcgccttcctcgtcgcctgcctcgccgggtacacggcactggacatggtcgagcgggtcggcaacagcctgagccacccgcgcctctggcaatggatcggggcgttctgcctgggcagcggcatctgggccacgcatttcgtcgccatgctcgcgttccacgcgccgatcgccctgcgctacgacctgccgatcaccggcctgtcgctgctgatcgccgtcgccgcctcgtacctggcgatgtacatgaccgcccgcccgcgcttcggcctgctgccctgcctgctcgccgcctgctgcatcggcctgggcatcgctgccatgcactacaccgggatggcggcggtgcgctcggtggccacccagtactaccagccatcgctgttcgccctttcggtactgatcgccatcggcgccgccttcaccgccctcgccgcggtcccctacctgcgcggccggcgcagcgcgcgctaccgctacatgaaactgatcgccagcctgctgctggccggcgccatcgccgccatgcatttcaccgggatggccgcgctggtgctcagcgtacccgccggcacgccgctggaactgcaagccagcgccgactcgctgcgcctgggctggctcaccggagtgctcgccagcgccatcgccgcctgcggcatctgggccgcatggtcggagaaacaacgggagcgccggctcagcgaaaacagccgggtcaacgccctgctcaaccagctcgaccacgcccacgcctcgctgcgccagatggctcgctacgacagcctgaccggcctgcagaaccgcacggcattcaacgaagtgttcgtccagcacctggagaattgtcgcctgagaggcaagggcctggcggtgatgttcctcgacctcgatcacttcaagcggatcaacgattccctcggccacgactctggcgaccaactgctgaagatcgtctccgaacgcatccgcagcgtgttgcgcgatagcgacgtggtggcgcgcttcgccggcgacgagttctgcgtgctcgccgacctcacccaggaccacgaggcgcacatcctctcgcaacgcctgatgcagaagatgaaggaacccatcgccctggacgggcgcaccctggtgatgaccgccagcgtcggcgtcagcctctacccgaacgacggcgagcagtgcgaggagctgctgaagaacgccggcctggccctgcaccagtccaaggcctgcgggcgcaacaacgcgcagttcttcagccggcaactgctggtgcgggcgacccaggaactgcagatggaggaggaactgcgccaggccctgcgcgacgaccaactggagctgcactaccagccgatcctcgccctcgccgacggcgaggtacaccagttggaggcattggtgcgctggcgccatccgacccagggcctgctcggtccggaccgcttcatcggcctggccgaagccaacggcatgatcgaccagctcgacgactgggtgctgcgacgcgcctgccgcgacttgcgcagcctgcacctggccggccacgaacggctgcgggtggcggtcaactgctgcgccagcaatctcggccgggccagcctggtcgacgaagtccgtcatgcgctggagcaggccgggctggcggcgtgcttcctcgaactggaggtgaccgaggacgcgctgatgtacaacatcgaccagaccatcccgctgctcgaacgcctccgcgagctgggcgtcagcctgtcgatcgacgacttcggcaccggctattcgtcgctcgcctacctgcggcgcctgccgctggacgcgctgaaggtggatcgctcgttcatgatggacatccccgcctcgcagcgggacatggaaatcgcccaggcgatcatcgcgatggcccagaagctccatctgaaagtcgtcgccgagggcgtggagactccgcagcaactggcgttcctgcgggagaaccattgcgagctggtgcagggctacctgttcagccggccgctgccgctggcggccctggaagagttcctccgcgcctaccgcttcgacgccgcgccgccgctgcgtagcctgaaccaggcctga

SEQ ID NO: 319435 - DNA, 1656 bp, Pseudomonas aeruginosa
atgggtgggggtatcaagcgtttcttgccggctatcggttcgacccggctggtgatgctgttcgcgctggttctggtggtgttctacaacgcggcgacctggaaggccctgcatggcctggtgccgctgcaaggcttgaagggcttcgcgttcttcgcctcgttcgcggcgttcctgtgggccgccttcacgctcctgctgaccctggtttccttccgcccgctgctcaagccggccttgaccctggtcgccctgtgctcggccggcgcgacctacttcatgggcagctacggcatcagcatcgacacggtgatggtgcagaacgtcttcgagaccaacgccaccgaggccggcgacctggtcaacccgaccctgctcggctatctgctgttgctcggtgtcctgccttcgctgctgatctggctctggccggtacgctaccggccgttcttccgcggcctgctgaacaagatcctgacgctgctcggctgcctgctgatcgtcgcggtaatggtaggcagcttctattccacctacgccccgatcttccgcgaggaagacaagctgacccacttcatcaacccgaccaactacatctacgcggtgggcaagtacgccaagcagcgcctggtgatcaaggaacacctggtggtcgagccgatcggcctggacgcccgccaggcgccggctgcgctgcagcgacagaagaaatcgctgctggtgttggtggtcggcgagaccgcccgtgccgatcatttctcgctgaacggctacgcccgcgagaccaacccggagctgagcaagcaggacatcgtcaacttcacccaggtccgttcctgcggcacttccaccgcggtctcggtgccctgcatgttctcccagtacccgcgcgaggactacagcgacaagaaggccaagacccacgaaggcctgctggacattctccagcgtgccggcgtgcaggtgttgtggctggagaacaacagcgactgcaagggcacctgcctgcgggtgcccaaccgggacatcccgaagacccagccgagtccgttctgcgacggcaagaactgcctggacgagtcgctgctggtaggcctgcaggagtacatcgacgggctgcaggacgacgccatcatcgtcctgcactccgatggcagccacggtcccgagtactacgagcgctacccgaaggagatggagcgcttccagccggtatgccggaccaaccagctcggcagttgcagcaaggaagagctggtgaacgtctacgacaacaccatcctctataccgaccacttcctgacgaaggtgatcgaattgctcaagcggaatgccgacaagcgcgatacggcgatgatctacgtgtccgaccacggcgagtcgctgggcgagaatggcgtctacctgcacgcggcgccctattcgatcgcgccccaggcgcagatccacgtgccgatggtcatgtggttcgccccgcaggcgctgggcaactggggcatccagcgcagttgcctggacggcaagcgcgacgacaaggacctgagccacgacaacctgttccactcggtgctcggcctgctggacgtacagacttcgttgtaccagccggcgctggacatcttcgccagttgccgcgcgcccagggcagcccagtga

SEQ ID NO: 319436 - DNA, 456 bp, Pseudomonas aeruginosa
atgtacgatcgcattctggtagccgtggacggcagcccggtctccgaccgcgccctggaagaggccatcaagctggccggcctcagcggcggcaagctgcgcgtcatcaccatcgtcgacagcccgctgcgccaccttcccgactacgcggtgtactacaaccccgagccgctgcgcgaagccgcgctgaaagccgccgatgacgtcctggccaaggcccgcgagaaggtcgaggcgagcaacgtcgaaggcgccaccttcgatcgcgtctgccaggagcgcgccagcgaggaaatcgccgagcgcatcgagctcgaggcccaggccagcgatgccgacgtggtggtcatgggcacccatggtcgtcgcggcatgcgccgcctgatgctcggcagcgtggcggaaggcctgatccgcgtggcttcgcgtccggtcctgctggtccgcgacaaataa

SEQ ID NO: 319437 - DNA, 2847 bp, Pseudomonas aeruginosa
atggcgcagtatcaaccggggcaacgctggatcagcgacagtgaagcggaattgggcctggggaccatcctggcccaggatggccgcctgctcaccgtgctctatccggcgaccggcgatacccgccaatacgccttgcgcaatgcgccgctgacccgcgtgcgcttcgcccccggcgatgaagtgacgcacttcgaaggctggaagatgaccgttcgcgaggtcgaggaaagcgaaggcctattggtgtaccacggcctcaccgcgcagaacgagcagcgcaccctgccggaaacccagctctccaacttcatccagttccgcctcgccagcgaccgtctgttcgccggacagatcgatcccctgccctggttctccctgcgctaccacactctcgaacgccgcagccaactgctccagtcctcgctctggggcctcggcggcgcccgcgcccagccgatcgcccaccagttgcacatcgcccgcgaagtcgccgaccgcatggcgccgcgcgtcctgctggccgacgaagtgggcctgggcaagaccatcgaggccggcctgatcatccatcgccagttgctctccggccgcgccgggcgggtgctgatcctggtcccggaaaacctccagcaccagtggctggtggagatgcgccggcgcttcaacctgcaggtggccctgttcgacaaggagcgcttcgccgaaagcgatgccagcaatcccttcgaggacacccagttggccctggtcgccctggagtggctgaaggaagacgaacgcgcccaggacgccctgttcgccgccggctgggacctgctggtggtcgacgaagcccaccacctggtctggcaccaggaccaggtcagcgccgaatacgcgctggtcgagcaactggcggagatcattcccggcgtcctgttgctcaccgcgaccccggagcaactcggccaggacagccacttcgcgcgcctgcgcctgctcgatccgaatcgtttccacgacctcgaagcgttccgccgggagagcgagcaatatcgtccggtcgccgaagcggtgcaggaactgctcgaccacggcagtctttccgccggcgcgcgcaaggccatccacggcttcctcggcagcgagggcgacgagctgctggccagcgtcgagggcggcgatgaagaagctcgctcgcgcctggtccgcgagctgctcgaccgccacggcaccggtcgcgtgctgttccgcaacacccgtgccgccgtgcagggcttcccccagcgcgaactgcacgcctatccgttgccgatgccgagccagtacgaggaattgccggccggcgaacacccggacctgtatccggaagtgaatttccagcagcagtgggaagacggcgacgacaacaaccgctggtggcgcttcgacccgcgcgtcgagtggctgatcgataccctgaagatgctcaagcagttcaaggtcctggtcatctgtgcccacgccgagacggccctcgacctggaagacgccctgcgcctgcgttcgggcatctccgccacggtgttccacgaaggcatgagcattctcgagcgcgaccgcgccgccgcctacttcgccgacgaagagttcggcgcccaggtgctgatctgctcggaaatcggcagcgaaggccgcaacttccagttcgcccaccacttggtgctgttcgacctgccggcccacccggacctgctcgagcagcgcatcggccgcctcgaccggatcggccagcgacacaccatccagttgcacgtaccgcacctggagaacagcgcccagcagcgcctgttccagtggtaccaccaggcgctgaacgccttcctcaatacctgccccaccggcaacgccctgcaacacgagttcggcccgcgcctgctgccgctgctcgacggcggcgaggacaaggcctgggacgcgctgctcgccgaaggccgcgcccgtcgcgaagccctcgaagcggagctgcacagcggtcgcgaccgcctgctcgagctgaactccggcggcgccggcgaaggcgaggcgctggtggaggccatcgaggaacaggacgacgacttcgccctgccgatttacatggagcgcctgttcgacgcctacggcatccacagcgaagaccattcggaaaatgccctgatcctcaagccaagcgagaagatgctcgacgccggcttccccctcggcgacgacgaaggcgtgaccatcacctacgaccgtgcccaggcgctggcccgcgaggacatgcagttcctcacctgggaacatccgatggttcagggcggcatggacctggtgctgtccggctcgatgggcaacacctcggtggcgctgatcaagaacaaggcgctgaagcctggcaccgtgctgctcgaactcctgttcgtcagcgaggccgtggcaccgcgcgccctccagctcggccgctggctgccgccgcaggccctgcgctgcctgctcgacgccaacggcaacgacctggccggccgggtatccctggaaaccctcaacgaccagttggaaagcgtgccacgggtcagcgccaacaagttcgtccaggcccagcgcgatgtgctggccaagcagttcgacgtggccgagggcaagatcgtcccgcgccacgaggaacgcgtggccagggccaagcagcagttcgccgccgccatggacgaggaactggcgcgcctgaccgcgctcaaggcggtcaacccgagcgtccgcgacagcgagctggacagcctgcgcacccagcgcgaggaaggcctggccctgctcgacaaggcctccctgcgcctcgaggcgatccgcatcctggtcgccggctga

SEQ ID NO: 319438 - DNA, 309 bp, Pseudomonas aeruginosa
atgcttccgccgatcccccagggcctgatcccggtcaccgtccagcaggacccgcccaagccccgtccggccacgccgccggtcgcgccgacccaggctggcgcgggcagcgatggcgtcgccttgcgccaggagcgcgacgaggaaagctggctggaagaggaataccgccgtcgccagcgccgccagggcggcgaggcgcacgcgcggagcgacgagggggacgaggcgccggctgacgaggcgggggagagcgcccaggcggacgagctgccgcgcaagggacaattgatcgacatcgaagtgtaa

SEQ ID NO: 319439 - DNA, 603 bp, Pseudomonas aeruginosa
atggacctgttcgccgacgcacccctgaccctgccggacgccgacctgcgctatctcccgcattggctggatgcgccgctggcgagcgcctggctgttgcgcctggaacaggaaacgccctgggaacagccgatcctgcgcatccatggcgaggagcatccgaccccgcgcctggtggcctggtacggcgaccctgacgccgcctaccgttattccggccaggtccaccggccgctgccatggaccgcgttgctcggcgagatccgcgagcgcgtggagcgcgaggtcggccagcgggtcaacggcgtgctgctgaactactaccgcgacggccaggactccatgggctggcacagcgacgacgagccagagctgcgccgcgatccgctggtcgcctcgctcagtctcggcggcagccgccgcttcgacctgcggcgcaagggccagacccgcatcgcccactctctggaactgacccatggcagcctgctggtcatgcgcggcgcaacccagcatcattggcaacatcaggtggcgaagacccgccgctcctgcatgccccgtttgaacctgaccttccgcctggtgtacccccagccatga

SEQ ID NO: 319440 - DNA, 162 bp, Pseudomonas aeruginosa
atgaacgacgacgacaaggtgatcgacctcagcgccgagcgcgacaagcgcatccacgacgtgcacgagaagcgcctgcaggaggtccgcaaggccttcgaacaggtgttgccgctgggcaagccgcggaagaagccgaaaggcaagccgaagaagcgctga

SEQ ID NO: 319441 - DNA, 1995 bp, Pseudomonas aeruginosa
gtgcccattcactggaagccgttcctggcaccctcgacgctggcgctcaagttcgccatcaagacgctcctggccggcggcctggcgttgtggtgcgcctttcgcttcgacctggagcagccgcaatgggcgctgatgaccgtgctgatcgtgtcccagccgttgtccggcatggtggtggcgaagggcttgttccgcctgctcggcaccctggtcggcaccgcgatgtcggtgctgatgatcgcgctgttcgcccaggcgccctggttgttcctgctggccatctcgctctggctggggctctgcacggcggcctcgacctccctgcgcaaccacgtttcctatgccttcgtactttccggctatacggtggcgatcattggcctgccggcggtggaccagccgctgctggtcttcgagcaggcggtggcgcgttgtaccgagatctgcctggggatcatctgcgcctcggcggtcagtgcgatcctctggccgcagcgggtcgagcagaacctcgacaagcaggcccacgccacctggctgctgggcatgcaggccgcgcgcggcgagatcgacccgcgccagcggcagccgcaggggctgctcaacgcgctgagcaagatcgtcgaggtcgatgcgcagcgcgaccatgcctggttcgaaggcgagcgcgggcggcgccgggccggcgccctggcgttgctctcgcgcgacctgctcagcctgttgcgcaccgcgcgcggcgtggcccggcaacgggcgcggctgagcgaagaggaagagcgccgggtggagcgctggctggccgcgctggccagcgccctggaaggggccgatccggcgtcgatgttggcgctgcgcgaggagttggcgcaggtcgcggtcgagccgcagtggagcaacgaccagcgttacctgctgacccgctgctcggtgctgctgctcaaggcggtgaatgccgagaagggcatgcgcgcggtggccagcggcgaggtcgaggggcgggtgggcagcgccggcaccctgtcctggcaccgcgacctgcagatggcgctgttctacggcgcgcgtagcgccctggcgttgctcgggctgtcggtctactggatctataccgcgtggccggcggcgtccggcgcgatgctgctggcggcggtggtgtgcagcctgttcgccaaccgcgacaacgcggtggccatcggcctgagcttcctgcgcggcatcgtctacgcgatcccggcggcgatgctggtcagccagtggctgctgccgcagtggaatggcttcccgctgctctgcctggcgatgggcgtgccgctgttcttcgccaccctgggcatggccgtaccggttaccgccggcaccgccacctcgttcgcgatccacttcatcgtcctggtcgcgccgcgcaaccagatggactacaacctcgcgaccctgctgaattccgcccagggcgtgctgatcggagtcggcttcgcggtggtgatcttccgcttgctgaccttgcgtccgggctggctgacccgacgcctgctggacgccacctgcgtcgacctcggccgcctcacccggcgcccgctggcgcaggcggagaactggttcggcgggcgcatggccgaccgcctgttgcgcctggcgcggcacgccaacctgttgccggagcaggagcggcggcgttgggacgatggcctcctggcgctcgacctgggtaacgaactgatccacctgcgggcctgcctggaaggcgcccgtggcgtcctgcgcaaggcgcgcgaccgcttcctcggggaactgggcgaagtgcttgaggccggtcccgcgggtccgcgcagtgaccgcctggagcggatcagcctgccgttgcgcgaagccctggagcgtgacgctcgccacgacgacgaagccagccgcctggcgcgcgcggccctggcgcaactgctgttcacctggcagcagtggtgccatcaggaggaaagccatgagtctgcatga

SEQ ID NO: 319442 - DNA, 204 bp, Pseudomonas aeruginosa
atgagtctgcatgaatcggcctggggcggcgtctacctcagcccgctgttcgtctatgccctgctggcgctggcggccaccgccgcgctgcgggtgctgatccagaaaacgccgttgcgtcgctgggtctggcacgaggcgctgttcgactgcgccctgttcattttgatgttgagtggcattacctgggcggctacgacctga

SEQ ID NO: 319443 - DNA, 858 bp, Pseudomonas aeruginosa
atgcgtgcatcgcttcgcgtcgtcgtcaccctgctggtggtcgctgccgctgtcctcgccggcatctggctctggcgctactacatgctctcgccctggacccgcgatgcccgggtgcgggccgacgtggtggtggtggcgccggacgtgtccggctgggtgaccgacctggaggtcaaggacaaccaggtggtcaaggtcggcgacgtgctgatgcgcatcgaccaggaacgctaccaggccaacctggagcaggcccgcgccgtcgccgagacccgtcaccagcaatacctgttgcgccagaacgaggcggcccggcgcagccgcctgggcatcggcgcgatcagcgccgaggacaaggaaaacgcccagatcaatgctgccatcgctcgcagcgagtaccaggaggcgctggcccagatgaagatcgccgaactcaacctcaagcgcagcgagctgcgcgccgcgcgcaacggccaggtgaccaacctgcgcctggcccagggcaactacgccacggcgggccaggcggtgatggcgttggtcgaccagcagtccttctatgtggtcgcctacttcgaggaaaccaagctgcccggcatccgcgtcggcatgcgcgcccaggtccgcctgatgagcggcgatcagccgatcgacggcacggtggagagcatcagcagcggtatcaccgaccgcaactcgacgccggacggccagttgctggccaatgtcgagccgaccttcaactgggtgcgcctggcgcagcgcattccggtgcgcatccgcctcgaccaggtgccggcggatgtccacctgagcgccgggatgaccgccagcgtcaccgtgcagggggactga

SEQ ID NO: 319444 - DNA, 1176 bp, Pseudomonas aeruginosa
atggaccttcgcttgctgttgctatccctgaccaccttcgccgccggcctggcggaaagcatcctgatcggcatcctgccgcccctggccgaagacctgcgggtctccatcagcctggccggccagctcaccaccctgttctccctcggcttcgccctcgccgcaccgctgctcggctggctgacccggcgcatcgaacgccgccgcctgctgctggcgaccctgctgctgttcgccctcagcaacgcgctcgccgccctcgctccgggctatctcggcctgctcctggctcgcctgggaatgtcggcctgttgcgggctgctgatcgtcctcgccagcctgctcgccgccgagctggccgccccggcccagcgcggccgggcgatcggcctgatcttcatgggcatcagcggttcgctggtgttcggcgtgccactgggcgtacagatcagcgactggttcggctggcgctggatcttcgccggcatcgcggtctattcgctgcccttgtgcctgctgctctggcgctacctgccgcaacgccaggccggcgacctgcccggccgcgaaggctacctgcggcagttgcgccagcccgcgctgtggctcgcgcaactggtatcgatcctgttgctcggcgggcacttcaccctgttcgcctatttcaccccgtacctggcgagcatggccggtattcgctcgcccagcgagatcagcctgatcctcctgctgatcggcctggcagcgctgagcggcggctatatcggcggctggctggccgaccgcctcggccaccggcgcgccctgcgtctggtaccggcggccttcgccctggcgctggcggcggtgccgctgagcctgggcagcatcgggttcctgccggtactgatggtctggagcgcgatcagctggatgatctcgccggtggtgcagagcttcctgctgcgcagcgatccggccagcggttccgccggcgtcgccctgaacacctcggccatgcacctgggcgtgggcctcggcgcggcgctgggcggcctggtggtggcggcactgggagtcgccgcgacgccctgggtcggcctcgccctggtgctggcggcgctggcctgcgcgcttggcgccagcacgctggatggcgccactcaagcgctgccgctcagtccccctgcacggtga

SEQ ID NO: 319445 - DNA, 471 bp, Pseudomonas aeruginosa
atgagccaggtccagaacattccctacgccgagctagaggtcgggcaaaaggccgagtacaccagcagcatcgccgagcgcgacctgcagttgttcgccgcagtctccggcgaccgcaacccggtgcatctggacgccgcctacgcggccaccacccagttcaaggaacgcatcgcccacggcatgctcagcggcgccctgatcagcgcggcgatcgccaccgtgctgcccggcccaggcaccatctatctcggccagaccctgcgcttcacccgtccggtcaagctcggcgacgacctgaaggtcgaactggaagtcctcgagaagctgccgaaaaatcgcgtgcgcatggccacgcgggtgttcaaccaggcaggcaagcaggtggtcgacggcgaagcggagatcatggcgccggaagagaagctcagcgtcgagctggccgaactgccgccgatcagcatcggctga

SEQ ID NO: 319446 - DNA, 951 bp, Pseudomonas aeruginosa
atgcccgccgctgcctactggctccccgccagcgacgaaaccccgctgtacacccgccactggccgagcgcaacggccgtcggcgcggtgatgctgtcccacggcatggccgagcacgccggtcgctacgagcgtctcgccgccgcgctgaacgctgccggctaccacttctatgcgatcgaccagcgcggccacggccggaccgccgaagccgacgagctgggccacttcgccgaccagggcggctggggcaaggtggtcggcgacctggccagcctgaaccaccatatccgccagcagcacccggaactgccgatcttcctgctgggccacagcatgggcagctacatctccatggcctacctgctgcaccacagctgcagcctgcaaggggcgatcctttccggttccaactaccagccgcaagcgctctaccggatcgcccgcctgatcgcccgcttcgagcgctggcgccaggggccgctgggcaagagcgcgctgatcgacttcctctcgttcggctcgttcaacaaggcgttcaagcccaatcgcacggccttcgactggctcagtcgcgatccgcaggaagtcgacaggtacgtggccgacccgctgtgcggcttccgctgcagcaaccagttgtgggtggacctgctcggcggcctggccgatatcaccccgcccacccacctgcggcagatcgatgccgacctgccgctgctgatcatcggcggcgaacgcgacccggtcagccagggcaagcgcctgggcgacctggccgacgccctgcgcggtgccgggctgcgccaggtgaccctgaagacctatcccgaggcccgtcacgagctgttcaacgagagcaaccgcgacgcggtcacccaagacctgatcgactggctggaacaggccctgcgccaccgccgggatcattcgacaaaggagagaacatga

SEQ ID NO: 319447 - DNA, 1689 bp, Pseudomonas aeruginosa
atgcaacctgaattctggaacgacaaacgcccggccggcgtacccgacagtctcgacttcgccgcctaccgttccgtggtcgaggtcttcgagcgctcctgcaagaaattcgccgaccgcccggccttcagcaatctcggcgtgacgctcagctacgccgaactcgatcgtctgtccgccgccttcgccgcctacctgcagaaacagaccgatctccagcccggcgaccgcatagcggtgcagatgcccaatgtcctgcaatatcccatcgcggtgttcggcgccttgcgcgcggggctggtggtggtcaacaccaatccgctgtacaccgcccgcgaaatgcgccaccagttcaaggacgccggcgtgcgtgcgctggtctacctgaacgtgttcggcaagctggtcgaggaagtgctcccggatacgcggatcgagtacctgatcgaggcgcgcatgggcgacctgttgccggcgctgaagggttggctggtgaacagcgtggtgaagtcggtgaagaagatggtccccgattatcgcttgccccaggcgctgccgttcaggcaggccttgaagcaaggccagggccatgccctgcagccggtcagggtcggcctggaggatgtcgccgtgttgcagtacaccggcggcaccaccggggtctcgaagggggcgatgctcacccacggcaacctggtggcgaacatgctgcaggtccacgcccagctttcccagctcggcaaggatggcctgccgctgatgaaggaggcgcaggaggtgatgatcgcgccgctgccgctctaccacatctatgccttcaccgcgaactgcatgtgcatgatggtcagcggcaaccataacgtgctgatcaccaacccgcgcgacatccccggtttcgtcaaggaactgaagaagtggcgtttctccgcgctgctcggcctcaacaccctgttcgtcgcgctgatggagcaccccgggttcaaggacgtcgatttctccaacctgaagctcaccaactccggcggcaccgcactggtcagcgccaccgccgagcgctggaagggcgtcaccggctgcaccgtggtggaaggctatggcctcaccgaatgctcgccggtggtgaccaccaacccctacggcgagcaggcacgcctgggtacggtggggataccggtcgtgggcacggcgctcaaggtgatcgacgagcagggcaacgagctgcctgtcggcgaacgtggcgaactctgtgtgaaaggtccgcaagtgatgaaggggtactggcagcgtcccgaggccaccgaggagattctcgatgccgaaggctggctgaagaccggcgacatcgcggtgatcgacgaggacggcttcgtgcgcatcgtcgatcgcaagaaggacctgatcctggtctccggcttcaatgtctaccccaacgagatcgaagacgtggtgatggcccatccgaaggtggccagttgcgcggcggtgggcattcccgacgagaagtccggcgaggcggtgaagctgttcgtggtggcccgcgaccccagcctgtcggtcgaggaactcaaggcctactgcaaggaaaacctcaccggatacaaaattccgcgacagattgtgctcaaggatgcattaccgatgacgcctgtgggtaaaatcctccgtcgtgagctgcgcgaaatcgcctga

SEQ ID NO: 319448 - DNA, 1689 bp, Pseudomonas aeruginosa
atgatcgaaaacttctggaaggacaagtacccagcgggtattgctgccgagatcaatcccgaccagtacccgaacatcctgtcggtactgaaggagtcctgccaacgttttgccaccaagcccgcgttcaccaacctgggcaagaccctgacctacggcgagctgtacaagctgtccggcgacttcgccgcctacctgcagcagcacaccgatctcaagcccggcgaccgcatcgccgtccagttgcccaacgtcctgcaatacccgatcgtggtcttcggcgccatgcgcgccggcctcatcgtggtcaacaccaacccgctgtacaccgcgcgcgaactggaacaccagttcaacgactccggcgccaaggcggtggtctgcctggccaacatggcccacctggtcgagggcgtactgccgaagaccggcgtcaagcaggtgatcgtcaccgaagtcggcgacatcctgccgccgctgaagcgcttcatcgtcaacttcgtggtcaagcacatcaagaagatggtgccggcctacagcctgccgcaagccaccaagctgaccgacgcgctggccaggggcgccggcaagtcgttccaggaagccgcgccgcaggccgacgacgtcgccgtgctgcaatacaccggcggcaccaccggggtcgccaagggcgccatgctgacccaccgcaacctggtggccaacatgttgcagtgcaaggcgctgatgggcgccaacctcaacgagggctgcgagatcctcatcgcgccgctgccgctgtaccacatctatgccttcaccttccattgcatggcgatgatgctcaccggcaaccacaacatcctgatcaccaacccgcgcgacctgccgtcgatgctcaaggacctcggccagtggaagttcaccggcttcgtcggcctgaacaccctgttcgtcgccctgtgcaacaacgaaaccttccgcaagctggacttctccgcgctgaagctgaccctctccggcggcatggcgctgcaactggccaccgcggagcgctggaaggaagtcaccggctgcgccatctgcgaaggctacggcatgaccgagaccgcgccggtggtatcggtcaacccgttccagaacatccaggtcggcaccatcggtatcccggtgccctcgaccctgtgcaaggtgattggcgacgacggccaggaagtgcccctgggcgagcgcggcgaactctgcgtgaagggtccgcaggtgatgaagggctactggcagcgccaggaggccaccgacgagatcctcgacgccgatggttggctgaagaccggcgatatcgccatcatccaggaagacggctacatgcgcatcgtcgaccggaagaaggacatgatcctggtctccggcttcaatgtgtatccgaacgaactggaagacgtgctggcgaccctgccgggcgtcctgcagtgcgccgcgatcggcatccccgacgagaagtccggcgagtcgatcaaggtcttcgtggtggtcaagccgggggcgaccctgaccaaggaacaggtcatgcagcacatgcatgacaacctgaccggctacaagcggccgaaggccgtggagttccgcgacagcctgccgaccaccaacgtcggcaagatcctgcgccgcgaactgcgcgacgaagagctgaagaaagcgggccagaagtaa

SEQ ID NO: 319449 - DNA, 210 bp, Pseudomonas aeruginosa
atggcccgcctcgatcctgccctggccgaagaaatacgccgtctgccgatcagccggcgtctggaactgacccaggcattgctgcatcgcgccggccccgaggtggagcgccaatggccgccagtggccgaggatcgcctcgccgactgccgggcgggcaccgccgatgcgctgccgctggccgagatgctcaagcgactggggcgctga

SEQ ID NO: 319450 - DNA, 3981 bp, Pseudomonas aeruginosa
atgaccgaccagactccttcccttgaccaactcgtccggcgcctcgaccaggcccagatcagcgaccgccaccgcttgcgccggcagctccacgaactgcgcaagcagcccgacgacgcgcgcctggcgcagtgggtcgagcgcttccagacctcctgcgccaaggtcgaggcgcggcgcgccagcgtgccggcgatccgctacgacgacagcctgccgatcgccgccaagcgcgacgagatcaaggccgccatcgccgcccaccaggtggtggtgatcgccggcgagaccggctcgggcaagaccacccagttgccgaagatctgtctggagctgggtcgcggcatccacggcctgatcggccatacccagccgcgtcggctggcggcgcgcagcgtggcgacgcgggtcgcggaagagattggtacgccgctgggcgcgctggtcggctaccaggtgcgcttcgaggaccagagcgacgacagcaccctggtcaagctgatgaccgacggcatcctcctggccgagacccagcacgaccgctacctggagcgctacgacacgctgatcgtcgacgaagcccacgagcgcagcctgaacatcgacttcctcctcggctacctgaagaccctgttgcaccggcgcccggacctgaagctgatcatcacctcggcgaccatcgacctggagcgtttctcccggcatttcgacggcgccccggtgatcgaggtttccggccgcacctatccggtggagacctggtaccggccgctggcggcggaaaccgacgaggagggcaaccgggtcgaggacgacctgtcggtggaccagggcatcctcgccgccctcgacgagatcgccgcccacgaacgcgaggtcggcaagcggcccggcgacgtgctggtgttcctccccggcgagcgggagatccgcgacgccgcggagatgctgcgcaaggccaacctgcgccacaccgaggtgctgccgctgtacgcgcgactgaccccggccgagcagcagaagatcttccagccgcgcccgggacgcaagatcgtgctgtccaccaacgtcgcggaaacctcgctgacggtgccgggcatccgttacgtgatcgacagcggcaccgcgcggatcagccgctacagctaccgcgccaaggtccagcggctgcccatcgaggcggtgtcgcaggccagcgccaaccagcgcaagggccgttgcggacgggtcgagccgggcatatgcgtgcgtctctacagcgaggaggacttcaacgcgcgtccggccttcaccgacccggaaatcctccgcaccaacctggccgcggtgatcctgcagatgctgcacctgcgcctcggcgacatcgaggcgttccccttcatcgagccgccggacggcaaggcgatcaaggacggcttcacccttctgcaggaactgtcggcggtcaaccgcgaaggccagctgaccccgctggggcgccaactggcgcgcctgccgatcgacccgaggctgggccgcatgctgctggaggcggcccagcagggtagcctcgaggaagtgttgacggtggccagcgcgctgtccgtgcaggacccgcgcgagcgtccggtggagcggcagcaggccgccgaccaggcgcacgcgcaatggaaggacccggattccgacttcgccgcgctgatcaatctctggcgtggcttcgaggagcagcgccaggcgctgggttccaatgccctgcgcagctggtgccggaagaacttcctcaactacctgcgcctgcgtgagtggcgcgacgcccaccgccaactgaccctgatctgccgcgaactgaagctgccgttcgggcgtccggccaaggccgaggcgcgcaagccggaggcgaagaaaggcgcgtcggccgacaacgaacgcgaggtaccggggatcgattacgcggcggtccacaaagcgatcctgtccggcctgctcagccagatcgggcagaaggccgaggaaggcgactacctcggcgctcgccagcgacgtttctggatccatccgtccagcggcatcgctcgcaagcgcccgcaatggatcatggccgcggaactggtggagaccaccaagctgttcgcccgaatggtcgcgaagatcgagccggactggctggagccgctggctgggcacctgatcaagaccaaccacttcgagccgcactgggagaagcgtcgcggccaggtggtggcgttcgagcaggtcaccctctacggcctcatcgtcatcggtcgacgtccggtgcactacggtccgatcgacccgccggtggcgcgcgagctgttcatccgcgaaggcctggtgcgcggcgagatcaacagccgcgccaagtgcctgagcgccaaccggcagttgctggaaaagctcgacgagctggaagccaaggcacgccggcgcgacatcctggccgacgaggaaaccctgttcgcctattacgacgcgcgcctgccggcggatatctaccagaccgccagtttcgagaaatggtacgcccgcgagcggcagaaccagccggacctgctgctgatgcgcgaggaagacgtgctggcccgcgaagccagcgaagtcactgcggcgcagtacccggatcgcctgcgcctgggcgatctgcacctgtcgctgagctaccagttcgagcccggcaccgcgcgcgacggcgtcaccgtgcgggtaccggcgccgctgctgccgcaattgccggccgaacgcatcgactggctggtgcccggcctgctctacgacaaggcggtggcgttggtgcgcaacctgccgaaggcgatccgcaagagcttcgtgccggtaccggacttcgtccgcgccgccctggagcgcatcaccttcggcgaaggttcgctgccgcaggtgctgggccgcgagcttcagcgcatgaccggcgtgcgggtagccgacgaggcctgggccgaggcggcgacgcagttggacgatcacctgcggatgaacattgaggtggtcgacgcccagggcaagttcctcggcgagggccgcgacctggccgaactcaccgcgcgtttcgccgaagccagccaggcggcgctggcgataccccaggccgacaaggaacagcagcgtccggtggaggccaaggccttcgccagcgtcgccgagaaggcccagcagaaggtcgccggattgtcgatgacggtatacccggcgctggtggaggagcagggcgaggtcaaggaagggcgcttcccgacccaggccgaggccgactaccaacaccgccgcgccctgcaacgactgctgttgcagcaactggccgagccggccaagtacctgcgcgccaagctgccggggcagaccgagatgggcctgctgtaccgcgagctgggacgggtcgaggcgctggtcgaggacatcctcctggccagtctcgacagttgcgtgctgcagggcgaaagcctgccgcgcgacggcgccgccctggccgcgctggccgagcgcaagcgcgctgcctggaacgagcacgccgagcgcctggcacgcctggtgctggatatcctcaagctctggcacggcctgcagaagcgcttcaagggcaaggtcgagctggccatgaccgtgccgctgaacgacgtcaagggccaactggccaacctggtgtatccggggttcgtccgcgccaccccgctggagtggttgaaggagtatccgcgttacctcaaggccatcgagcagcgcctggacaaggtcgccggccaggtccagcgcgaccgggtgtggagcggcgagctgggcgaactctgggcgcaataccaggcgcgcctcgccaagcacgcccaggaaggcaagcgcgacgccgagttgcaggtgtatcgctggatgctggaggagtaccgggtctcgctgttcgcccagcaactgggaacccggctgccggtctcggacaagcgcctggccaagcagtggagccaggtcgagggctag

SEQ ID NO: 319451 - DNA, 1431 bp, Pseudomonas aeruginosa
atgaccccaggttatcccctcgccctctctcttgccgtctccatggccgtgctcggcagcgccttgccggcccaggcgcgccaggacgatccgtcgctgttcaaccgccaggcccgtggcgaactcagcgagtacggcggcgcacggcgcgtcgagcaggacctgacccaggccctgaagcagtcgctgtcgaagaagaaggcgaagaacgtgatcctgctgatcggcgacggcatgggcgactccgagatcaccgtggcgcgcaactacgcgcgcggcgcgggcggctacttcaagggtatcgatgcgctgccgctgaccggccagtacacccactactccctgcacaaggacagcggcctgccggactacgtgaccgattccgccgcctccgccaccgcctggaccaccggggtcaagtcgtacaacggcgcgatcggcgtggatatccacgaacagccgcaccgcaacctgctggagctggccaagctcaacggcaaggccaccggcaacgtctccaccgccgagctgcaggacgccacccccgccgccctgctcgcccacgtcaccgctcgcaagtgctacggtcccgaggccaccagcaagcagtgcccgagcaatgccctggagaacggcggcgccggctcgatcaccgagcagtggctgaagacccgccctgacgtggttctcggcggcggcgccgcgaccttcgcggaaaccgccaaggctggccgctatgccggcaagaccctccgcgcccaggccgaagcccgcggctaccggatcgtcgagaacctcgacgagctgaaagccgtgcgccgcgccaaccagaagcagccgctgatcggcctgttcgcgccgggcaacatgccagtgcgctggctcggtccgaccgccacctaccacggcaacctgaaccagccggcggtgagctgcgaggcgaacccgaagcgcaccgccgacatcccgaccctggcgcaaatgaccagcaaggccatcgagctgctgaaggacaatccgaacggcttcttcctgcaggtcgagggcgcgtccatcgacaagcaggaccatgccgcgaatccgtgcggccagatcggcgagaccgtcgacctcgacgaagccgtgcagaaggccctggccttcgccaaggccgatggcgagaccctggtgatcgtcaccgccgaccacgcccactccagccagatcatcccgccggaaaccgccgcgccggggctgacccaactgctcacgaccaaggacggcgcgccgctggcgatcagctacggcaactccgaggaaggctcccaggagcacaccggcacccagttgcgcatcgccgcctacggcccgcaggccgccaatgtcaccggcctgaccgaccagaccgacctgttcttcaccatccgtcgcgcactgaacctgcgcgactga

SEQ ID NO: 319452 - DNA, 438 bp, Pseudomonas aeruginosa
atgagtctgcacggcgtttacgattcccagaacatcttcgccaagatcattcgcggcgaagctccctgctacaaggtctacgaagacgaggacgtgctcgccttcctcgatctgttcccgcagtcctacgggcataccctggtgattcccaagcacgccgaggcgcgcaacctgctcgagatcgatgcgcagaacctggccaaggtcatggccgtggtccagcgcctgacccgcgccctggtcgaggaggtgcagccggacggcgtgcaggtcgcccagttcaacggcgcccctgccgggcagacggtcttccacatccatttccacgtcatcccgcgcttcagcggcgagaatctcggcatccatgcggcgaagcagggcgacccggaagtgctcgcacaacttcaggagcgtttggcgcagcgtctgcaaggctga

SEQ ID NO: 319453 - DNA, 342 bp, Pseudomonas aeruginosa
gtgaacaaaagcttggattcagactcgataaccaccgccataatggccctgcgtcgcctacgcgacacgcacccggagcagtaccgggagctgctgccgttgtgcgcctcggggctggtggagaccctggtcggacagagcgacggggacgaccgcaggaaggccgagacgcagagcgagaccatcgcccgctggacctggctgcagttgctcggctgggcccagaacaacagcctcagccagcagcagatcgaaagcctctacagcatcgtcgaaggcatccgcagttgccggccgctgatgcaggagcgcgcccgtctcctgcaactggcgcgaggctga

SEQ ID NO: 319454 - DNA, 345 bp, Pseudomonas aeruginosa
atgctaggtacccggctaaaagccgcaagaatcagagcgggatactcgcagaaacagttgggcatgctggtgggaatggacgagttttccgccagcgcacggatgaaccaatacgaacgcgaacggcactcccccaacatgcggacttccgaacagctggccatggtcctccaggtccccatggcctacctctattgccccgaggacgagctggccgagctcatcctcaaggtgtccagcctgacacccgagttcaagaaagagctgacgcgtttcatcgaacagttgctcgcggcccagggatcaaccagccgccagcctgtacgcacaaggagtgaactgtga

SEQ ID NO: 319455 - DNA, 399 bp, Pseudomonas aeruginosa
atgagaacaacaacaagcatccgccgtgtcgctgccgtcctggcagcgctgcacctgctcaccttcgccgaggttccgctcgcccaggcagcgatgatcggtactgcggaagtcatgcagcaacaacagcacaacctcgatcgccagcaactgctgaagatgctcgacgaccagggcgtccagaagaagctggaggccatgggcgtgccccgcgaccaggtggcgagtcgcatcaacagcctgaccaacgccgagctggcgcagttcaaccagcagctggaccaggcgccggcgggcggcatcatcggcatcatcgtgttgttcctggtgatcttcatcatcaccgacatgctttgcgccacggatatcttcagcttcatcaaatgcatcaatcggtga

SEQ ID NO: 319456 - DNA, 978 bp, Pseudomonas aeruginosa
atgcatcaatcggtgaggcggctggcaggggcactgctggtctccgcaatgctcggcggctgcgcgcagccgccgagactgccgccggaaagcgcggcgctgcccgcacgggtggagctgcgcgaagtgccgttcttcccccaggaagcctaccagtgcggtcccgccgcgctggccacgatgcttggccagcgcggcctggcgttgacgccggggcaattgaaggacgaggtgttcattcccggtcgcgagggcagcctgcaattggagatggtcgccgcggcgcgccgccacggcatgctggtctatccgctgcaaggcggactggagagcgtgctcgaggaggtcgcggcgggcaacccggtgctggtgttacagaaccaggctttctcctggtggccgcgctggcacttcgcggtggtggtcggtttcgatcgggagcgccgcgaactggtgctgcgctcgggcatcacccggcgctgggttaccgacttcaccagcttcgagtcgacctggaagcgttcggggcgctgggcggtgctgaccctgccgggtgaccgcctgccggccacggcagcggcggtcccgtggctcaaggccgccagtgacagcgaggaaaccggccaccccaaggttgcccggcgcgcctacgaagaagccgtgcgacgctggcctgaggacgccttcgcctggtttgccctgggcaacagtcgctacgccgcaggcgattccgccgctgccgaacaggccatgctcaccagcgtcgagcgtcgcgtggatttcgccgcgggttggttcaacctgtcccagttgctggcggaacgcggttgcgcggcgccggcgcgccaggcgcaggcctgcgcgcgggcattgcagcctggggaagcccgcttcgctgcggccttgccgcaggccgtcgcacccgcggctcggtgcgccgagctgccggcctgtcccgttggcgcaccgccccgctga

SEQ ID NO: 319457 - DNA, 957 bp, Pseudomonas aeruginosa
atggccaacgacaagcggacttcgccccccaccccccggcaaccggccaagggcggtgcggcgggcaagcgccaggggcatgcggcggagggcacgcgcaagccgcgtgcgcgcggcgaggagcggaaagagaaaccggccgacggacgttcggccacggcgctgaccgccaacgagcggcgggagatcgacgacaagcagccaccgcgcgccgctgtcctgcacgaggtgattcgcgtccagggcgaacacgagttgcagcgcacgctggcggcactctggtggtcggcggtggccgcggggctgaccatcggcctctcgttgatgggcatgggcctgttccgcgctgccttgcccgagcaggagtgggcgatcatcgtcagcagcttcggctatcccatgggcttcctggcagtgatcctcgcccgccagcaactgttcaccgaaaacaccctgaccgccgtgttgccggtgatgaccgagccgaccctggaaaaggcctggcaactgttgcgtctctggagcgtggtgctgttcggcaatatcgtcggtacgctgctgttcgcctgggcggtgctgcatctgccgatattcaatgaagcggccgacgcggcgttccttgagatcggccgcgaggtgatgcacaacgacctggcgcaaatgttcgccaagggcatcgtttccggctggatgatcgccaccatggtctggctgatcccggcggcggagggcgcgaagatctggatcatcgcgatggtcacctacctgatggcgctgggcagcttcacccacatcgtggtgggctcggcggaggtaggctacctggcgttcgccggggaaatcggctggaccgagttcctgctgaagttcgccctgcctaccctgggcggcaacatcgtcggcggtagcctgatcttcgccctgatcagtcatgcgcagatccgtagcgaaggttga

SEQ ID NO: 319458 - DNA, 1284 bp, Pseudomonas aeruginosa
atgccgcacaccccctacccctcctcctattacgccgcgtcggccaatcccgcgccgccccgcccggaactccagggcgaggtcgaaaccgacgtctgcgtgatcggtgccggctataccggcctctccaccgccctgttcctgttggagaatggtttcaaggtcaccgtactggaagccgccaaggtcggcttcggcgcttccgggcgcaacggcggccagatcgtcaacagctacagccgcgacatcgacgtgatcgagcgcaccgtcggcaagcgcgaagcgcagttgctcggcgagatggccttcgaaggcgggcgcatcatccgcgagcgcgtggcccgctacggtatccaatgcgacctgaaggacggcggggtgttcgccgccttcaccgagaagcagatggatcacctgcgcgcgcagaaacagttgtgggaacgctacggccacaaccagttggagatcatggacgccaagcgcatccgcgaggtggtggcgaccgacaactatataggtggcatgcttgacatgagcggcggccacatccatccgctgaacctcgccctcggcgaagcggcggcggtggagtcgctcggcggcagaatctacgagcagagcccggcgacccgcatcgagcgcggcgccagcccggtggtgcataccccgcaaggcaaggtgaaggcgaagttcatcgtggtcgccggtaacgcctacctcaacggcctggtcccggaactggcggccaagtcgatgccctgcggcacccaggtgatcaccaccgagccgctgaacgaggaactggcccacagcctgctgccgcaggactactgcgtggaagactgcaattacctgctcgactactatcgcctctccggcgacaagcgcctgatctatggtggcggcgtgatctatggcgctcgcgatccggcggacatcgaggcgatcatccggccgaagatgctcaagaccttcccgcaactgaaggacgtgaagatcgacttcgcctggaccggcaacttcctgctgaccctctcgcgcctgccccaggtcggccgcatcggcgacaacatctactattcccagggttgcagcggccacggcgtgacctacacccacgtcgccggcaaggtcctggccgaagccctgcgcggccaggccgagcgcttcgacgctttcgccggcctgccgcactaccccttccccggcggcaagctgttccgcgtaccgttcaccgccatcggcgcctggtactacagcctgcgcgacaagctcggggtctag

SEQ ID NO: 319459 - DNA, 438 bp, Pseudomonas aeruginosa
atgacgacctcttccggttcgcgtatcggcggacttcttcacgcttcccttttttccctgctcggactcggtctcctgctcgccggcggtttcaagaccgtcgagcggtaccatttcctgcgtactgcgcaggaagcccaggggacggtcagcgccttgaatgccggcggttcgcatccgcagatcgatttcaccagcgtttccggcgagcggatttcctatccccagggcggcttcatcttcggctaccaggtgggcgagccggttcgcgtcctctacgaggctgggcggccggcggccagcgcgatagtcgacgatgccggcgcgctctggggaaccagcgctttcctctgcggcttcggcgcactcttcggtattgtcgggttcaggggattgctgggcctgcgttcttcccaaccgacctcaaaaggacattga

SEQ ID NO: 319460 - DNA, 588 bp, Pseudomonas aeruginosa
atgtcgcaacttcccattcccttgcccctcaacgagagtcgctggcgctacgtgacggccagtggcggaggcatgaccgtggccttcctagcgggtagcggcggctccatcacgttgctctcgccggagggtgagaacgtgtccttccgctatggcggggtgggcggcgggatcggactgggcatgcgcctgccgcgcttcggcaaggtcaacctcaatgtcaagggcaagagcgttggcggggccggtgcgctggaggcgttgccgagcaccggaaccgtcttggtcgcggacggcctggtggggcgcgacctgtcccgcggcgacttcaccgggccctgcatgtacgtcgaactcggcgcgggagtcatcgccggcggttcgggcacggcgatcctcttcggcctcgatcccaagctgctggcggcggtggcgctggcgagcgcctcgccattgaccgccgcgctgggcgccagcatgtcgcggcaattactgcaatcgtcccgtggcgccctgttgatggccggggtcaacgtcggtgcacagttcggcggcggcgcggcggcttacctgggggcgttgttctga

SEQ ID NO: 319461 - DNA, 507 bp, Pseudomonas aeruginosa
atgcccggagggccgttgtcgcaagaatccgatgtccggatcttctgttcagccaaggagcggctggacttctaccggcgggaaatccactacgagacgggccagctatccagtcggaccaacgcctacctgacggcgcagtcgttcctcgtcatcgcctatgcctcgtcgatggccaacctgaacccggcctggggcgagctgttcaccctggtggtgccggcgctcctggcactgctcgggatcgtcaattccctgcatgcctggccgggcatccaggcatcctcggagatcatctgccactggcagttcaagcagtcctgcctgttgcacagcgatccggagatcggcctggcctacgatgattcgccattgttcagcgaacgcgaggtcaaccgcggcagcttcgagaaaaccttgctgttctcgcgacgcgtgccgttcctgttcgccggcttctggtgtgcgctgggcgtgttttcgctctggttgcaactggccggttag

SEQ ID NO: 319462 - DNA, 171 bp, Pseudomonas aeruginosa
atgagcaaactgcaacatatcggcctgttcctgttcgttcttctttccgccggcctggcgctcggctaccgagtcgactgcccggacggcagccatgtcgagacctacctgcttcgcggcctgggcgcgcgcctcctcggcaacgatctctgcgagcaggcagcgccctga

SEQ ID NO: 319463 - DNA, 222 bp, Pseudomonas aeruginosa
atgagcgacgaagacgatattcacgaacccgaacacgatcacctgctggataacgattacctcgaggacgagcgtgacgaagatacgttcggcgcgctcgacgagcccgatgcctgcggaaccggcaggcgacgttcctgcgaatattgcgacgcggtccaggtgccagtcgatagcgagggtttctctatctgcgccgattgcgcagggctggaggactag

SEQ ID NO: 319464 - DNA, 1026 bp, Pseudomonas aeruginosa
atgctcgcctgccccctccctcccgacgaagccctgcgccagcaggccctggacgacatggcgctggtcgacacccccgccgaacactacctggacgccctggtggaactggcgcgggaaaccttcggggtgaagaccgtgctgatcagtctgatcgaccacgaccgccaatggttcaaggcccgtatcggcctggatgccgaacagactccgcgcgacctgtccttctgcggccacgccatcctggccagcgaaccgctgatggtgacggacgcctccagggatccgcgttttcacgacaatccgctggtcaccgggccgcccttcatccgcttctacgccggcgagcccctgcacgccagcaatggccaggccatcggcacactctgcctgatcgacccgagcccgcggcttctggatctccgggaaggacgccagctcaatcgactgtcgatcctggccgaaggatatctccagctacgcagcctcaccgagcacacccgcttcctgcgccaggagatcgaccgggagcagcgcaagtcactgctcgaccccctcacccaattgtggaaccgggccggcttccacgcgctgcaccagcatgaactggagttggcgcgggccagcgaccagcgcatcggcatcatctacagcgatatcgaccatttcaaacgtatcaacgacaccctggggcaccgggccggcgacagcgtcctccgcgaggcggcttcgcgactgcgcgcggcgctgcggccggaagatctcctggcgcgtttcggcggcgaggagttcgtggcgatggtccgggtccgcgagaccacggaactgaccatgatcgccaatcgcatccgcgaactgatggaagcgaccccgatcgactgtgccggcacgtccgtgccggtgaccatcagtgccggctgtaccctggccggcagcggcgaagaaccggaacgggcactcgcccgggcggatgccgcgctgtacgacgccaagcgtgccggacgcaaccgggtggtcagcgtctga

SEQ ID NO: 319465 - DNA, 267 bp, Pseudomonas aeruginosa
gtgcaggaaatctactctgaagaacagatgcgcaaggcgctgggccttgccgaaacgcgaccgaaaaaggtccggaccgaggccagccagccggtccgctacaccatcgtcgaactgagcgtgcgcaagggcggggcgggattgccgctgcgtttcgaacatcgctcgcgctccatcagcaaggtcaccgcgcaactggaagcggagaaggaagccaagcgccagggttaccaggtctgggcgctgctggatatccgtcagatctga

SEQ ID NO: 319466 - DNA, 780 bp, Pseudomonas aeruginosa
atggaactgacgatcttccaggtagacgcattcgccgacagtcccttccagggcaatccggcggcggtctgccccctcgatgcctggctggacgacgagcgcctgcaggccatcgcggaagagaacaatctttcggaaaccgcctttgtcgtcggccgcgacggcgactatcgattgcgctggttcacgccgcaggtcgaggtggacctgtgcggtcatgcgaccctggcgacggcctgggtactgatccacaagctcgacgacgcttccccggtactgcgtttcgctacccgtagcggtgaactgagcgtgcggcgcgagggcgactcgctggcgatggacttcccggccaagcgtccggagccttgcgcgacaccggacggactgctggaggcgctgggtattgccgaggcggaagtgctgaagaccgacgattacctcgtggtggtcgacgacgaaaagacgatcgccgccctggcgcctgacttcgcccggctgaagggcttgccgtgccgcggggtggcggtgaccgcgcgcagccagcgcttcgatttcgtctcgcgctggttcgggcccaacgtcggcgtcaacgaagacccggtgaccggctccgcgcatacctccctggcgccgtactgggcgcagcgcctgggcaagacccggctgagcgccgagcagggcggggcgcgcaaggggcgcctggaatgcgacgtgcgcggcgagcgggtggtcatctccggcaaggcggcgttgtacatgagcggtacgctccatctctga

SEQ ID NO: 319467 - DNA, 411 bp, Pseudomonas aeruginosa
atgccggcaccgcaggtaggcgtgggcgtcctgatcttgcgggacggcaaggtgttgctggggcgccgcaagggcagtcatggcgctggctgctggtcggcgcccggcggccatctcgagttcggcgaggcggtggaggactgcgccctgcgcgaagccctggaagagaccggcctggcgctgagcgaactgcgccacggcccgttcagcaatgacgtcttcgaggggcgccactacctcaccgcgttcatcctggccggttgcgcggaggatgccgaggcgcgcctcatggagccggacaagtgcgacggctgggcctggttcgattgggccgatctgccggagccgctgttcgcgcccctggcgagcctgcgccggcggggctattcgcccttcgacccgaagcgctga

SEQ ID NO: 319468 - DNA, 483 bp, Pseudomonas aeruginosa
atgactgcctccccttccccggtttccgccacgccttggctgaccctgagcattcgcctgatggccggcggcttcctgctgttcttcggcctggccctggccacgctgctcctgcggctcgaccagtcgctgctcgactccgacgccgggcgcctgctgctccgcctggttcgctggggcgaccagcaaggcggcggacagcactatgagctgatgatctcgacgatctacctggtctggggcgcattcctctggcgcgccgccagccagcccttccgccaccggctgttcatcgacttcaccgtggcggccaatgccgcgcacttcggcctgatgttcctgcagggactgttgatgcccggcgaacacatccacctggccggcgatgtcctgctgggctgggcctcgctgctgccgctgatgctgttctggataccgcaacgcaagcgggcagccccttcgctcgccgtcgagcggaggtga

SEQ ID NO: 319469 - DNA, 969 bp, Pseudomonas aeruginosa
atgactctagcaccgcgacacctgcgcatagaacaacgaggacgcgtcctgcaagtcctgctcgacaatcccccggcgaacttcctcaccacggcggtgatgcaggagctggccgacctgctggaagaccttgagcaacgccaggacatcggcgccgtcatcctttccggagcggcggacggggtcttcctgacccacttcgacgtcgacgagatcgagcgcgccgtcgcccccatcaccttttccatgccggcctggctgacacgcctgctgctggaaagcgaaagcctcctgcgccacttgcctggggcgaggaagctgctgcggcgcaccctgctggcaggcgtcgccgacatgaacctgttccatgaggtcaccgcgcacatgcgccgcatggacaaggtgttcatcgccgcgatcaacggcctggccctgggtggcggctgcgagctggcgctggcctgcgacctgcgcctgatggccgaggacgaccaggtggaacgcttcctcggccagccggaagtactcatcggcctgataccgggaggcggcggcacccagatgctggcgcgcagcctgggcgtagccagggccctggagctgtgcctggaagggcaactgctggagccgcgccaggcccttgcgctgggcctggtcaacgggctggcgccagcggaggagctactggaagccgccgacgcgctggcgcaacgcctgtcccggcgctcaccgcaagcggtgcgcctgatcaagcgttcgatctaccaggcggcttcccgcgactggacggagggcatggccagcgaaaaggccggcttcctctccgccgcctcccagggcaatacccgccgcgccatgcgcgaatacatcgaacgggtgcgcaccatcacccgggaagagcgccctttccgccgtgcggattttgacgacctgaccgaaggcaatgccatcgacatggcctacaggtga

SEQ ID NO: 319470 - DNA, 582 bp, Pseudomonas aeruginosa
atgcgctacaaaccggaacagaaacaggccacccgcgccctgctgttgagcaaggccgctccgctggtgaagcgccagggcttcgccagcaccggcctggacaccttgatgaaggcggctggtcttaccaccggggcgttctactcgcagttctccagcaaggcggagttgctcgaagcgatcctgcagcgcgagctgagcgcccagcacgatgcctttccgctggacagcctggagcaactggccggcgccacccgtctctacctcagtcgcggtcatgcgcagcatgccgacatgggctgcccgattccggcgctggccgccgaggtgggccgggcagggcccgaggtgcgggaaaccttcgaacgggccctggaacagcggcaacggcggctggccgaactgatgggcgacgagaaccgggcctgggtgctcacctgcctgtcggtcggcgcggtgcttctcgcgcgtgcccaggcgagcgaggtggcgcgcgacaaggtcctggatgcggcgctggagcatgcgctgggcctgctttcggcgagcggagcggtttcgccgcaagcggaccgggactga

SEQ ID NO: 319471 - DNA, 882 bp, Pseudomonas aeruginosa
atgagcgcggctcagccaggcattctcaccccgattccggtggtgggtcgctacctgtttttcagcatttcccaacccgagcaggtggccgcgaccttggccagcctggccgcggccaccgatggttaccagctggtggtgggtatcggccattcgctgatgctcagcctcggcaagaccgtcgagggcatgaaggactatccggtgctcgccgcgcccggcatcgacctgccgtccacgccctccgcgctgtggtgctggctgcgcggcgaggatcgcggcgaggtgacgctgcgctcgcacgcgctggaacggtcgctggcgccggccttccagcggaccggcgcggtggatgcgttcctctacggcgaggaccgcgacctgtccggctacaaggacggcaccgagaaccccaagggcgatgcggcgctcgaagccgcgctggtctccgggcgcggtgcgggcctggatggcggcagtttcgttgctgtccagcagtggctgcatgactttgaccggatgcaggcgatccccggcgaggagatggacaacatcatcggccgccgcaagtccgacgatgaagaactggaagacgcgccggcctacgcccacgtcaagcgcaccgagcaggaaagcttcgagcccgccgcgttcctcctgcggcgcggcgcgccctggtccgacgagcaccgcgcggggctgttgttcgccgccttcggccgctcgttcgaggccttcgaggtccagtggctacggatgatcggcgtggaagacggggtgctcgatggcctgttccgtttcacccggccgatcagcggcagctacttctggtgtccgcccatggccgacggccgcctcgacctgtccgccctcggcctctga

SEQ ID NO: 319472 - DNA, 783 bp, Pseudomonas aeruginosa
atgagcaacctgcctgcgatcatcctggtccacggcttctggggcggcgccgcccactggagcaaggtcattctcgaactgaaacgcctcggccacgacaacctgcatgccgtcgaactaccgttgacctcgctggcggacgatgccgagcggacgcgcaagatgatcgcgcagcaacaggggccggtcctgctggtcggacactcctatggcggcgcggtgatcaccgaggccggcaaccagccgaatgtggtcgggctggtctatatagccgccttcgcccccgacagcggcgaaagtcccggtggcatcacccaggagcacttgcccctggccgcagcgaacctggcgccggacagcgatggctatctctgggtgaaggcggacaggttccacgaaagcttctgccaggatctcgctgcggacgaagggctggtcatgggcatcacccagaaggctccgctggccagcactttcggcgatgccatcggcagcccggcctggaagagcaagccctcctggtaccagatttccagcgccgatcgcatgattgcgccggagaaccaggagcggatggccgcgcggatcgcaccgaggaagatcgtcaccctcgatgccaggcagcaggcctggcctgctgccgcggcgggctcagaggccgagggcggacaggtcgaggcggccgtcggccatgggcggacaccagaagtagctgccgctgatcggccgggtgaaacggaacaggccatcgagcaccccgtcttccacgccgatcatccgtag

SEQ ID NO: 319473 - DNA, 210 bp, Pseudomonas aeruginosa
atggaaaaagctctgaaattggcgtcatgcctctacggcctgctgatcctgctcagcctggcgatggtcgccttcctcagccagtttccgtttctcctcagctcgggagcggaaaacctctcgatgtcgatcctgccgctgctgatcccgctgatggtcgggctggtcgtctgcgaggcggtgcgggcggtggtgccgaagaagcgctag

SEQ ID NO: 319474 - DNA, 189 bp, Pseudomonas aeruginosa
atgccacgcattgccctggtcctgggtgtgctgctggtcagcgcctgcgcacagcctgtcacgccggactcgatagtcgaggaatcgttttcccgcagcgccagcgaacgccagctggaagagctgaaccgccagggccttccctacgagcagtaccggctgcgccgccagcgcattctcggccgctga

SEQ ID NO: 319475 - DNA, 210 bp, Pseudomonas aeruginosa
gtggacgatacgctcaggttcgcctcgcgcttgtgcaagttcatcgtcgccgccagcttcctgctcgtggcggtcgccagcctttgcctgtggtggacgggccaggcctacgaatacgcggcgctggcgttctttccgttcgccgtacccatgctgctgctgatcatggtctgcgacctgctggcagcgctgaatggcaggcgtcgctga

SEQ ID NO: 319476 - DNA, 345 bp, Pseudomonas aeruginosa
atgtcagatttcatcaccgtactgcgcgatacctgtcccgtacccgtgctggacgccaccaagtggaagcggatcgacggcgatccgcataccgtcaacctcaacgcatacgcctcggcggacggcagcaagctgatgggcacctggatctgcacgccgggcaagtgggaggtgaactacgaacgctgggagttctgccacttcctcgacggctactgcatcatcaccccggaaggcgagcaaccggtgcacctgagggcgggtgacgtgttcgtcatcgagccgggcctgcgtggtacctgggaggtagtggagacggtgcgcaagtacttcgtcttcgcctga

SEQ ID NO: 319477 - DNA, 372 bp, Pseudomonas aeruginosa
atgccgttccggaaacaccttctgctccccctcctcggtcttgccctgctgctcggcggttgcggccctagcgtcagctactcctacattccgccgaccagcgatgccggcctgcactgcgtgagccagtgcaatgccgagaagcgccagtgcaagaccctcgccaagctgcagcagcgccaggacgaggcgctctaccaggcgcagagcacggcctacaactactgcatgcagaacagcgacaagaagaagcgcaagtcctgcccctacccgcagcgcaacttcgatttcggcgacgactgccaggacgagtaccgcagttgctaccagtcctgcggcggcaccatccgccgcatcgtccaccaggactga

SEQ ID NO: 319478 - DNA, 1281 bp, Pseudomonas aeruginosa
atgttgaagaaaaggatttgcctgctggcactgggtatcgcgactgcaagccaggcgatggccaatgaccaagaagcagcaaaggggtttgtcgaggacagccacctcgatctgttcttccgcaatgcatatatcaaacgcgacaagaagtacggtacagaggaccaagcagagtggggccaggctgcaaccgcgaccttcacttccggcttcacccaaggaaccatcgggataggtgtggacgtgttcggtatgtacgctgttcgcttggacggcgggaagggtcgtagcggcgccgccggtatcgacttcttcaagcagggcgacagcggctccgcggcggacgatctgtccaagggcggcgcagcggtgaagttccgcatctccaacaccgtgctcaagtacggcgaccagatgcccagcctgccggtgctcagctacgacaactcgcgcctgctcccggaaagctacagcggcaccctgatcacctccaaggagatcgagggcctggagctgaacgccggtcgcttcaccgcggaatcccgcaagagcgccgaagggcgcgacagcggcggcctgaagagcatcaacgtgttcggcggcaagtacgccttcaccgatcacttcaacgcctcgctgtacgcttccgacgtcgaggacgtactgaagaagcagtacatcaacctgaactacaccatcccgctgcaggccgaccagtcgctgaacttcgacttcaacggctatcgcaccaagctggacagcgacttcgccgaccagaacttcaacggtaaccgcgacaacaagatctggagcctggcggcgtcctacaccatcgacgcccacaccttcatgatcgcccaccagcgcaacaccggcgacaccggctacaactacggctggtaccagaacgccggcggcatcggcgacggcggcaccaccatctggctggccaactcctactggtcggacttcaacgccgaggacgagcgttcctggcaggtcagctacgccctggacttcgccaagtacggcgtgcccggcctgacctaccgcgtagcctacgtgcgcggcgacaacatcaagaccgccgagaccagcaacggcaaggagcgcgagatcttcaaccaggtccagtacgtggtgcagagcggtccggccaaggacctcaccctgcgcctgcgtagctcgtttgcccgcgtttctgctgatgcccgcgatagctacttcagtggcggcaacgaaatccgtgccttcgtcgagtacccgttcagcgtgttctga

SEQ ID NO: 319479 - DNA, 315 bp, Pseudomonas aeruginosa
atgaagattcttatcgctgtattcgccgccctggccctctccgcctgtgcctcgcctcccgcttcgaacgccccggcgctggccgccagcaccagcaaggctccctacgattacgcgatgtgcgtcttgcccaagtggcaacgccaggcgccgggcgtggcgctgatggaggaaggccgcggctatcgcctggcggacgccggtcagtggctggaggtgcagccggcgagggggggcagcctggtgcgaatccatgaccagcagccctgggtcacccgcggggccttcatcgatgcggccaggacctgttcctga

SEQ ID NO: 319480 - DNA, 888 bp, Pseudomonas aeruginosa
atgaacttttccagcgataccatcgagctgttcctcgccgtcctcgaccgcggctccttttccggcgccgcccgtgccttgggtcgagtgccttcggcggtgagcatgggcatcgccaacctggaggcggagctgggtttcgcccttttcgagcgaacccaccgcgaagcccgtcctacggcgctggccagggccctggcaccgcaagcgcggatgatcgccgagcagctcgcccagttgcaggtgcatgcgctggaactctcccagggattggaaagccgcctgtcgctcggcgtggttgcggacatcgacagcgggcggctgttcggcgccctccgcaccctttccgagcgctacccgctgctcgatgtcgaggtgctcagcgcggcgcaggacgatgccctcgccctgctccatggcggccggatcagcctgtgcttcggattcgccggcatcagcgtgaacccgcaggagcgcttccagtatgtcggcgcggaatcgctggtcgcgaccatctcgccgcgccatcccgccctgcagaagccggggcaggcgctgtacctggaagagctggtgaacgtgcggcagatcctggtcgccagttgcgacctgccgttggccgacacccgtccgctgattgccggcgcctgctggcgcaccgacagcctgggcacggcgctggaaatggtcgaggcggggatcggctggggcaatttcccgttgtcccgggtcgcgccgctgctggcaacgggaaggctggtacgcctggacttcaggaataccaagaacgagctgaaactgcctgtccacgctatctggctgaaaaaccagccattgcgcaaggccgcccaggaactggttggcatgctggccacccgtcccgattga

SEQ ID NO: 319481 - DNA, 444 bp, Pseudomonas aeruginosa
gtgcaaggcatcaagcgcaaattggtctacgtgaccgcctacgaattgatcgggatgagtatctcgaccctggggctggccctgctcgccggttccacgcccactaccaccggccccctggcggtggtgatcaccaccgtcgcggtgacctggaacttcatctacaactgcctgttcgagttctgggagcggcgccaggccgtgcgcggacgcagcattgcgcggcggatggcgcacgccatcggcttccagctgaccctggtggtctacctgatcccgctgatcgcctggtggatggggatttccctgctggaggcgttctggctggacctggcgctgatcgtcctgatcccgtgctacaccttcctcttcaactgggccttcgatcgcctgttcggcctcccgacttccgcgttgccggccggcgaggcagcctccgtctga

SEQ ID NO: 319482 - DNA, 387 bp, Pseudomonas aeruginosa
atgctactgggggccgtcttgctggcgggttgttcgacatcgacgccctcgctcgacgagacggaccaggtaccgaaggagcgtttgtacaactaccagttccgtgacgacggcgacgccttcctggtggtttcccgggaccgcgagttcctcggcagcgtctgcaatacccgcttgatcatcgatagccgcctggccgccgagatccaggccggcgagagcgcgcgtttccgtcttccggcggggctgcgggtggtatccgtgcagggcgatgggatctgccgcggcgaggcgcccaagcaggtggtgcatgtgcagaacgggcagaccacgcattaccggatcaccgtggactccggcttgaacatcggcctggtgccgggctga

SEQ ID NO: 319483 - DNA, 471 bp, Pseudomonas aeruginosa
atgaaagcactactgatcgccgccggcgttgccgctctttccagcaccgccatggccgccaaactggatgaaaaggttccctacccgaaggcagatgccggcttcacccgccaggtcatccacctgccgaaacaggacgcggaagacgcattcaaggtcgagatcatcgccggcaagaccctcgaggccgactgcaaccagcagcgcctgggcggcgagctggaagaacacaccctggaaggctggggctactcctactaccgcctggacaaggtcagcgggccgatgagcacgatgatggcctgccccggccagaagaaggagcagcgcttcatcccggtggtcggcgaaggcttcctgctgcgctacaacagcaagctgccgatcgtggtctatgcgccgaaggacgtggaggtccgctatcggatctggtcggcgtccgaaaaggtcgagaaagcggtcagcgaataa

SEQ ID NO: 319484 - DNA, 231 bp, Pseudomonas aeruginosa
atggacaccagcccgcacaccttttccaacctgttccgccagttggggctccccgctgggcgggacgacatcgtcgcctttctcgcccggcaccacctcgaggagggcacggcgctgcccgatgcgccattctggaaccctgcccaggccagcttcctgcgcgaggccctggccgaggactccgactgggccgaacaggtcgatgaactggccttgcaactgacccgctga

SEQ ID NO: 319485 - DNA, 198 bp, Pseudomonas aeruginosa
atgtccagaatcgaagtcgccgtgctggtggggacgtccgttcccgaatcgctgcgcagcaagggattgctggcctgttggatcctgatggtggacggcgccatgtgggccggccccttcaccagccgtgacgaggcggaagccttgaagggaacctgggaactgagttggccgctggaggcggcgatctccgcctga

SEQ ID NO: 319486 - DNA, 330 bp, Pseudomonas aeruginosa
atgactctgaaaacccgctccgctcgcgccaagcaggctatccaggaccaggccatggccgaactgcaggacctgatcgccgaggtggaccagttgatgagcggcaccggcagcctggccggcaaggagggcgcaaacctgcgtgaacagatcaattccgtgctgcatcgtggtcgcgacgccatcgagcgcacccgccgcggcgtggtgcaacgcagccaggcggccgccgaagcgaccgaggaatacgtcgaggaccatccctggcagaccatcgccgtctcggccggcgccggcttcctcctcggcctgctggtgggccgccgctag

SEQ ID NO: 319487 - DNA, 375 bp, Pseudomonas aeruginosa
atgttcattcccggccatctgcatctcgcctcggccagcgaagtcgaccgccaggcattcgatatccacctgcgctaccgggtcctggaggccgaggcccgcccggtggccgtacacttcgacatggagggccggatcgacggccagcctttcagcgaaagcttcgaactgccgcgcgacgccgccgtgcatttcgccagccgtgccagtcgcctggcccggcgccacggcctgcgcttgcggcagggaccgatcgtgcgccagcgccgcgagtacgacgctatgttcgacgacctgcgccgacgcctgaaactcaagagcggcgaagcgatcgacctcgaccgctacctgcgcggcgaggccggggcatcctga

SEQ ID NO: 319488 - DNA, 444 bp, Pseudomonas aeruginosa
gtgttgactgactgggccgcgtacgccgggctgttcctctcggcgttcggttcggcgaccctgctgccgttgcagtcggaaaccgtgctggccgccttgctgctgcgcggcggccagtcggtcgcgtggctgctggcgctggccatcgtcggcaatgtgctgggttcctgggtcaactggtggctgggtcgctacctcgagcatttccgcggtcgccgctggtttcccgtgggcgaggcgcagttgctcagggcgcagcgacactatcgccgctacggccgctggaccctgctgctcagttgggtgccggtcatcggcgatccgctgacgctggtggccggcatcatgcgtgagccctgctggagtttcctgctgatcgtcggcctggccaagacgctccgctacctggtcctggctgcgctggtgctgggctgggccggctga

SEQ ID NO: 319489 - DNA, 318 bp, Pseudomonas aeruginosa
atgtcgagggtggttgcgggatcgctggtctgcctgctgctcggttcggcgccggcctgggcttccacggccgaggcgtggcaggcgcacgacgccatggtgcgtgccgcctgcctgaaagccagcggcttgcgccaggtacgcgcggtggggcaggtactgcccttcgacgatgaggtgggctattcggcgctgctcctgcagggccgctatccgcagccgcacatgcagggccgccagggccgcgagctgtgtctgtaccggcgcgccaccggcaaggccagcgtcagcgaggccgacgccctgctcaagccttga

SEQ ID NO: 319490 - DNA, 900 bp, Pseudomonas aeruginosa
atgttccgtacggcttatcgggaaataggcctgttcggcctggtcaagcgcacagtgaacgagttcctcgaggacgacatgccgacctacgcctcggccctcgcctatcagatgctgttctcgctatttccgttcctgctggtgctgatcaccctcgtaggctacctgcacctgccggagttcttcgcctggctgcgcgagcaggcggcgttgctgctgccgcccgaggcgatggatcaggtcaacccggtgatcgaccagttgcagcagcagaaaggcggcctgctgtcgatcggtatcgcggtggcgctgtggacctcctcggcgggcatccgctcgatgatgatcgcgctcaacgccgcctacgacgtgaaggagagccgcccggtatggaagcgcttctccctgtcgatcctctacaccctcggcatcgccctgttgttgctggtggcggccggcctgatggtcaccgggccgcaggtgatcgcctggatcgccggcctggtcggtctggaacagtacctggtgacgctctggacctggctgcgctggcctcttgcggtgttcctgctgatgctcgcggtggcgctgttctactacctggtgccggatgtcgagcagcgtttccgcttcatcactccaggctcggtgctctcggtgatcgcctggatcgccgcgtccctcgcctatggcttctacgtgaagaacttcgccaactacaacgccatgtacggcagcatcggggcgatcatcatcctcctgctgtacttctacctgtcggcggcagtggtgctgttcggcgccgagctgaacgcggtgatcgaacaccattcggaagacggcaaggaccctggcgagcgcgaacttccggacaacgacgaccccgaactcaaggcttga

SEQ ID NO: 319491 - DNA, 234 bp, Pseudomonas aeruginosa
atgtctgtcgacctgaagaaaatcgccgctgcctttcccgagttccagttgtccagcaagagccgccatgacggcgcgctgttgttgcagttgcaggccgccgacggccgctacgtggctcgcaccataccctcgccgcagctcagcgcgccgccggagaccgagtggctgatccgcagcatccgccgggaactggccgtgccgggcatggaaatggcgatggcggcacgctga

SEQ ID NO: 319492 - DNA, 231 bp, Pseudomonas aeruginosa
atgaagcgcgagaaggttcgggacaggcaggcggcagggaagatctcggcgacccacatcatcgccaatcccaccctggccagggaatggatcgtgttcttcaagaaggacggcgggcgcagctatttcctggtcgacgagagcgacgaggtgatgtcgttccgccggctcgacgacgcggtcaaggagctgcgcgggctgggcatcaagttcgcggagatccatctctag

SEQ ID NO: 319493 - DNA, 519 bp, Pseudomonas aeruginosa
atgatcttccgcaccctcaccctgctgccgctctgcgccgccctggcgttcgccgccgacgccggggagcgccgcttcgactgcacggtggtggcgatacacgacgacgccagcctgggctgccgcctgcccggcgcgaacaaggcgctacgcatccagctcaatgccgtcgagctaccggccgccgagccctggcgtcggcgcgcccgggaagccctggaagacatgctgctcggcaaatcggcgaccatccgcgagcaaggccgcgacgcgcgcttccgcatcctcggcgcggcctgggtcaccccggccgactgccccacctgcggacataccctggatgccgggctggccctgctgaccattggcctggccagctggcgcgacgcgccggacagcggccagacggccgaggcgcgcggccagtaccggttcgccgaggaagaagcgcgggcgcgcaaggctggccagtggcgaccgcgcgacgccgctcctagagatggatctccgcgaacttga

SEQ ID NO: 319494 - DNA, 714 bp, Pseudomonas aeruginosa
atgctttcccgtttgtttgtaggccttttcgccctcctcctcgccagcgccggccaggccaacgccccgcgcacgttctccgaagcgaagaaaatcggctggaagctctacgcccggcaatccgtggagttctactgcggctgtcgctactcgggaaatcgcgtcgacctcgccagttgcggctacaagccgaggaagaacgccaaccgcgcgcggcgcatcgagtgggaacacatcgttccggcctgggtgatcggtcaccagcggcgctgctggcagaacggcgggcggagcaactgcgcgaggcacgacagcacctaccagcgcgccgaggccgacctgcacaacctggtgccgagcatcggcgaggtcaacggcgaccgcagcaacttcggcttcggctggctgccgcagaaaccccagcaatacggcgcctgcccgatggtggtggacttcaaggcgcgcaaggcgatgccacgcccgcagattcgcgggatgatcgcccgcacctacttctacatgagcgaccgctacggcctgcgcctgtcgaagcaggatcgccagctctacaacgcctggcacaagcagtacccgccacagacctgggagcgccagcgcaaccacatggtcggctgcgtgatgggctggggtaatccctatgtcggcccggtggacctggcgacctgcagcaacctatcctcgcgtcgacgctga

SEQ ID NO: 319495 - DNA, 222 bp, Pseudomonas aeruginosa
gtgggcctggtgaagatttccgagcaattgcacgaagaggcgcgcatcgcctgcaaggccatgtcgcgctcgatcaatgcccaggccgagcactggatgcgcatcggcatgctgatcgaagccaatcccggcctgacctatgcgcaggtgctacgccaattgatggacgaagcgcgcgaaagcgaccgccgcgagcaggacgcggcgaggatctcgggatga

SEQ ID NO: 319496 - DNA, 783 bp, Pseudomonas aeruginosa
atgatcaagagcgcggaggaaatccagcgcatgagcgtggccggcgcgctcaccgcgaaagtcctcgaagtcctcgacgaggtggtgcggcctggcatcagcacggcagagatcgaccgcttctgcgagcgctacatcgtcgacaccctcgcggcgattcccggcagcaaggggcagtacggctatccgttcacggtgaacacctcggtcaacgaggtggtctgccatggctggccgtcggcgcagcagatcctccgcgacggcgatatcgtcaacgtcgacgtcacggtgatcaaggacggctatttcggcgacagcagcaagatgtaccgggtcggcgccatcgaccgccaggcgcagaagctgctcgacgtcacccgcgaatgcctgtaccgggcgatccgcgtggtgcgcccggacgccaccctcggcgatatcgggcatgccatccagagtcacgccgaagccaacggttattcggtggtccgcgaatactgcgggcatggcatcggccgcaagatgcacgaggcgccgcaggtcctgcacttcggtcgcgctggcgcgggtgcgcggctgaaggccgggatgaccttcaccatcgaaccgatgatcaaccagggcggccacgcggtgaagctgcacaaggacggctggaccgtgaccactcgcgaccgccgcctgtcggcccagtacgagcacaccgtgctggtcaccgagcggggttgccgggtcctgaccctgcgcgacgaggagcgcgaggcgctggccgacctggctggctga

SEQ ID NO: 319497 - DNA, 234 bp, Pseudomonas aeruginosa
gtgtccggcaggcgttttggcgagttcgaactgcgcgccacttggttgcgcgaggacagcggctatctggccgagatcgagataaccagcatcgacgacggacgcaccgaatggctggtgctgccgggccagccgccgtgcgagagtccggcggccgcgctgtcgctggcggaagcggcgctgtaccgggtgcgcggcttcgatgcgcggggccggccgctgttttccgactga

SEQ ID NO: 319498 - DNA, 288 bp, Pseudomonas aeruginosa
atggaaaagtccatcaagatgctgttcgatgccttccaggccacctttgccgtatccacccagatgcgtccggacggcggcgccctcctgaccctgcgcaacggcgaagagatcgtgacccgtcgcgtggtgtccgccgcccagttggccgacgagaagcgcatgtactggttcatcaacgccgtgcgccgtgacctggccctggaggcggggagcctgccggtggatgtggtcggcaccctgcgtcgtctgcaggagcgcggcctgccgagctacatggcgggctga

SEQ ID NO: 319499 - DNA, 177 bp, Pseudomonas aeruginosa
atgactcccgaatccttcgtcacattgctgatcgtcgcctggctgggcctcgccggcgtcaccctgtgggccttcctgcgcgtgccgcgtcggcgcgcacgcctgcaacgcaaggcacggcaagccgaaaaccggcatcccgcacggccgccacagcctcttccgcagcgcagctga

SEQ ID NO: 319500 - DNA, 327 bp, Pseudomonas aeruginosa
atgaatacgccgatcttctacgagctattccgcaaccacccgctgcatgccccgtccgcccggaccctggcgagcatgctggccctcggcctggctctggccggggtatgggccctgctgctgggctggggcatcggcctgggcatcgacaacttcgccatgtacttcggctggaccgccctgctcatgaccatcctcctggtcgcgctgttcctcggcgccacgctgttgcgcatggaagccatctggctggctttcctgctcgccctgcccctgctgaccagcctgaccggctgcctggccctggtcggtgccggccccgaatga

SEQ ID NO: 319501 - DNA, 864 bp, Pseudomonas aeruginosa
atgagtggcgaactcgcctcgttcgaggtggatgggtatcaactggtctatcaggacctgggcgagggcacgccggtgctactggtccacggttcgctgtgcgactaccgctactggcaatggcagttgcgcagcctcggcgagcgccaccggctgatcgtgccgagcctgcgtcactactaccccgagcgctgggacgggcagggcgcggacttcaccagcgcccgccacgtcgccgacctgctggcgctggtcgagcggctcggcgagccggtacacctgctcggccattcccgtggcggcaacctggcgttgcgcctggcgctggccgctccggacgccctgcgttcgctgagcctggccgatcccggcggcgactatgccgccgaggtctacgcccacgccggcctgcctgcgcccgaggaaccattggaacgcaaccagttccggcgccaggcgctcgaattgatccgtggcggcgaggcggaacggggactggaactgttcgtcgatacggtgagcggcgccggggtatggaaacgctcgtcggcgacgttccgccgaatgaccctggacaacgccatgaccctggtcgggcaggtggccgaccagccgccggcgctggcgctgtcggaactgcgctcgatcgacctgccgagcctgatcctcaatggcgaacgcagcccgctgccattcccggccaccgccgaggcgctggcggcggccctgccgcgcgccgagctgcaacgcatccagggcgcgtcccatggcctcaatgccacccgtccggcggctttcaaccggtcggtactggagttcctggcgcgcgtcgatggcgttgcgccggacgtggaaacgtcctga

SEQ ID NO: 319502 - DNA, 1923 bp, Pseudomonas aeruginosa
atgcccatcattactcttcccgacggcagtcaacgttccttcgatcacccggtctccgtggccgaggtggcccaatccatcggcgcgggcctggccaaggcgaccctcgccggcaaggtcgacggccgcctggtcgacgcctgcgacaccatcgatcgcgacgcgaccctgcagatcatcacgcccaaggacgaggaaggactggagatcatccgccactcctgcgcccacctggtcggccatgcggtcaagcagctctatccgaccgcgaagatggtcatcggcccggtgatcgaggaaggcttctactacgacatcttcttcgagcgccccttcacccccgaggacatggcggcgatccagcagcgcatgcgcgagctgatcgacaaggactacgacgtgatcaagaagatgaccccgcgcgccgaggtcatcgagctgttcaagtcccgtggcgaagactacaagctgcgcctgatcgacgacatgccggacgagaaggccatgggcctgtacttccatgaggagtacgtggacatgtgccgcggcccgcacgtgccgaacactcgcttcctcaaggcgttccagctgaccaagatttccggcgcctactggcgcggcgactcgaagaacgagcagttgcaacgcatctacggcaccgcctgggccgacaagaagcaactggcggcctacatccagcgcatcgaagaggccgagaagcgcgaccatcgccgcatcggcaagcagctcgacctgttccacctgcaggaagaagcgccgggcatggtgttctggcacccgaatggctggagcgtctaccaggtgctcgagcagtacatgcgcaaggtccagcgcgaccatggctatgtcgaagtgcgtaccccgcaggtggtcgaccgcatcctctgggagcgttcgggccactggtcgaactacgccgagaacatgttcaccacctcctcggaaagccgcgactacgcggtcaagccgatgaactgcccgtgccacgtgcagatcttcaaccagggcctgaagtcctatcgcgacctgccgctgcgcctcgccgagttcggcgcctgccaccgcaacgagccgtccggcgcgctgcacgggatcatgcgcgtacgcggcttcacccaggacgacgcgcatatcttctgcaccgaagagcaggtgaagaaggaagcggccgatttcatcaagctgaccttgcaggtctaccgcgacttcggtttcaccgacatcgccatgaagctgtcgacccgtccggccaagcgcgtcggttccgacgagctgtgggatcgcgccgaaggcgcgctggccgatgcgctgaacgaatccggcctggcctgggaataccagccgggcgagggcgcgttctacgggccgaagatcgagttcaccctgaaggactgcctcggccgtaactggcagtgcggcaccctgcagtacgacccgaacctgccggagcgcctggacgccagctacatcgccgaggacaacaaccgcaagcgcccggtgatgctgcaccgtgcgatcctcgggtccttcgagcgcttcatcggcatgctcatcgagcactacgccggagccttcccggcctggctggcgccgacccaggcagtggtgatgaacatcaccgacaagcaggccgatttcgccgccgaggtggtgcggatcctcggggaaagcggattccgtgccaagtccgacttgagaaacgagaagatcggctttaaaatccgcgagcatactttgctcaaggttccctatctcttggttattggagatcgggaagttgaatcgaaggccgtcgcggtgcgtacgcgcgaaggggaagacctgggctccatgcccgtcacccagttcgctgagctgttggcacaggcggtttcccggcgtggtcgccaagactcggagtaa

SEQ ID NO: 319503 - DNA, 465 bp, Pseudomonas aeruginosa
ttgattggagctgatggccagcaggttggtgttgtttcgatcgatgaggcgatccgcctagccgaagaggcgaagctggacctggttgagatttcggccgacgcggtgcctcctgtctgccgcatcatggactacggcaagcacctgttcgagaagaagaagcaggctgcggtcgccaagaagaaccagaagcaggcgcaggtcaaagaaatcaagtttcgtccagggacggaagaaggggattaccaggtaaaactacgcaacctggtacgtttccttagtgaaggggacaaggccaaggtatccctgcgattccgcggccgtgagatggctcaccaggagctggggatggagctgttgaagcgggtcgaagccgacctcgtggagtacggcaccgtcgagcagcatcctaagctggaaggacgccagctgatgatggtcatcgctcccaagaagaaaaagtaa

SEQ ID NO: 319504 - DNA, 195 bp, Pseudomonas aeruginosa
atgccaaagatgaagaccaaaagtggcgcggccaagcgcttcaagaagactgctggtggcctcaagcacaagcacgccttcaagagccacatcctgaccaagatgaccaccaagcgtaagcgtcaactgcgcggcacctcgatgctgaacaagtctgacgttgcgcgcgtagaacgctccctgcgtctgcgctga

SEQ ID NO: 319505 - DNA, 357 bp, Pseudomonas aeruginosa
atggctcgtgttaagcgtggcgttatcgcccgtcgtcgtcacaagaaaattctgaagctcgccaagggctactacggtgcacgctcgcgcgtgttccgcgttgccaagcaggcggtgatcaaggctggccaatacgcctaccgtgaccgtcgtcagcgcaagcgtcagttccgcgcactgtggatcgcccgtatcaacgctggtgctcgtcagaacggtctgtcctacagccgcctgatcgccggcctgaaaaaggcggccatcgagatcgaccgtaaggtcctggccgatctggcagtgaacgaaaaagcggcgtttaccgcgattgtcgagaaagcgaaggcaagcttggcttaa

SEQ ID NO: 319506 - DNA, 1017 bp, Pseudomonas aeruginosa
atggaaaacctggatgcgctggtctctcaagcattggaggctgtgcgacacaccgaagacgtcaatgccctggagcagatccgggttcactacctcggcaagaaaggcgaactgacccaggtgatgaagaccctgggcgacctgccggccgaagagcggccgaaggtcggcgcgctgatcaacgtggccaaggaaaaggtccaggatgcgctgaacgcgcgtaagaccgagctggaaggggccgcgctggccgcccggctggccgcggagcgcatcgacgtcaccctgcctggtcgtggccagctgagcggcggcctgcatccggtcacccgcacgctggagcgcatcgagcagtgcttcagccgcatcggctacgaagtcgccgaaggcccggaagtcgaagacgactaccacaacttcgaggcgctcaatattccgggccaccacccggcgcgtgccatgcacgatactttctatttcaatgcgaacatgctgctgcgtacccacacctcaccggtgcaggtgcggacgatggagtctcagcagccgccgatccgcattgtctgcccggggcgcgtctaccgctgcgactccgacctgacccactcgccgatgttccaccaggtggaaggcctgctggtggacgagggtgtcagcttcgccgacctcaagggcaccatcgaggaattcctccgcgccttcttcgagaagcagctcgaagtgcgcttccgtccgtccttcttccccttcaccgagccctcggccgaagtggacatccagtgcgtgatctgcagcggcaacggctgccgcgtgtgcaagcagaccggctggctggaagtcatgggttgcggcatggtgcacccgaacgtgctgcgcatgtccaacatcgatcccgagaaattccagggcttcgccttcggcatgggcgccgagcgcctggccatgctgcgctacggggtgaacgacctgcgtctgttcttcgataacgatctgcgcttcctcggacaattccgctag

SEQ ID NO: 319507 - DNA, 2379 bp, Pseudomonas aeruginosa
atgaaattcagtgaaaagtggctgcggagctgggcaaatccgcaggtttcccatgacgagctggtcgctcgcctgtccatggtcggcctcgaggtcgacgccgacctgccggtcgccggcgccttcagcggcgtggtggtcggtgaggtgctctcgaccgaacagcatccggacgccgacaagctgcgcgtctgccaggtcagcaacggcagcgagaccttccaggtcgtctgcggtgcgcccaacgtgcgcgcgggcctgaagattcccttcgccatgatcggcgccgaactgccgggcgacttcaagatcaagaaagccaagctgcgcggcgtcgagtccttcggcatgctctgctcggccaaggaattgcagatcagcgaagagaacgccggtctgctcgagctgccggccgacgcgccggtcggccaggacgtccgcacctacctggagctggacgactacaccatcgaggtcggcctgaccccgaaccgcggtgactgcctgtcgctcgccggcctggcccgcgaagtcagcgccatctacgacgtaccgctggcgccggtggcggtggacgcggtcgccgcgcagcacgacgagacccgtccggtcgaactcgccgcgccggctgcctgcccgcgctacctcggccgggtgatccgcaacgtcgacctgagccggccgaccccgttgtggatggtcgagcgcctgcgccgttccgacatccgcagcatcgacccggtggtcgacgtcaccaactacgtgatgatcgaactgggccagccgatgcatgccttcgaccttgccgagatcaacggcggcgtgcgcgtgcgcatggccgaggacggcgagaagctggtcctgctcgacggccaggaaatcaccctgcgcaccgacaccctggtgatcgccgaccaccagcgcgccctggccatcgccggggtgatgggcggcgagcacagcggtgtcagcgacagcacccgcgacctgttcctcgaagccgcgttcttcgacaccatcgccctggccggcaaggcccgctcctatggcctgcacaccgactcctcgcaccgcttcgagcgcggcgtcgacagccagttggcgcgcaaggccatggagcgcgcgacgcgcctgatcctcgacatcgtcggcggcgagccggggccgatcgtcgagcaggtcagcgaagcgcacctgccgaaggtcgcgccgatcaccctgcgcgccgagcgtgtgacccagatgctcggcatgccgctggacgccgccgagatcgtgcgcctgctgcaagccctggagctgacggtggtagccgacggggaagggcagtggtcagtcggcgtaccgagccatcgcttcgacatttccctggaagtcgacctgatcgaggaactggcccgtctctacggctacaaccgcctgccggtgcgctacccgcaggcgcgcctggcgccgaacaacaagccggaagcgcgcgccgcgctgccgctgctgcggcgcctgctggtcgcccgcggctaccaggaagcgatcaccttcagcttcatcgatccggccctgttcgaactgttcgatccgggcacccagccgctgaccctggccaacccgatctccgccgacatggcggcgatgcgttccagcctctggccgggcctggtcaaggcgctgcagcacaacctcaaccgccagcagtcgcgggtccgcctgttcgaaagcggcctgcgcttcgtcggtcaactggaaggcctgaagcaggaagccatgctcgccggcgccatctgcggcaagcgcctgccggaaggctgggccaatggccgtgacggcgtggacttcttcgacgccaaagccgatgtcgaggcagtgctggccagtgccggcgccctcggcgacttcagcttcgtgcccggcgagcacccggcgctgcacccggggcagaccgcacgcatcgagcgggaagggcggctggtcggctacctgggtgcgctgcatccggaactggcgaagaaactcgacctcgagcagccggtgttcctcttcgagctgctgttggccgaagtggtcgacggtcacctgccgaagttccgcgagctgtcacgcttccccgaagtgcgccgcgacctggcgctgttggtggaccaggacgtgccggcacaagacatcctgacacaaatccgtgcggcggccggcgaatggctgacggacctcaggctgtttgatgtgtatcacggtaaaggcattgatccgcatagaaaaagccttgccgtcggcttgacctggcagcatccatcgcgcactcttaatgacgatgaagtcaatagcacgacgcagaacatcgtcacgtcgttggaagaaaggttcaatgccacgttaaggaaatag

SEQ ID NO: 319508 - DNA, 303 bp, Pseudomonas aeruginosa
atgggggctctgacgaaagctgaaattgcggaacgtctgtacgaagagctgggcctgaacaaacgggaagccaaggagttggtggagctgttcttcgaagagatccgccaggcgctggagcacaacgagcaggtcaagttgtccggtttcggcaacttcgacctgcgcgacaagcgccagcgccccggacgcaacccgaagaccggcgaagaaatcccgatcacggcccgccgcgttgtcacctttcgtccagggcagaaactgaaggccagggttgaggcatatgctggaaccaagtcataa

SEQ ID NO: 319509 - DNA, 357 bp, Pseudomonas aeruginosa
atgctggaaccaagtcataacgacgagctgccaccgattcccggcaagcgctacttcaccatcggcgaagtcagcgacttgtgcgcggtcaagccccacgtgctgcgctactgggagcaggagttcccgcagctcaacccggtgaagcgccgcggaaaccgccgctattatcagcgccaggacgtgctgatgatccgccagatccgcgcgctcctctacgaccagggcttcaccatcggcggggcgcgccagcgcctctccggcgacgaggccaaggacgacgtcacccagtacaaacagctcatccgccagatgatcgccgagctggaggaagtcctgctggtcctgaagaagtga

SEQ ID NO: 319510 - DNA, 309 bp, Pseudomonas aeruginosa
atgtactgcccactgtggccggagcggcccttcgatatgctcgagcaagccaagatctgggcaaaccgtttcgtggactggtacaaccaccagcaccgccacagagcactgaagttcgtgaccccggcgcagcgacatgccggccaggcggaaaaactgctgaaaagacgtatcgatctgtatgaggtggcgcacgcacgacagccggagcgctggagcggcaacatcaggaattggccgctggcaccaatcacgtacctgaacccggagttggatatggtactaaagcaaacatcaaacgcagcgtga

SEQ ID NO: 319511 - DNA, 1476 bp, Pseudomonas aeruginosa
atggagaagggggagggatccccgtcggtccaggtaaaagaggaggacattaacgcggcgctggttacagggatacaccgcgttaccaaggatgtttccttcggcgtggccagcattgtgactcttaagcccgaactttttcccgaatacctcaaaaatcatgaggccttgctatcaggggcgatggcgacaaacagcgtcccccaaataactggaggcaccaacgtgtcactctggcaattctgtcttgatcggggcttctactttgagccagacttgctggctaggtatgtcgcatccattgctgctaagccatttgtgatcctggccggtgttagcggcacaggcaagtcgaagatggcggagctggtggcggaattctactcttcgactagggaagtgcttccaactactaaaccggcaggtcgtgcgcctgcagttggtgatgcatttatctttgcccccgataaatgcaaaagcgataaatctcgttttgccctagtgcccgtgcggcctgactggatcgacaatcagtccattatcggttttgtgaacccgatcaccggaagatacgagtcgactcaagctctagacctaatgctcagagccgcaaaggctctggaggatgccccggaaaaggctgccgccccccgttatttcatgctactcgatgagatgaatttggcgcgcgtagagcactatttcagcgactggcttgcgtgtgcggagagtaggcggtaccaacaagacggtgcgatcagtcagcaacccatcccactgcatcgacatgctgcggcaactgccagcctcatcggcccaggccaggccgctgtggatgtggacgttccaaatgctctacctatccccaccaatctgatagtgactggtaccgtcaacgtcgacgaaacgacttttggcttcagtcctaaggtgctggaccgttcgatggtgattgagttcaatgacgttgacttggatggtatgaggtatggtgttgccgcagctgttcagaacggctaccgctttcctgaagaattaccgccgttccgtttacctacgaccgctgcgtttaaggatttgtcacaagaagcgcatgaccaccttgtttcgataaaccggattttggaaagggcacagcttcactttggctacagatctgcctcagagatcggttgtttcatgcagatttatagcagcatcctccctgaggacgtaaacgatactgctatgctccgagcacttgatggggccgttcttcagaagatcttgccgcgtattcaggggaaccgagcccggctggaggaaactctttgcactctgctttggtatttccgtgatctcgctatgcccggatctgaccaggacattcagactatcaggtgcgatgatgcagcgaagctcccgaagtcttattgccgtggttttgaaatgctggaacggttgcgcggattcggctttgtgacctttttcaagtga

SEQ ID NO: 319512 - DNA, 1578 bp, Pseudomonas aeruginosa
gtgagtaagattgcattcgaataccgccctcggcgctgcgatgggttgagctcagctcttgtcggggacgttgtcgacctggcggagaacgtcgagtacgtcattgaattcccggaggcgccgtctgcttcggaagttggtgcactgcttgaagtgggctatgaacctatcggtgacaagatgggcgtgctggctttcaaaaactttgtagggacggcccgctttgccggagtgaccctgcgggtttcctcatccaaactcggcgaggaaggggtttctggcctgctcgagcaggtatcgcgtttatcatcgaacttggtgtttgggtggcgttcgcccgcaggcttttccgcgattgcgtctggggactctaagtctccaattccgtatcaccagctgcagtttctgcgagaagtcatccttcggcgggaggcaggactgcgcctacaagatttttttgcagttgtggaacggaatccgactcggaggtttgtgttggagcggccggtagttcccgctgagcgggttcgtagcttcgatgcgcgctcggttaccgatatatttaatcggccagatcgactgattacggtacgcgagcactacgctgtcgccggtagtccgttagcacgggccctcaaaattggggtacctcctgtagagcattttccagcgcgggtatcagtgtcatcacggcgactgtctttcgacacccccgagaatcgctttgtcaagcactttctcggagagtgcttgaccatcgtatataagctgctcgatgaccggaacatccatattcaaatgcgctccgattgccgggaaatggcaaccattctcgagacagcctcgaggtcgctattcctatcagaggtcggtgttctaacagcattcactggccctactcatgctcttgccaaggtggagggctacaaggacattctggatctttggctgcagctgggggcgcatcagtccttgcccacttctgaaagggaggtccaacggctgctccaaggaaaagatgtcgcgctgttgtatgagtattgggtgttcctcaaggtgctcgaagctgtttccttggtcatgggcatctcagctggctctgtaacggtttcgcgcagtgccctgggcgaaggtcttgatcgcggccttgtcgtgcggctgtcagccagcgtagccgtcgccttcaacccctcctacgtcaggtcggctggggccgcttattctactccgctaaggccggacgtcgttttgaccctcaatggggcgcgttttgcctttgacgcgaagtatcgattgcagtggctgacatcgttggaggatggtcaagatgatgaggcttcattcgtccgcgctgatctgtacaaaatgcacacataccgggatgcgatcacggatatgaaggctgcctttgtggtttatccgggtacggagtttgtgttttttgagaggggcggcggtcggcgccagtgccctggcgaaattatggtgttcgatggcgttggcgccattccggcgaggccggatggcgccgaggtatcgatgctactggatctggtgcaggcgttactcgatcagtga

SEQ ID NO: 319513 - DNA, 3870 bp, Pseudomonas aeruginosa
atgaagccatggtcagcaggaaatgcaatcaaatctagacgtaagtctctggacatgtcgctagaagctctgggagaaaagctgggcgttaccaagtctttcatgagttatgtcgagtcagacgagcgcgcccttactgaggatcaggcttcgattctgtcaggtatcgtgggcatcccaatcgatctcctactgcttagcgcaggccgactcccaacggatgttagagaggcaatctcatccgatgccgccgaggtgacagcatccgtacgacagcactttgagcaacacgcagttgaatatcccgaccgcccaacacgtccacttccgcccgtgtcaagctcggacgagcatctttcgccctcgggcatccccgagcgcgtcgaggttagtaaatccacgaccgagtaccgggcgcacagctatcacaccaaagttcctcccgaggcgattcgccccttcattcgagcccttaccaagcctggagagcttgtccttgaccctttctcgggatcgggcatgacaggtgtcgcggcgctaatggaaggccgcaatgcgctgctctccgatttgtcgcctgctgcagtccacatttcaagaaactacacaacgccttgtgacccaaaggagttctccagggccctcaagaaggtagcggagcaggtcgatccaaccatgcgctggctctaccaacctatcatgcagccaggacagactatcgagtacacaacttggagtgatgttttcaggtgcggtgaatgccaaaaggacattctctactgggatgttgtccatacggcaggtggaaccgatgctcgtgggcttacctgtccacactgtgacacgtatctgcgcaaaagcgatctcgtctggatatcggaaatacccgtgcagactcacgtgtccgccgggagcaccagaatctccgcccacgccccaacccagcatgagttggaattgatcgaggaagcaaatgaagctcccatcccctattggataccccgcgttccattcgggtccgagcgggagatgtggagagcctcccacacgggcatgggcatatccgaagtcagtcactttttcaccaggcggaacctgcatgcccttgccgcgcttcgccattcgattgtcaccacctcggagggacgcattcgcgaagccttgatgttcgccttcacggcctgcgtcaaccgcgcctcccgccgctatcaatggaacgcgaagcgccccacgaacgtgatgacgggcactctatacatctcatcactccggtacgagtggaatgtctggagcctattccggagaaaagctgccgacgtgaaacgatactttgagagattccccgaaacgtcagccacggcccaggtgatgaacaggtcggccacagacctctcctgcctgcccgatggctccgtatccatggttttcatggacccgcctttcgggtccaacatcttctacgcggacagttccctgctgtgggaggcatggcttggctccctgaccgacaacacggaggaaatcgtggttaataagagccgaggcagggtcgggggcggaaagaccatggacgattatggtcatttaatgacgaaggccttttccgaggctgcgcgagtattgaagccaggtggctatgccgtgcttgccttctcgaactccgacgatcaggtatggatggaaattcaaaaggccatggcggaggcgaagctcgaaacccacacggtgcacatcctcgataaagggcaaccgtcgatcaaaggcgttaagggcgtcacaggcaaagagagcgtaacaacgctcgaccttctcatcaccatgaggaggcctgcgcattgcgccaaggacatgagcagtactatggcttcgacggcattcattgacggggccgtcaaaagtgccctcttaaatggtaccagccgaactgatgatatttattcggctgtaattcaagccttgctcgcaaagaactacagtctttccggaatcacgatgccaaacattgcgcaacggtgcgcgcgcctcggcgccagtgaagtcgggggcaagtggaccttgcaaaacatggaagtccaggaaaagcgcgactttatcaaagaatacctttcatcaaaagacagccttcccatcacgatgatggctccagccccgaagaaggcaccagctgcgccactggttccaggcggacgcaacagtgcgctctacacagcacatagttaccacacgaaggtgccgcccgaggcaatcatccctttcatcgagcactttacgaaaccgggggatgtggttctggatccgttctgcggatccggcatgacgggtgtcgcggccgccttggccggccgtctggcaattctcaacgatctgtcgcccgctgccgtccacctcgcatggaaccacactcacccctgcgccccagaggatctcgaagccgcgtttgccgagatcgaggaaaaagtgggcctgcgtatgcgggaaatttatggcaccacggatgagagcggtgcgcctgcgctgctccattggaccatgtggagcaccaggcacaagtgcccccactgcggaaagagcttcgctctttgggatgccatcgaccgatacgaagggcgcataggctccactattacctgccctctttgcgagcacgaaatcgttcgaaaaaaactccccacaatcgactcggtacccgcctggcttgcttatgagacgacggacgggcggagactggagcgcaaggccgaaaagagcgacatcaccaaggccctatcattttcaagaaaggatattgaggactggttcccgtcggtcgacataggcccggacagggagatgtatatccgctgcgcactccagaacaagaatgtccgggaagttgcggacttctacacagacagaaacctactcgcactgtcgctgatctggagtgccatcggagagatcaccgataagcgcaagcgactggcaatggccttcgccttcaccaatacgtcatggcatggaacgcgtatgcggcgctacaacgcgcgcggcggccagcgcccgctgacgggaacactctacatcccacaactatcttctgagtgcaacgttttcgaagtcatgcgcaacaagatcgcgcagttgaaaagatactatgccaccttccagcctacggccgaacagatgccgtttgtcttgaacgggagcgccaccgaccttgcagatgtgcaagacgggagcattgactatgtcttcactgacccgcccttcggatcgaaccttttttacgccgactgcaacctgatctgggagtcatggcttggcagaatcacggacccaaccaatgaggcggttgtcaacaaatcacttgccgaatcggccggcggtaagacactggctgggtatgaagcactaatgacgggagcaatgcgcgagatagctcgtgtacttaaaccgggcggttgggccactgtcgtcttccataacaccgacggaggagtctgggcagcccttcagagcgcggcgaaggaagcaggctttgagttccatgaggcggcatcccttgatcgcaagcaacagagccacaaaggctacaagggtcgcagcgggcaggaggacgtcgcccatttcgacgtagtgatgaaccttcgcaaacccgagaaggtcaagacaaccccacccaggaagacagccaaggcattcgaccttccggcgttagtagccgagcttgccaccaccccccaatttgcggtccgcggcgtccagggaattcatgcggaagtaatgcgccgcctggcctccacggatgccagtatttttgtcgacttctcagacatccgagaacttatggagaaagcgtcacaaccagaacaaggttcactgatcgagtaa

SEQ ID NO: 319514 - DNA, 585 bp, Pseudomonas aeruginosa
atggtcgccatcagcttcgaccgccacttgtactacccgctgctggcattggaggacaaggatgcggtgccgctgaaactgcgcccgctggcctttgacgcgcccagcgaatgggagtttgtccgcgatctggaggcgttctacaactccagcgaaggcaaggatgcgattggcccgcgcagtctgtatctggtgcgcaatgcggatcgggaagagaaaggcctgggcttcgcgttggcgggcaacttctatccggacttcctgctgtggctggtggacgatgccagcggtaagcagtggctgacgtttgtcgatccgaaggggctgcgcaatctcgacctgtcgcaccccaagtggggtctgtacaaggaagtgaagacactggaaacaacgctggcggcgcaggccaaggtgggcgaagcgccgctggtcttgaatgcctttgtcctctcgccgacgaagttcgccgacctgctaaacgtgggcgacccgacaaagaaggccgatctggaaagtcgcaacgtgctattcatggaggacggtgggcagacctacctgagcaagatgtttgcccgcattgtctaa

SEQ ID NO: 319515 - DNA, 303 bp, Pseudomonas aeruginosa
atgaaactactcaacacctacgaagaccgtgacgaagctgaagaagccgctgagaagctgacaggtgagaaacgcctagccagcgagcgcgacgccacagtcaccatttacaacctctttggcatacctagctggggcaactttcaccgactgggtatgtacaacttgggagagctcaagctcatgctggagcgtcgtgcaagctggcaacccgctgaccaagcaagacatgccgagataatcgccacgctagagacagtagctaaaaactatggggtcgatgtaccaaggcactggctgtag

SEQ ID NO: 319516 - DNA, 1182 bp, Pseudomonas aeruginosa
atgcacgagaccaaaatccctttcggtgagcgtgatggcaccctctttcgagcgcacgaggttgagaacgggcttcggtgtggctgcgtatgccctggctgtaaacaacccttaaatgccgctaacaatggcgagaaggttgtcccacatttccgccatgcaaaatcgaatgactgctttgatggtttccgcgaaggtgtcagacgtgcagcggtcgccctgattgcccagcacaaacagctaattctccctgcgcagatagaaacagttcgggttgctacacaagacggccgacttttggaagaaaaggtcgatctgaaaccagtgctgatacatgcacatcacgttgagcggtttgttgacctgggcggtttgagggggcatgccgtcctgcaccaatccgaaaggcagctgatcgtccggatcaagctttcaacgcggatggagcatgagcgttatcgccagttcgaagccctggaacattccagcatggagatagatctccatcacctgactctggagcagatcaatgatccagccagattcgagcacgcggttctgcatgactcggcaaaccgactttggatccgatcaattcgcggcgaaaagctcgcagcaaaagccctgcaaaagcttcagtcactggcagccgaaataaacgctcagtggcaactagaacaggcagagcttcaagctgctgagcaagcccggcagattgagctcgccaatgagaaggccgaactgcagcgcgccctggaggcccatagagccaaacagcttcagatggcggctaaacagtcagccacaaccctggacaacacggtgcagggccgagccgagctcatcgccggaacaatgctgaaggccctacaagcatggagagggagagccgttgagtgcactgcctgctacttgctaagcccgcctgactcaaggttctgccattactgcgatgcgtctaccagcaaagttacccccgtacttttagcgccagacatagcttcgacgcttaagcaaaggatgcactgctcagcaaagccaagcatgtcagctaatgcagtccctcacctgatcgtaaaccccgatgatgaactgttcaccgctaatgaaggcctgataaattccgcaacccagagtcaggcgacaaacgatgaaactactcaacacctacgaagaccgtga

SEQ ID NO: 319517 - DNA, 264 bp, Pseudomonas aeruginosa
gtgaaaaagcgttttaccgaagagcagattctcgacttcctcaagcaggcggaggccggtgtgccggtgacggaactgtgtcgccgacacggcttcagtgatgcctcgttctacacctggcgggccaagtttggcggtatgaccgtggcggacgcaaaacggttgaaggatcttgaactggaaaacagccgattgaagaagttgctcgccgaggcccacctcgacatcgagtcgctgaaagtggtcgcccggggaaaagggtaa

SEQ ID NO: 319518 - DNA, 225 bp, Pseudomonas aeruginosa
atggctacccagaaatcccctctttcgaactctcgacttctaacgatcggctaccagctctatgaaagccgtcatagcgattgggaacgtcgtggcaagccacggcaaattccctacctgcgcttgagtggcgactggctggaggctgcgggctttgaggttggctgcaaggtgagcattcaggtcaccaggcggcgccttgtcatgcacgtagttgaggattga

SEQ ID NO: 319519 - DNA, 1347 bp, Pseudomonas aeruginosa
atgagcggaccgaaagttgtaagaatcgtcacccgggaagaagccatcgccacctgcgagcgcgacctgcaacgcctggacaaggccctcgcgcgctgggaaaaccaggccagccggctcgcccagctcagcgacgccgagcgcgccgccgcccacgcccgccgcgccagcctgcgcgccctgctcgaacaggaacgctggctggatgtgcaattgcaggtgaagatcgaaagcgaattcctcaagcgcgacctcgccgaacgcgaagagcgcgccattcgccaggccgcggaaacgcgccagcaacaccgccgcctccaggaaaacgccagcgccctgctccaggccctcgacgccaggcccgatgccgccagcgcggcactccggcaaaccctgcatacgctggccgacggcgtcctccgcgacgacgcggaagccctgctcgcccaaggcttcgccgccctcgccagcgcccccgccgaagaacgcctcagcgaagcccagcgcgaactcgcccagcgcctgaagaccgacgaaacgcccatgtccctggaacagtggcgcgcccgccagcaacaggacgccccgcacgaacagcgcctggcgcgcatcgaccggcacatcgccgaactgcaactgctgcaaggcgaggccagcgcccaagcgttcctcgagcgactggcacgcgccgaagccgaacagcacccggagcgccgcaacctgctgctcgacagcctggtcctcgacctcgcccaggccgcccgcgaacaccagcagcaacgccagcgcctggaacacctgcaagacctcgccagcgaagtcgccgccctgggcgccgccgaacacgccgaactgctccagcgcgccgcctgccagcccgacagcgatccgcagcaactcgccgaactcaccgagcgatgcaacgccatcctcaccgcccacctccagcaacaggccgccctcgcccgccgccaggccgtgctccagggcctcgccagcctcggctacgaagtccgcgaaggcatggccaccgcctgggcgcagaccggcagggtcgtcctgcgcaaacccgccacccccggctacggcgtggaagtcggcggcaaggccgacaacggccgcctgcaactgcgcgccatcaccctcaacgccaaccgcgacagccagcgcgaccgcgacatcgaaaccctctggtgcggcgagttccaacgcctccaggccctgcttgccgcccagggcggcgaactcagcgtggaacgcgcgctgggagtgggagaagtggcgttgaaggagattggcgaggaggagcagcgggagatgggggtggtgcggcagagggggttgtga

SEQ ID NO: 319520 - DNA, 6297 bp, Pseudomonas aeruginosa
atgatacgtttctgccccaactgccagagcgaacgctcgctttcggaaatcttctgcgaaggctcgatccagggccagccctgcggctgggacctttccgccgaagccatccatcccgccggctggcgaccacagccggtgctgacccaggaagccatcgcgccgcccgccagcgagccgccagcggcgtccgccccgctctgcgccaacggccacccgctgcaacccggcgacctgatgtgcctggagtgcggcgccgcgccggccgaaggtccactgccgatgcaggccgaggccacgccgcagcccgccgtcacggaaaccctgatcgacggctggcgcctgctgcggcagatcgccagcagcgacggcgtgcgcgagcgctacctggccgaacatgcggaaagcgcccgccaggcggtgctcaccttgtatcgcccgggcgccgagccggacccggcgatctacgacgtgatccgccgcctgccgcgcgaacacgtaccggaaatcctcgccaccggccgctgggacgagcgcgcctacgaagtggtcgaggagctcaccggcggcagcctcgccgacctcggcaccgtgctggaggaccgcgaggcggtgcgccacgtggtccgcgagctgggccacgccctgcacgtgttcaacgaagccggcctgcgccaccgcgacctgcgcccggccagcctgctggtgcgcagccacgagccactggacctggtgatcagcggcttcggctcggcgcgcctgtcggagttcgacctggatatcgtctcgccgctggagaccagccgctacatggcccccgaggcgatcgccggcggcgtggcggcggcttccgactggtggagcctgggcatgatcctgctggagcagttgacccgcggcgcctgcttcgaaggagtcaacgccaacgccttcctgatccacgtgctggccaacggcgtggcgctgcccgacgacctcgacccgcagttgcacctgctgctgcgcggcctgcttgcacgcgaccgccaccagcgctggcagtggccgcaggtacaggcctggctgaacggcgaggcggtggacgcgccggcctcggcggacagcgaaaaggacgacgccgaaggcgccagcatcgccctcggcgcacggcgcttccgcaagccgacggtcttcgccctggccgcggcccaggccgagcactgggcggaggccctcgaccacctgctgcgcggggcgatcgtcacctgggccgagcacatcggcctgtcgcccaggctgctcgccggcctgcgccaggtggcccagcacgaggggctggaggacgacttccggctgatgctggcgctcaagctgctgaacccggaaatcccgctgatccagcgcggcgagatcgtcacccccggctggctgctggagcatccgctggagggctaccggctgatcagcggctcggtgcccgacctgctcgaacagttgcacaccgaaagctggctgtcgcggctcaagacccgcgccgagaacgtccgccagcgcgccctgcaccagcacatcgaacttgccgaagaacagttgcgcatctacctgctgtcaacctcgcgggcgcgcctcgccgcgcagtggcaggagcgccagcgcctcctgccggacaccgagcaccccggcctgctggccctggccgagcgccgggtgatcgccgaggaagacctgatcgtcctgctcagcgccaacatcggccagttccgtgccgccgaggcgatcgtcgaggaagccgccggcctggcccgcgacgccgatgtgcacctgttcgacgcggagaccgcgcgcggcctgttgcagcactcgcggcaggagctgtaccgccgcgtcgacgaacgcatcagcggcttcgcccgcagcggcgtgcccagggtcgacgaatgggccgagcagttccgcctggagcggcgcatgccgttggcgagggtcctggtgctgctggcgatcccgccggaacagtggctggaaccgcagaagcagcagtacgtgtcgcagatcctcgatttcttcgagaagaaagtggtcgccgcggtgatgcgcgggccgctggtgcgcatgagcatcggcaagagcactccacgcatcgacctcaacgaactggatagcgcgcgacgccccgccgccgccctgctcgaccatctgctgcaacgcaacgcccgcgcggtgagcctcgacccggacagcttcctcgccaacccgcaactggaagtgcggctcaacgcgctgtcccggcaaagctcgctgtacaagcgtgacaccggcatcgacggcctctacctgggcttccccttcctgctcaaccgcgacccgcgcggcaccacccgcacgcgcatcgtgccgctgctgctgtggccgctgaagctgcaactggaagtcggcagccgcggccaggtggcgctggccttcgacggcgagcgcgaggaagtgcgcctcaacccggccctggaaagcctgctcggccccgagccgtgcaagcgctggcgcaaggtcgccgacgaattgctcggccgctccgcgctgcgcgccgccgatgtgatggatgccttcggcctgctcgccacgccgcgtgctagggtgctggaaggattgccaccgagttccaccgaggtcacgccctaccaggaccaactggcctgcgccgcggtgctgttccacgtcaccttcatgggccaggcgatcggcgaggacctgcgccagctgaagagcctgccgccctccggcaccggcctggagaccgcgctgcgcctgcgcgagaacggcgagccggaagcccgcgagagcccgccggagttgcagcgctacttcaccgtggccagcgacccgtcccaggaggccgccgtgctgcaggcccggcagagcccggggctgctggtggagggcccgcccggcaccggcaagagccagaccatcgtcaacatggtcgccgacgccatcggccgccagcgcagcctgctgatcgtctgccagaagcacgccgccctggaagtggtgcacaagcgcctggtggccgagggcctgggccagcgcatcgtcatgctcaacgacgtcaaccgcgaccgcgaaccggtgatccgcaacatccgcgagcagctcgaagcgctgttcgccgaagccggcggcgcccagggctgggagcgccagcgcgagcgcctggcggcgcgtatcgaggcgctggaaggcgaactggaccgctaccaccagagcctgcaccgcgtggacgaggccaccgggctgagctaccggcgcctgctcggcgaactgatcgagctggagaaaggctcgccgccgctggacttcccggccctgcgccagcgcctggcggcgctggacatcggcagcctggcgcgcctggaggaaaactgcgcgccgctggtccgcctctggctaccggcccgctacgaaggcagcccgctggcgcaactgcgcgccttcgccaccgaccaggccaccctgcacgccttcgccgacagcctgcgcgccttcggcgaagcggagaacgcccggcagaaagccctcgacgaacacccggcgagcttcgaggtcgacgacccgacgccctaccgcgcctggctggcaagccaggtcggtaccctgctgaatttgcgcgaggagcagcgccagcgcctggcccactggctgccgctgttccgcgacgccacgccagggcagccgagccgtggcgacggcctgttggcggaggccgagcagatcgaacggcaactgcgccagctcgacctcgaacggcatgcgccgctgctgtcgccggccctcgccatgctcgaagagaacaacctcgaacgcttccaggcccacgcccgccaggtgctcgaggcacgcacctggctggctcggctcaacccgctgcgcctgctgcggcgcggccgcctgcggcgcttcctgcgcgagcacggcgaggccgacgacgacagccgcctggccgccctcctcggcgcctgcgacctggagcgccagtggcggccgctgcgccggcaactggcggcgctgcaacagagcctggggctggcgacagtcgccaccgatgccggtccggaactgaccggcctggccggccacgccagccagcagctgcgcgagatccaggtcctggctcgtggcctggcccaagcgccgcgcgccgagcagctcgacgcggtgatcctcaccggcgagaaacagcgcttcgaagcgctgctcggcgacctcgacgccgcgctgatccgccaggccgcacgccagctcagcctggacaaactgaaggtgctcgccgactggctcggcgacgaactgctggaacagctgcaccgcgccatcgccggcaaccagagcaacctgccggccctcggccgcctgcgcgaggcgctaccgcaactggtcgcctaccagcgcttccgtggccgcgccggccagctcgaagccaccgacctggaattcctggccctgctgcgccagcgccaggaacgactcgacgcgattcccgccgaagaactcgaagccacggtgcgccgcatgctcaaccgcgaagcgcggctgggctggaagcagcgcctggaacaagacaatccggaactgctgttcagccaggacgaagccagggccagggtcgccagcctcgccgaagccgatgtgcagatgcgcgcgctgaaccgcgaactgctcggcaagggcatcgacgccgcgcgcctgggcagccgcaagcaatgggaagacgtcacccgcctgaccggcaagcgctcgcggcgcctgcgcgagttcatcgagctgggcgccgaactcggcctgatgagcctgcgcccggtctggctgatgaaccccgacctggccagccgcgtgctgccgctcaaggccgggctgttcgacatggtgatctacgacgaagcctcgcagatgccggtggagttcgccctgccgaccctctatcgcgggcgggtcacggtggtcagcggcgacgagaagcagatgccgccgaccgcgttcttctccagccgcgtggaaagcgacgaggccgaactgttcgacggcgaagcgcccgacgaggacgccgacgaggagcagcgcgaagcctacgaggacacctggaaccgccgcgagatcaaggactgcccggacctcctgcaactggcgcgcaacgccctgcccagcaccaccctgcagatccactaccgctcggcctaccgcgagctgatcggcttctccaacgcctcgttctacggcaaccgcctgagcgtgccggtacgccatccgcaggccaacatcctgcgcatcaagccgctggaactgatccaggtgaacggcctgtaccagaaccagagcaacgagcgcgaggccgagcgagtcgtcgactacctcgccgaactctggcgccaaccctacgcggcgcggccgtcggtgggcgtggtcaccttcaaccgcaagcaggccgacctcatcgaggagcgcctggaactgcgcgccgagcaggacgagacgttccgcgccgcctacagcgaggagcgcgagcgcagcgaagacggcgaggacatgggcgtgttcgtgaagaacgtggagaacgtgcagggcgacgagcgcgacgtgatcgtcttctcctccaccttcggccgcaacggccagggcagcttccggcgcaacttcggcgtgctcgggcagaccggcggcgagcgccgcctcaacgtggcggtgacccgcgcgcggcgcaaggtggtgatgatcacctcgatgccgatcggcgacatctccgacatgctcggcacccagcgctcgccgagcagcccgcgcgactacctgcaaggctacctggaatacgcccgcgcactgtccgccggcgagttcgccggtaccggccaactgctcgagcgcctgcacaccgaccgcagcgaccagcgccgccagcactaccagcggcacgacggcttcagcgagatcgtcggcgagtacatccgctcgctgggctggtccgccgcacccgccagcgaaggcgacgccttcggcctcgacttcgccatcgagaacccggccaccggcctctacgccatcggcatcgaatgcgacgccccctgccacccgctgctggaacgcgcccgcgcccgggaaatctggcgaccctcggtgctgcggcgggcgatcccgcacctccaccgggtttcctcccagggctggtaccacgacggcgacaacgaacgcacgcgactgcgcgccgccatcgagaaagccctggcgcctagcgcggaaacccatcccacggcagcagcggaggcctcccaatga

SEQ ID NO: 319521 - DNA, 639 bp, Pseudomonas aeruginosa
atggaactgagcctgtcgcgggtgcatttcccggtgaccaccctgggcccgggacggcgcctgggcatctggttccagggctgtagcatccgctgccccggctgcatctccgccgatacctgggggccgggcaggcggcgtatcgccctggcacgcctgctcgccgacatccagccatggctggagcaggccgagggcatcaccgtctccggcggtgaacccttcgagcagttcgctgccctcctcgccctgctcggcgaactgcgccggcgcagccgcgccgacatcctggtctacagcggctacccgctggagcatctgcacgcgcaactggaacaggccgccgggctgatcgacgcgctgatcagcgacccctaccaacagcacgccgaacagagcctggccctgcgcggcagcgacaaccagcgcctgagcctgctcaccgaactcggccgcgcgcgcctcggcggctaccagcggccactgcgcgaagacgacaaggccctcgacctgatgttcgaccacgacggcagcgtgtggatggccggcatcccgcgccgcgacgacctgctgcggctgcaggacctgctgcgcgaacagggccaccaacttagcgtcagcgcccaccggccgcgctga

SEQ ID NO: 319522 - DNA, 1830 bp, Pseudomonas aeruginosa
atgccagggactgcactgttcgaaaagccacgctggttgcgcgacctcctgcgcttcctgcccctcaagagtcaattcgtcctctccgggaacatccgcgacctgcaagcctgcgaagtggtgccgggtacggtcaccgcgcagagcttcaaccagaccctctgcgacgccctgctggacgccggctacacccaggtgctggcctgggatccgctggccgggttccgcgtgctcggccggccgggcagcgaggcgggggccactccgcaggtgcttctcgacctcggcctgaccccggtggacggcgccgcgccggccggcatcgacctgctcggcgcgaccctgcaacgcctggtcaaccgtagcggcgagccgatcgccctgatcgtcgacttcgcctcgcgcctggcggtgcgcaacgacgccctgagcgccgccgagcaccagttgttcacccaggccctggtgctctcccaccaggcccgcagccgtcccgccggggaacagcgcaaaccgttcttcaacagcgtgctgtgggtggtggaaaaggaaggcgacctgcccgactggctgctggtggacaacccgcgcctgcgccatatcccggtgtcgaagcccgaccagccggcgcgccgggccctggccccggcgctgctccgcgggctaggcggcgcgggcgtcgccgaggaggccctgcaacaggccgccgcaaccttcgtcgagaacaccgaaggcctgctactcctcgatctcaacgccatcgtccagttggcgcgcgtggaaggcctggccatggaacgcatcgccgacgccgtgcgccgctacaaggtcggcgtcaccgaagacccctggctgaagatcgaccgccagcgcatccgccaggccgacgagatcgtccgccgccgggtcaagggccagcagtacgcggtgacccacatgctggacatcgtcaagcgcgcgatgaccggggtcggcgccagccgcaagggcaaccgcccgcgcggcgtggccttcctcgccgggcccaccggggtcggcaagaccgagctggcgaagaccgtcaccagcctgctgttcggcgacgagagcgcctacatccgcttcgacatgtccgagttcagcgccgagcatgccgaccagcgcctgatcggcgcgccgcccggctacgtcggctacgacgtcggcggcgaactgaccaacgcgatccgcgaaaaacccttcagcgtggtgctcttcgacgagatcgagaaagcccacccccggatcctcgacaagttcctgcagatcctcgacgacggcgtgctcacctccgggcgcggcgatcgcgtgtacttctccgaggcgctgatcgtgttcacctcgaacctgggcatctaccgccagggggaaaacggcgaacgggtcgccaacgtgctccccggcgagcccttcgaggcggtgcagggcaaggtccacggcgagatcgagcgctacttcaagctggttctcaaccgcccggaaatcctcaaccggatcggcgagaacatcatcgtcttcgacttcatccgcgccgacgtcgccgagcagatcttcacccagatggtcgacggcaccttcgccgacctccgcgagcagcgcctcgtcatcgaactggccgaggcgccgcgccaggcgctgcacgacctctgcctgggcgacctgtccaacggcggccgcggcatccgcaaccagctcgaagcgcgcctgctcaacccgttgtcgcgggcactgttcgaccaggacgcgcagccgggcgagcgcttcctgatcagcgccctggacgccgacggcctgaccctggaacgccgctga

SEQ ID NO: 319523 - DNA, 351 bp, Pseudomonas aeruginosa
gtgctggatcgcgcgcccggcgagaccctcgacctgctctaccgcttcgccaccccgctgcgcatcgacggtagcctggtgaacgcggtgcgggtacgcggcgacagcggcgtgctggtgatggcctacgccgagggcgacctcgaagacttcgcccggcgccagggcgcgacgccgcacccggcggaacgcgccgcgctggatggtttcggcgagctggaggtgctctacagccggccgctgtcgccgcgtcccggcctcgacgaaagcccgccgcgcctggtgatcggccgcgggatcgaggcggcggcgcaggcgttccgctggggctgccggagctacgacggttaa

SEQ ID NO: 319524 - DNA, 279 bp, Pseudomonas aeruginosa
atggacgaactgttcgaagagcacctggagatcgccaaggcgctcttcgcccagcgcttgccgtactggtgcgatgtctttctgcgcccggccgaccaggctttcaacgcctacctgaatgcccgcggccaggcctccacctacctggtgctcgaaggcttcgatccggtctatattcctctctgctgcgacctagacgccgtgcgcgcgaccgccagggccagggctcgattgagggaagcggggctgggcgaagacgcgctgcccgtactgctctga

SEQ ID NO: 319525 - DNA, 393 bp, Pseudomonas aeruginosa
atggatcgattcaccggcggctgcctctgcggcaaggtccgcctggtggcgagcggccgcccctaccgggtcgggctctgccactgcctcgactgccgcaagcaccacggcgcgctattccacgcttcggcgatctttcccgaggaggcggtgagcatagaaggcgagacccgcgactatgccgggcgtttcttctgtccgcagtgcggctcctcggtgttctcgcgcagcgccgacgagatcgaggtcagcctcggcgccctcgacgctcccgaccggttccagcccacctacgaactctggaccgtccgccgcgagggctggttgccggcgtttccgctggcacggcactatgaaagagatcgcgaaggcgacggacgcagcgaagagtga

SEQ ID NO: 319526 - DNA, 480 bp, Pseudomonas aeruginosa
atgaacagcaagaacaccatctgcctctggtacgacaacgccgccctggaggccgcaaccttctacgccgagacatttcctgacagcgccgtgctggctgtccatcgcgcgcccggcgattacccttccggcaaggagggcgacgtgctgacggtggagttccgggtgatgggcattccctgcctcgggctcaacggcggcccggccttccgccacagcgaagcgttctccttccaggtcgccaccgacgaccaggccgagaccgaccgcctgtggaacgctatcgtcgacaatggcggcgaggaaagcgcctgcggctggtgccgcgacaagtggggcatctcctggcagatcaccccgcgcgtactcagcgaagccatcgccagccctgaccgcgcggcggccaggcgcgccttcgaggcgatgatgacgatgggcaggatcgatatcgccaccatagagaaggccttcaagggctga

SEQ ID NO: 319527 - DNA, 639 bp, Pseudomonas aeruginosa
atggaagcggtctccgtctcgcagcatctggctgctctgttcgaatcccaccggatcgagtgcgtcgtgcacggcgaatgggtggcgccagccgggcggctaccggcgatccgcgccacctggtatgcgggggagaagaccggacggctggatgtcgacgtgctgctggaggacgagcgccagttgcaggaagccttcgccggcatcggcagcggcgaggacggcttgcaggacgcgttgcgtaacttcgcctccaactctttccacgtgctgctttccgcgctctggggccaggccgaggaggaccaggtgatggtggagacctgggagatcggcgagcggcgtttcgaggtgcatatcggcaacctcggcctgcgcggcgccgagggcaaggcgccgccgctgccggccgggctgttcccgagcatcgagcgggcgatccgcgccgagccgctggacgcgcgcctgcactggttccggcatttcttctgtgccttcggcaaccagcgcacggtggaagcgctgttcgacaaccagccgtgggaggccggcatgcagaacctggccgctctcgactggcaggattcgcagggttactacagcgtgcgcaacttcctcatgttcaagccgctggcgtag

SEQ ID NO: 319528 - DNA, 687 bp, Pseudomonas aeruginosa
atgaccaagcgcatcctgcacgtcgtcaccaacgtcgcccactatgccgatccgacccagcccaccgggctgtggctgtcggagttgacccatgcctacgagatcttcgccgctcggggctaccagcagcgcctggtcagcccccgcggcggcgagtcgccgctggagccgcgcgccctcggctggccccacgccgacgccagcgccaaggcctggctggccgacgagacacgcctggcgctgctggccgacactgccgctcccgagcaggtcgacgcggaggcgttcgacgccatctatttcaccggcggccacggcgtgatgtgggacttccccgacgacgccgggctgcagcgcctgacccgcgagatctaccagcgcggcggcatcgtctcgtcggtctgccacggctattgcggcctgctcaacacacgcctggacgatggccgcctgctggtcgccgggcgccgcctcaccggctactcctggatcgaggaagtgctcgccggggtcgcccgcaaggtgccgtacaacgtcgaggaagaaatgaaacgacgcggcgcgctctacgaaagaagcctgctgccgttcaccagcaaggtggtggtcgacggccgcctggtcaccgggcagaacccgcagtcggccaaggccacggccgagcaggtggccgccctgctcggctga

SEQ ID NO: 319529 - DNA, 489 bp, Pseudomonas aeruginosa
atgaaaatcggcgaactggccaagctcaccggcctggcgacatcgcgcatccgcttctacgaggccagcggcctgatccgctcgcagcgcaaggccaacggctaccgcgactatgcggcagacaccgtgtggatcctggagctggtcaccggcgcccagggcgccggcttctccctggaggagatcgctcgcctgctgccgagcggcgacggcgcctggcagcacggcgagctgctcgaaggcttgcgccgcaaggtggccgagatcgaggccctgcaacgacgcctggaacagaacaaggcacaattgctggtggccatcgaaagcatcgagaacaagccggacggtctgcagtgcacggaaaacacccagcgcgtgctggagcgcctgcgcgaggaaggccctccacagacggtcgggcgtccacggcaaacccgctcgcgggggtcctctaccacgccggcggagcagcggctttccgacgcttga

SEQ ID NO: 319530 - DNA, 831 bp, Pseudomonas aeruginosa
atgggttacgtgacaacgaaggatggcgtcgaactcttctacaaggactgggggccgcgcgacgcccaggtgatctacttccatcatggctggccactgagttccgacgactgggatgcgcagatgctgttcttcctcgccgagggctttcgcgtagtggcccacgaccgccgtggccacggtcgctccagccaggtctgggacggccatgacatggaccactacgccgacgacgtggcggcggtggtcgagcgcctcggggtgcgcggggcgatccatgtcggccattccaccggcggcggcgaggtcgtccactacatcgcccgctatcccgacgacccggtgccgaaggcggcgatcatcagcgcggtaccgccgctgatggtgaagaccgagggcaatccgggcggcctgccgaagagcgtcttcgacgatctccaggcgcagctcgcggccaatcgcgcgcagttctaccaggacattcccgccggcccgttctatggctacaaccgtcccggggcgcagccctcggaagggatcgtccgcaactggtggcggcagggcatgatgggcggcgccaaggcccactacgatgggatcgtggccttttcccagaccgacttcagcgatgacctgaagcgcatcgacatcccggtgctggtgatgcatggcgacgacgaccagatcgtgccctacgagaattccggcgtactctcggcgaagctactgcgcaacggcacgctgaagatctatccggggttcccgcacggcatgccgaccacccaggccgaggtgatcaacgccgacttgctggccttcatccgcggctga

SEQ ID NO: 319531 - DNA, 1236 bp, Pseudomonas aeruginosa
atgaacctgttcgacacgctgacgcttcccaacggctcgaccattcccaatcgcctcgccaaggccgccatggaggagaacatggccgatgccgcgcaggccccctccgaacgcctgatgcgcctctaccaggcctgggccgacggcggcgccgggctgctgatcagcggtaacgtgatggtcgacagccgtgccatgaccggccccggcggggtggtcctggaaaacgacgcgcaactggagaaattccgccgctgggcgcgcatcgggcgttccgccggcgcgcagttctggttgcagatcaaccatcccggccggcagatgcaggccaatctcggccagcaggcctgggcaccctcggcggtgccgctggaactgggcgggatgtccaggcacttcgctacgccgaaggcgatggacgaggcgatgatcgccgaggtgatccagcggttcgcccgcagcgccggcctggccgagcgggccggcttcagcggggtggagatccatgccgcccacggttacctgctcagccagttcctctcgccgctgagcaaccgccgcagcgacgcctggggcggctccctggagaatcgcgcgcgcctgctgctggagatcgtccgggcggtgcgcgccgaggttgcccctggcttcgcggtggcggtgaagctgaattccgccgatttccagcgcggcggcttcagcgccgacgatgcccgcgaggtggtacggatgctcgatggcctgggcgtcgacctggtcgagctgtcgggcggcagctacgaggcgccggccatgcagggcgaagcgcgcgacgggcggaccctggcccgcgaggcctacttcgtcgagttcgcccgcgacatccgcgcggcggcgcggatgccggtaatggtcacgggcggcatccgccggcggccggtggccgagcaggtgctggccagcggggtggacatggtcggcatcggcacggcgctggcgatcgagccgaacctgccgcgcgactggcgcgccggcaaggactcggcgccgcagttgcggccgataacctggaggaacaaacccctggcctcgctggcgaacatggccgcggtgaagttccagttgcgcaagctgagccggggcagggcgaccaacccacgggtgtcgccgctgtgcgcgttgctcgcgcagcaggccggcgcgctcctgcagacccgccgttaccggcggctcatgcgttcgcgcgccgaagcctga

SEQ ID NO: 319532 - DNA, 339 bp, Pseudomonas aeruginosa
atgaccttcgtcgtgctggaagaatgcatccgctgcaaacacaccgactgcgtggaagtctgtcccgtggactgcttctacgaaggccccaacttcctcgtcatccaccccgatgaatgcatcgactgcgcgctctgcgagccggaatgcccggtcgccgcgattcgcgccgaggacgaggtgccgctcgggcaacggcagttcatcgccctcaatggcgaactcgccgcgcatcccaactggacgcagatcacccgcaagaagccggcgcccgacgaccacgacgcctggttcggcctgccgggcaagctggccgaactcgaccgcaacggcgcctga

SEQ ID NO: 319533 - DNA, 2310 bp, Pseudomonas aeruginosa
gtgactacgccgtccccgcaatggaagaagaccgcctgtatcctctgcagcctcaattgcgggctggaagtgcagaccgagaatggccgcatcagcaagatccgcggcgatgacgaccaccccgcctcgcagggctacgtctgcgagaaatcgcagcgcatggactactaccagaacggcgccgaccgcctggacacgccgatgcgccggcgccccgatggcagctacgaagccatcgactgggacacggcgatccgcgaggtggcggagaaattcctcgccatcaagcgcaggcatggcggcgaaagcatcctctactacggcggcggcgcgcagggcaaccacctcggcggcgcctacggcgacagcacgctgaaggccctcggggtgaagtaccgctccaacgccctggcccaggaaaagaccggcgagttctgggtccagggcaagatgttcggtaccggcgtgcacggcgacttcgagcattgcgaggtggccatcctgatcggcaagaatccctggcaatcccatggtttcgcccgcgcccgcgtgctgctcaacgccatggccaaggaccccgcacgctcgatcatcgtgatcgacccgcgcctgagcgaaaccgccgccctggccgacttccacctgcagatccgtccgggcaccgacgcctggtgcctggcggcgctggtcgggatcatcgtccaggacgggctgctggcgcgcgactggctggccgaacacaccagcggctacgagcacatcgtcgacgaactgaacgccatcccggtggcctactgcgccgagacctgcggggtggcggaagacaagctgcgcgccgccgcccggcggatcgccagcgccagcagcgtatcggcgctggaagacctgggcatgcagatgaacctgcactcgaccctcggcagctacctgcaacgcctggtctggttgctcaccggccattacgggcgccccggcaccagcaacgccttcgtgcccttcctctcgctgtccaaggccagcaagggcgatacctcgatgggcaagaagggcgcgccacgcgtcgagaagcgcagcccggtggccaatgccaagatcatcatcggcctgattccctgcaacgtgattccagaggaaatcctcaccgaccatcccaagcgctatcgcgccatgctggtggagaccggcaacccgctgcattcgctggccgatagccagcgcatgcgcgaagccatgcgcgccctggagttgtcggtggtgatcgacgtggccatgaccgagaccgcgcgccacgccgactacgtgctgccggcggcgagccagttcgaaaaggccgaggcgaccttcttcaacctggaattcccgcgcaacgccttccacctgcgcgcgccgctgttcccggcgcgccccggcaccctgccggaagcggagatccacgcccgcctgctggaagccatgggcgtgctcggcgagaaagactaccggccgttgcgcctggccctgaagctcgggcgcaaggcattctcggcggctttcctcgccgccgcggcgacccgccccaaggtcatgaaatacgcgccggtcctgctctaccgtaccctcggcccgaccctgcccgccggcatggaagcggccgcggcgatctggggcatctgccaactgcacgtgctgaacaaccgcaagaccgctgcccgcgccggcttcgacgggttgccgccgctggccgccgaccgcctgttccaggccatgctcgacaacccgtccggggtggtcttcgccgaaaccacctacgccgaaagctggcaggccgtcgcccgtcccgaacagcggatcaacctgcacatccccgaactgttgccggaactggccaagctcgcccacagcgcgccaccccacgatccggcctacccgttcatcctcgccgccggcgagcggcgcagcgacaccagcaataccgccgtgcgcgacaccggctggcaccgccgcgggcgctacggcaccctgcgcatcagcccgcaggacgccgaggcgctgggctgcgccgacggcgaggtgctgcgcgtggtgacccgccgcggcgaggtcgaggcggaagtggagatcagcgacatgatgcagccgggcaatatctccctgcccaacggccagggcctggactaccgcaacgccgagggcgaggtggtgcgccggggcgtggcgcccaacgaggtgaccgactgcacccagcgcgacttcctcgccggcacgccctggcacaagtacgtgccggcgcgcctggaacggctggcgacgcccgccgctacgaacgcctga

SEQ ID NO: 319534 - DNA, 480 bp, Pseudomonas aeruginosa
atgaaatggcaagaagtcggcgaaacgccctgttcgatggcgcgcagcctggcgatcctcggcgatcgctggacgctgctgatcctgcgcaactgctttctcggcatgcgccgcttcgatgagttccaggccagcctcggggtcacccgccaggtactggccgaccgcctgagccggctggtggaggcgggcgcgctgaagaaggtgccttaccaggagcgaccgccgcgctacgaataccgcctcaccgagatgggccacgacctgcatccggtgctgctggccctggccaactggggcgaccgctggctcgacgagggccgcggcgctccggtggagtatgtgcacaaggcctgtggccacaagttccggccgaccatggtctgcccggagtgcggcgagccggtgggatcgcgcgatgtgacggcggtgccggggccggggttcgcggcgatggctggcaagctcgcgcagaactga

SEQ ID NO: 319535 - DNA, 864 bp, Pseudomonas aeruginosa
atgtttgcactgaacaaatccgcgctggccagcctggccagcaccagcctcttcgtcctgctctggagcagcggggccatcgcctcgaaatggggcctggcgcactcctcgccgttcgccttcctggtgttccgcttcggcatcgccctggcctgcctgctgccgctcgccccgctgctcaggctgcgcgcgccgcgcagcgcgcgtgagcgcggcaaggccctgctcaccggcctggtgatgctggggatctatccgatcttctatatcttctcgctgaagctgcaggtcactcccggcatgatggcgactatcctcggcgtgcaaccgatcctcaccgccgtcatcctcgaacgccggcagtcgccggcgcgcctgttcggcctgctgctgggcctggccggcctggtgctggtggtctaccagggcatcggcctggccgggatgtccacggccggcatcctctgcgcactgctggcgctggccggcgtcaccggcggctcgatcatgcagaagggcatccgcgagaacccgctgggcaccctgcccctgcagtacctcgccggcctcggcctgtgcctggcgttcgtgcccttccagccgttcgagttcgaatggaacgccggcttcctggtccccgcactgtggatgggcgtcgtggtctcggtgggcgcgaccctgctgctctaccggctgatcgcccagggcaacctggtcaacgtcaccagcctgttctacctggtgccggcggtgaccgcgatcatggacttcatggtcttcggcaaccgcctcggctggctcagcctgctgggcatggggctgatcgtggtgggtctgatgttcgtcttccgcaaggccggctga

SEQ ID NO: 319536 - DNA, 1092 bp, Pseudomonas aeruginosa
atgaagacccgcatcgcttccctcaccctcctcgccctcgcttgcggcagcggcgcaaccctcgccgcggacaacctgaagatctacaactggtccgaatacatcgctcccgaaaccgtggcgaacttcgccaaggaaaccggcatccaggccacctacgacgtctacgacagcaacgagaccctcgacggcaagctgatgaccggccaatccggctacgacgtggtattcccgtcgaaccacttcatggccaagcagatccaggccggcgccctgaagaagctggacaagtcccggttgcccaactggaagaacctcaacccggtgctgctcaaggccctggaggtcaacgatccgggcaaccagtacggcttcccctacctctggggcaccaccggcatcggctacaacccggcgaagatcaaggcggtgctcggcgacgacgcgccgctggactcctgggacatcttcttcaagcccgaatacatgcagaaactgagcaagtgcggggtggcggtgctggacaacggccccgagctgctgcccatcaccctcaactacctcggcctgccacaccacagccagaaggccgacgactacaagcaggcccaggcggcgctgctgaaggtgcgcccgtacatccgctacttccactcctcgaagtacgtcagcgacctggccaacggcgagatctgcatggtggtcggtttctccggcgacatcctgcaggccgcgacccgcgccaaggaggccaacaacggcgtggaagtgcgctactcgacgccgaaggaaggctcgccgctgtggttcgacatggtctcgatgccggtcgacgcgccggacgagaaggccggctacgccttcatgaactacctgctgcgtcccgaggtgatggccgcgatcagcaaccatgtgcactacgccaacggcaacctggccgccgacccgctggtggacgccgagatcaaggccgatccggcgatctacccgccgcaggagaagatggccaagctgttcgccctggaatccatgccgcagaagatcgaccgcgtgcgcacgcgcacctggaacacggtgaagaccggcaagtga

SEQ ID NO: 319537 - DNA, 615 bp, Pseudomonas aeruginosa
atgctggaaacctcgctcttcgtagccaccctcgccaccctgggcatgctctcgcccggcccggacttcttcctcatcatccgcaacgcggcgcgctaccagcgctcggcggcgatgatgacctcgctgggggtgatcctcggcgtggccacccacatgacctactgcgtcgccggcctggcggtgctgatcaccaccacgccgtggctgttcaacgcgctgaagtacaccggcgcggtctacctgatctggatcggcatccaggccctgcgctcgcgcggcggcggcacgctcgacctggcggtcggcggcgtgcagcgcgtcggccactggagcgcgttcctccagggctacctgtgcaacctgctcaaccccaaggccacgctgttcttcctcgccgtgttcacccaggtgctgagcctggactccagcttcgccgagaagctctggtacgccggcatcatcgtcggcctcgccgcactctggtggccgctgctggtggtgctgatccagagcgcggtggtgcgccgcggcctggccagggcccagggggtggtggacaagctgctcggcggcctgctgatcgccctcggggtcaaggtcgccctgagttga

SEQ ID NO: 319538 - DNA, 975 bp, Pseudomonas aeruginosa
atgagccgcatcttcgcagacaacgcgcagtccatcggcaacacgccgctggtccagatcaaccgcatcgccccgcgcggcgtcaccatcctggccaagatcgaagggcgcaaccccggctattcggtgaaatgccggatcggcgcgaacatgatctgggatgccgaagccagcggcagactgaagtccggcatgaccctggtcgagccgacctccggcaacaccggcatcggcctcgccttcgtcgccgccgcacgcggctacaaactgatcctgaccatgccggcgtcgatgagcctggagcgacgcaaggtgctcaaggcgctgggcgcggagctggtcctgaccgaaccggcgaagggcatgaagggtgcgatccagaaggccgaggaactggtcgcgggggatcccgggaagtacttcatgccgcagcagttcgacaacccggccaacccggcgatccatgagaagaccaccggcccggagatctggaacgataccgagggcgcggtggacgtgctggtctccggggtcggcaccggcggcaccctcaccggcgtctcgcgctacatcaagaacacccggggcaagccgatcctcgccgtggcggtggagccggtgacctcgccggtgatcagccagaccctcgccggcgaggaggtcaagcccgccccgcacaagatccagggcatcggcgccggcttcgtgccgaagaacctcgacctgtcgctggtcgaccgggtcgagaagatcggcgacgacgaagcgaagaacatggcgctgcgcctgatgcaggaagaaggcatcctctgcggcatctcctccggcgcggcgatggccgccgcggtgcgcctggccgaggagccgaacatgcagggcaagaccatcgtggtgatcctccccgattccggcgagcgctatctttcgagcatgctcttcgacggcctgttcagcgaacaggaactgacccagtaa

SEQ ID NO: 319539 - DNA, 1086 bp, Pseudomonas aeruginosa
atgaagaaacgctatgccattcccctgggcagcctggcggcgctgcttctgttgttgctggcgctgcacctggcgctgccgtacctggtgcgcgactacctgaacggcaagctggccgacatgggcgactaccgtgggcacatcgccgacgtcgacctggcgctctggcgcggcgcgtatcggatcgacgggctgagcatcgtcaaggacaacggcaaggtgccggtgccgttcctcgacgcgccgagcatcgacctgtcggtgagctggcaggcgctctgggatgatcacgcagtagtggcgcgggtggtcttcgagcgtccgcagctcaacttcgtcgatgccggcggcgaccgcgacgcctcgcagaccggtgccggcaccgactggcgcgagcaactggacaagctgctgccgatcaccctcaacgaggtgcgggtggtggacggcaccctgcgtttccgcaacttcacttcgaagccgccggtgaacctgcacgcctcggcgctcaacgccagcatctataacctgaccaacgtggccgacgcccggggcgagcggccggcgcgtctcgaaggcacggcgcggatactcggccaggcgccgctggaagtggcggcgcatttcgacccgctgagcgacttcgaggacttcgacctgcgcctgcgggtcacccgcgtcgagctgaagcggctcaacgacttcgccagcgcctatggcaagttcgacttcaatgccggcaccggcgacctggtgctggaggcccaggctaagcgcggccagttggatggctacatcaagccgctgctgcgcgacgtggacgtgttcaactggcggcaggacgtggaggatggcgacaagaacctgttccgctcggtgtgggaggcgctggtcggcggtggcgagacggtgctgaagaaccagcgcaaagaccagttcgcaacccgtgtgaacctgagcggtaatatccaccagcgggacgtcagcgcgttccaggcgttcctcgggattctccgcaacgcgttcgtcgaggcgttcaacgctcgtttcgagcgttccccggcgacgcgcgacgacgacggctga

SEQ ID NO: 319540 - DNA, 846 bp, Pseudomonas aeruginosa
atgaagttcgaaggcacccagtcctacgtcgccaccgacgacctcaagctcgcggtcaacgccgccatcaccctgcagcggccgctgctggtgaagggcgaaccgggcaccggcaagaccatgctcgccgagcagttggccgagtccttcggcgccaagctgatcacctggcacatcaagtccaccaccaaggcccaccagggcctctacgagtacgatgcggtaagccgcctgcgcgattcgcagctgggcgtggacaaggttcacgacgtgcgcaactacatcaagaagggcaagctctgggaggccttcgaggccgaggagagggtgatcctgctgatcgacgagatcgacaaggccgacatcgagttccccaacgacctgctgcaggaactcgacaagatggagttctacgtctacgagaccaacgaaaccatcaaggcgaagcagcgcccgatcatcatcatcacctcgaacaacgagaaggaactgcccgacgccttcctgcgccgctgcttcttccattacatcgccttccccgaccgcgagacgttgcagaagatcgtcgacgtgcactacccgaacatcaagcagtcgctggtcagcgaggcgctggacatcttcttcgacgtgcgcaaggtgcccggcctgaaaaagaaaccttcgacttccgagctggtcgactggctgaagctgctgatggccgacgagatcggcgaagcggtgctgcgcgaacgcgacccgaccaaggcgatcccgccgctggccggcgccctggtgaagaacgagcaggacgtgcagcttctcgagcgcctggcgttcatgagccgccgcgccagccgctga

SEQ ID NO: 319541 - DNA, 396 bp, Pseudomonas aeruginosa
atgctcagcggaagttgcctgtgcggcgcggtaagctatgaaatcgacgcgcccatcgagtcggccagtcattgtcattgcagccagtgccgcaaggcccacggcgcggcgttcgccacctacggcaaggtgcgccgcgaggcgttccgctatgtcgccggagcggacgcggtggccgaataccactcgtcgccaggcgtcacccgtaccttctgccgccactgcggatcgaacctgcagtggcttggcggcaacgaggacccgacgtacacctctatcgccctcggcaccctcgactcgccgctgccatcggtagcgcagcggcacatctacgtgggttcgaaagccgactggtacgtcatcgccgacgacctgccgcaggaacaccaatactga

SEQ ID NO: 319542 - DNA, 1182 bp, Pseudomonas aeruginosa
atgctgctcaacctgttcaacgaaatgcgcgcagccaaggtgccggtgtcggtgcgcgagctgctcgacctgatcgatgccctgaagcaccgcgtggtgttcgccgacatggacgagttctactacctggcgcgcaccatcatggtcaaggacgagcgccacttcgacaagttcgaccgggccttcggcgcctacttcaagggcctggagaagctcgacgaccacctcaaggcgctgatccccgaggaatggctgcgcaaggagttcgagcgcctgctgaccgacgaggaaaaggcgcagatccagtccctcggcggcctggacaagctgatcgaggagttcaagaaacgcctcgaggaacagaaggagcgccatgccggcggtaacaagtggatcggtaccggcggtaccagtccgttcggctccggcggtttcaacccggagggcatccgcgtcggcgacgccggcaagcgccagggcaaggcggccaaggtctgggaccagcgcgaatacaagaacctcgacgaccaggtcgaactgggtacgcgcaacatcaagatcgccctgcggcgcctgcgcaagttcgcccgcgagggcgcggcggaggagctggacatcgacggcaccatcgaccacaccgcgaaggacgccgggctgctcaacatccagatgcgcccggagcggcgcaacacggtgaagctgttgctgctgctggacatcggcggctcgatggacgcccacgtcaaggtctgcgaggagctgttctcggcctgcaagaccgagttcaagcacctggagtatttctacttccacaacttcatctacgagtcggtgtggaagaacaacctgcgccgcggcagcgaacgcaccgccaccttcgacctgctgcacaagtacggtccggactacaaggtggtgttcgtcggcgacgcggcgatggcgccctacgaaatcacccaggccggcggcagcgtcgagcactggaacgaggaagccggttacgtctggatgcagcgcttcatggagaagtacaagaagctcatctggatcaacccctatccgaaggacacctggaactacacggcgtccaccggcctggtccgcgaactggtcaaggaacagatgtatccgttgaccctgagcggcctggaggagggcatgcgcttcctctcgcgcggttga

SEQ ID NO: 319543 - DNA, 234 bp, Pseudomonas aeruginosa
atgaacctgaaaccccagaccctgatggtggcgatccagtgcgtcgccgcgcgcacccgcgaactcgacgcgcagttgcagaacgacgacccgcagaacgccgctgaactcgaacagttgctggtcggctacgacctcgccgccgacgacctgaagaacgcctacgagcaagccctgggccaatacagcggcctgccgccctatgaccggctgatcgaagagccggcatcctga

SEQ ID NO: 319544 - DNA, 477 bp, Pseudomonas aeruginosa
atgtcctacgactacgagaaaaccagcctcaccctctaccgggcggtattcaaggccaactacgacggcgacgtcggtcgctacctgcatcccgacaaggaactcgccgaggctgcggaagtcgccccgctgctgcatccgaccttcgacagccccaacacccctggcgtccccgcccgcgcgccggacatcgtcgccggccgcgacggcctctacgccccggacaccggcggcacctcggtgttcgaccgcgccggcgtgctgcgccgcgccgacggcgacttcgtgatacccgacggcaccgacatcccgccggaccttaaggtgaagcaggacagctacaacaagcgcctgcaagccacccactacaccatcatgccggccaagccgatgtaccgggaggtcctcatgggccaactggacaacttcgtgcgcaacgccatccgccgccaatgggaaaaagcccgcgggctctag

SEQ ID NO: 319545 - DNA, 1590 bp, Pseudomonas aeruginosa
atgaccgcacccgccgcctcaccctggagtcccctgcgccaagccaccttccgctggctatggctggccagcatcgcctcgaacatcggcacctggatgcacgaggtgggcgccggctggctgatgacctcgctctccgccagcccgctgaacgtggccctggtgcaggtcgccggatcgctgccgatgttcttcctggccctgccggccggcgccctcgccgatatcgtcgacaagcgccgctacctgctcggcgtgcaattgtggatggccttggtggccaccctgctggccagcctcaccctgctccagttgaccagcgtctggctgctgctcggcctgaccctgtgcatgggcatcggcaccgcgctgatgatgccggcctggagcgccaccactccggaactggtgggcaaggacgaactgccggcggcggtggcgctgtccagtgtcggggtcaacctggcgcgggcggtcggaccggccatcgccggggtgctggtgagcctggtcggcccctggctgaccttcgccctcaacgccctctccttcttcgcggtgatcgccgtgctgctggcctggaaacgcgaggccgtgccctcggtgctgccggcggaacgactgttcggcgccctgcgcgccggctggcgctacagccgcagctcgaggccactgcaatcggtgctggtgcgcgcggtggcgttcttcctcggcgccagcgccggcatgtcgctgctgcccctgatcgtgcgcggcgaactgcatggcaacgccatggacttcggcctgctgctgggcagcgtcggcgtcggcgcggtgctcggcgccgcgttcctgccgcgcctgcgcgaacgcctcggtagcgaccgcctggtgctgctctccagcgtgctctacgcactggtgctggtggccctggcgctgctgcgcaacctctatttgctggtgccggtgatgctgctcagcggcgcggcatggatcgccgtgctctccagcctgcaggtcgccgcgcagacctccgtaccggcctgggtccgcgcccgcgcgctggcggtctatatcctggtgttcttcggcagcatggccgccggcggcgccctgtggggtctggtcgccagccacctgtcgatcaccttcgccctgctctgcgccagcgccgcgctgctgctcggcctgttcgcgtcgctgcgctgtcggctgccggtcaccgaggccgaggacctcgcgccgtcgctgcactggccggcaccacttgtcgacgaagaggtggaccaggaacgcggcccggtgatggtcaccctcgagtacgacatcgacccgcaggacgccgcggcattccaggcggcgatggtcgaggtgcgcgccatgcgtcggcgcaacggcgcggtgtcctgggggctggtccaggacagcggcaaccgtcgcctgtggctggagttcttcatcgacgaatcctggctggagcacctgcgccaccaccagcgggtgacccgcggcgagttgcgggtcgaggccgccgcccggcgcttccagagcgccggcgtggaggtgcgcatccgccattacctgcacggcgcggccaggccttga

SEQ ID NO: 319546 - DNA, 1308 bp, Pseudomonas aeruginosa
atgatccgcgttcgaccggtcggccgcctggcccttttcctggcgctgggcggcacctcgccgtgccacgccgcgacagaggaagccaaggcacccgactacctggagtggcgcctgctcaaccgcaactacttcctctacaacgactatcgccgcgcggacgccgggcgcggctaccgcaaggaatgggcacacggcctgatcgtcgacctggagtcggcctatactcccggccgcgtcggtttcggcctcgatctccacggcttcgccggcttcaagctcgacggcggacgtggccatgccggcaccggcctgttgccgctggactcatccggcgataacgccagcgagtattccgacgccggcgccgcactcaagctgcggctcggcgagagcctgctcaaggtcggcgagatgaccgtcgagaccccggtcttcgataccagcgacaagcgcctgcaaccccagtacgccaggggcttcttcctgcagagcgacgacctcgaccgcgtgcggatccaggccgggcgcttcaccgccttcaaggaacaggcctccagctccggccatggcgacttcgacggctacggcgcgagcaccgccggcagcgccatcggcttcgccggcgccagcctggcggccagcgacaacctgagcggctcgctgttcgccgcgcaactggacaacgtctggcgccaggtctatctcaacatgaacctgcaacgtgccgcgttcagcctggatggcaacctctatcgcacgcgcgaccagggccgcagccgggccggcgcgatcgataccctggcctacagcctgcaactgaagtaccgcgtcggcgcgcagggtttctccctggcctaccagcgtgtccatggggatacgccgttcgacttcgtcggaggtgactccatctacctcgccaactcgatcaagtacgccgatttcaacggtcccggcgaacgctcctggcaggcccgctacgacctcgacctggccccgttcggcctgccggggctgagcttcatggcgcgttacgtcagcggccgcgccatcgacggcagccatgcgccggccggcggcgcctacaacccgctgggcgccgatggccgctaccggcccttgcagggcagcggcggcaagcactgggagcgcgacctcgacctgcgctacctgttcgcctcgggcccgctcaaggacctctcgctgaacgtctcgcacctcagccaccgggccaacgcggcccaggccggcgacgacatcgaccgcctctacctgatcgtcgaatacccactcaaaggctcgctctga

SEQ ID NO: 319547 - DNA, 1980 bp, Pseudomonas aeruginosa
atgagccacgatccgccgagcaaggaccgccgccatttcctcactaccagttcggtgctgggcgccgccggagtcctgtggtccgccctgcccttcgccaacgccgccagcctttctcccgcaagcaacccaggaggttccatgaccgccgacctgatcctgcacaacggccgtttccacaccgtggaccgcgacaaccccaccgccaccgccgtggcgatcaaggacggcaagttccttgccgtcggcaacgacgccgaggcgatgctccatcgcggcagcgccacccaggtgatcgacctgcagaagcgcaccgtgatccccggtctcaacgactcgcacctgcacctgatccgcggtggcctcaactacaacctggagctgcgctgggaaggcgtgccctccctggccgacgccttgcgcatgctcaagaaccaggccgaacgcacgcccagcccccagtgggtgcgggtggtcggcggctggaacgagttccagttcgccgagaagcgcatgccgaccctggaggaattgaacaaggccgcgccggacaccccggtgttcgtcctccacctgtacgatcgcgccctgctcaaccgcgccgccctgcgcgtggtcggctacaccaaggacacgcccaacccgcccggcggcgagatcgtccgcgacagcagcggcgaacccaccggcatgctgatcgcccggcccaacgcgatgattctctacgccaccctggccaagggaccgaagctgccgctggaataccaggtcaactccacccgccagttcatgcgcgaactcaaccgcctcggcctgaccagcgcgatcgacgccggcggcggcttccagaactacccggacgactaccaggtgattcgcgaactggccgaccagggccagctcaccgtacgcatcgcctacaacctgttcacccagaaaccgaaggaagaactcgccgacttcaagaactggaccggcagcgtcaagtacggccagggcagcgatttcttccgccacaacggcgccggcgagatgctggtgttctccgccgccgacttcgaggacttcctcgaaccgcgcccggacctgccgcagaccatggagcaggagctggagccggtggtccgccacctggtggagcagcgctggccgttccgcctgcacgccacctacgacgaatcgatctcgcggatgctcgacgtgttcgagaaggtcgaccgcgacattccgttcaacggcctgccctggttcttcgaccacgccgagaccatcaccccgcgcaacatcgagcgggtgcgggcactcggcggcggcatcgcgatccaggaccgcatggccttccagggcgagtacttcgtcgaccgctacggtgccaaggccgccgaggccacgccgccgatccagcgcatgctcgccgagggcgtgccggtgggtgccggcaccgacgccacccgggtctccagctacaacccctggacctcgctgtactggctggtcagcggccgcaccgtcggcggcatggccctgtatccgcagggcctgccgcgggaaaccgcgttgcagctgttcacccacggcagcgcctggttctccagcgagcagggcaagaaaggacagatcaaggttggccagctcgccgacctggcggcgctgtcggcggacttcttcggcgtcgaggaagaggccatcaagtggatcgagtcggtgctcacggtggtcgacggcaaggtcgtctatgccgccgccgagttcgacaagctcggtccgccggcgccgccggtgctgccggactggtcgccggtggccaaggtacccggccactggcggcaaggcgcgccgctgaccgcccaggtccaccagtgcgtcggtgcctgcgcggtacacgcccacgagcacaaccgcgcgcgccactccaacgtaccggtgagcgacttccagggtttctggggcgcattcggctgttcctgcttcgctttctga

SEQ ID NO: 319548 - DNA, 681 bp, Pseudomonas aeruginosa
atgagccactatctcgaagttctaactccgcagaacagccagatcatcttcatcgaccagcagccacagatggcattcggcgtacagtccatcgatcgccagacgctgaagaacaacgtagtgggcctggccaaggcggcgaaggtattcgacatcccggtcaccatcaccacggtggaaaccgacagcttctccggcccgacctatccggagctgctggcggtgttccccgaacagaagatcctcgaacgcacctcgatgaactcctgggacgaccagaacgtgcgcgactcgctggccgccgcgggccgcaagaaggtcgtggtcgccgggctgtggaccgaggtctgcaacaccaccttcgccctctgcgccatgctcgagggcggctacgagatctacatggtggccgatgcctcgggcggcacctccagcgacgcccacaagtacgccatggaccgcatggtccaggccggcgtggtaccggtgacctggcagcaggtcctgctggagtggcagcgcgactgggcccgccgggatacctacgacgccgtgatggccatcgccaaggagcattccggggcctacggcatgggcgtggactacgcctacaccatggtgcacaaggcgcccgagcgggtgacccacggcgaacgcatcggcccgaatccggccaagtga

SEQ ID NO: 319549 - DNA, 282 bp, Pseudomonas aeruginosa
atgaagctctacgtattgtcgctgggcgccggactgttggtggggatcgtctacagcctgctgcaggtgcgttcgccggctccgccgctggtggcgctggtggggttgctcggcatcctgctcggcgagcaggtcatcccggtcggcaagcaattgctcggcggttgcgcgttcgcctcggcctgcgacaaggcgggttcggtcggccatgtgctggggcaactaccgggtcggcatcgcctcgaccaggccgctggcccgtcggaaaaggaaaagggttga

SEQ ID NO: 319550 - DNA, 894 bp, Pseudomonas aeruginosa
atgactgttgccatagacagaacaaagggcgaccaatccacgccagggaacatcataaggggagaagggtacgccttgattcgcaatagtgaggcgactcccgatccggacaaggtgatccatattccttgtgccgattcgttttccgtcatcgtgcagttgcgcgatttcaattcccatcgtctctggaatggaaacaaactggttttcgatggcggacatccacggaaaagtatctccatcgcctatcttggcgatgaaataaagtgccagcaccggacaacttacgacaatgtccgcttcatgttgccgcgcgcttcgataaaggagtttctctacgaagaagggcaacgcgcgtccgccgagccggagcggatcatcggtgtcgacgatccggtggtctatcacctggcgctggcgctgctgcccagcttcgccagggcgggcgagcgcaacgaactgttcatcgagcaggtcatgctggcgctgttgacccacgttcaggatcgcttcgcttcgacccaggtcccggtctgcaccggcaagggcctggcgccctggcaattgcgcagggccaaggagctgatcgccgggcatctggccgagggcgtgtcggtggcgcgcctggccgaggagtgcgggctctcgcgcagctatttcaccaaggccttcaagtgcagcaccggtgtttcgccccacgaatggctgatgcgcatgcgcgtcgaccgggccaaggagctgatgctgggcagcgacgaaccgctttcgcagatcggcgtcgcctgcggcttttccgaccagccgcatttctcgcggatctttctccggctggccggcgcctcgccctcgacctggcgtcgggtcaagcggcagcgcaccgacgcagcgctctga

SEQ ID NO: 319551 - DNA, 1104 bp, Pseudomonas aeruginosa
atgaaagcagtacgccagggtcgcggcgtaacggggttgctcatgctcctggcgctggccgggtgcagttcgcggtcggcggagccgccgccgcccaaccccgacgaagtacgggcgaagatcgtccgcctgatgccggccacggtgcgcgatcgccaagggtgggccagcgatatctacgcggccttttccgcccagcagatctaccccagcgacgagaatctctgtgcggtgctggcggtgaccgagcaggagtccacctaccaggtcgacccgccggtggccggcctgggcaggatcgccacccgcgaggtcgagcgtcgtgccggcaagctgcacgtgccggcgttcctggtcagctcggcgctgaatatcaagtcgcccgatggccgcacctacagccagcgcctggccgcggcgcgcacggagaaggaactgagcgagacattcgacgatttcatcgccatcgtgcccatgggcggcaagctgttcggcggcttcaacccggtacacaccggcgggccgatgcaggtcagcatcgctttcgccgagcagcacgcggacggctatccctatccgctggacggcagcatccgccgcgaggtgttcagccggcgcggcggcatgtatttcggcatcgcccacctgcttggctatccggcggactacccggcgccgctgtaccgcttcgccgacttcaacgccggctggtatgccagtcgcaacgccgcgttccagagcgcggtgagtcgcgtctcggggattccgctggcgctggatggcgatctgatccgctacggcacgcgcacgccgggctccaccgaactggccgtgcgcagcctcggcaagcgcctggacatgagcgacgcggcgatccgccgggcgctggagcagggcgacagcccggagttcgccgacagcgcgctgtaccgcaaggtcttcgccctggccgaaagcgccaccggcaagacattgccccgcgccgtgctgccggggatcaccctggagagcccgaagatcacccgcaagctgaccaccgcctggttcgccaagcgcgtcgacgaacgctaccagcgctgcatggcgcgcgtgcggaaacgctga

SEQ ID NO: 319552 - DNA, 327 bp, Pseudomonas aeruginosa
atgaagacccgatacagcgccgaggcaccggcgcgcgacgaactggaccggctcgccggtccgacgctggtggagttcggtaccgactggtgcggccattgccaggccgcccagccgctgctggcggaagtattcagcgactatccggaggtcggccacctgaaggtcgaggacggtcccgggcgccgcctggggcgctcgttccaggtcaagctgtggccgaccttcgtctttcttcgcgacggccgggaggtggcgcgggtggtccgccccggcagcgccagcgtgctggaagaagcgttcgagagcctggtcggcgagggctga

SEQ ID NO: 319553 - DNA, 501 bp, Pseudomonas aeruginosa
atggaacctggcagctaccaactgaccatgagcgtgctcatgacccccgacaaggcgaacttctccggcaacgtccacggcggcgcgctgctcaagctcctcgacgaagtggcctttgcctgcgccaagcgctacgccggacgctacgtggtgaccctgtcggtggatcaggtgatcttccgcgagccgatccatgtcggcgaactggtgaccttcctcgcctcggtgaactacaccgggcgcacttcgatggaggtcggggtgaaggtgatgaccgagaacatccacgagcgcaccgtgcgccataccaacagttgcttcttcaccatggtggcgatggacgaccagcgccggccggtggcggtgcgtccgctggaaccggagaccgcgatcgagaaacgccgctacgcccaggccctggcccggcgcgagcagcgcaagctgatggaactgcgctaccaggagatccgcgaacaggtggatcacgcgatgccggcctga

SEQ ID NO: 319554 - DNA, 525 bp, Pseudomonas aeruginosa
atggctctctatagcgccggcgtcgaatacggcatccactgcctgttgttcctcgccgacgagaaaggcgacagccgcgagtccagcgtacgcaccctcgccgagttgcagggcgtgccgccggaactgctggccaaggtcttcacccgcctggccaaggccggcctggtggctgccaccgaaggcgtgcgcggtggcttccgcctggcacggccggccaacgaaatcagcgtgctcgacgtggtccgcgccatcgacggcgacaaatcgatcttcgaatgccgcgaggtccgcgagcgctgcgcgatcttcgaaggcaacccgccttcctgggcgacccgcaacacctgctcgatccacgcggtgatgctcaccgcgcagaagcgcatggaagaagcgctggcccagcagaccatcctcgacctggtacgccgggtggggcgtatcgcgccaccggagttcggcgaagaagtgctgcgctggatggatgccagccgggaaggacgcggcggctcccgcgactag

SEQ ID NO: 319555 - DNA, 1083 bp, Pseudomonas aeruginosa
atgaaacaacgtatcctgatcgtcggtgccggattcgccggcatgtggagcgcgctgagcgcagtgcgccagctcgaccgccagggccgcgacgacgtcgaggtcgcggtgctcgcgccgcagcccgagctgcgcatccgcccgcgtttctacgagcctgacgtgcagcgcatggcggcgccgctgggcgaattgttcgccgcggtcggcgtgcgtttcgtgcagggcagcgcgcagcgcatcgacgtggccggcaagtgggtggagtaccgcgatgccgagggcacgctggcgcaactggactacgaccgcctggtgctggcggccggcagcggcgtgtggcgtccggcgagtgtcgtcggcatcgacggcatcgagaccgccaccgagatgccggcgcgcctgcgggcgatcctcggcgagaaagcggcgctgcgagtgatcgtggtcgaccgcggcgccgccatcggcgcatcgatgggcgcggacctgagcggcttgatcgccgaggcctcggcggaactgggcgtggagtggtgcctggggcgttcggtggcggcggtggatgccgagggcgtgacgctcgacgacggccagcggatcgaggcgaagaccgtggtctggaccgtgggcgtgcgggccagcaccctgaccgggcagattccgggcgagcgcgatgcccagggtcgcctgcatgtcgaccgcaacctcaaggtgctcggtctcgacgatgtctacgccaccggcgacgtggcccgcgcggctaccgacgacctcggcaaccatgccctgatgacctgccagcacgccatcgccctgggtcgctcggccggcaataacgtggccgccgacctgctcggcgtcgagccgattccctacagccaggtgaagtacgtgacctgtctcgacctcggcggctggggcgcggtgttcaccgagggctgggagcgccaggtacggttcgtgcgcgaggagggcaagaagatcaagaccgagatcaatggcgtgtggatctacccgccggcggcggaccgcgccgtggcgctggcggcggccgacccgctgattccggtggtggcctga

SEQ ID NO: 319556 - DNA, 1119 bp, Pseudomonas aeruginosa
atgaacggcaaaggacgcggcaatactctctacgccatcagcctgctgctggtcggcggttgctccagcagcctgcaacataacgagggggcgacacaggtagcgcacagcccggacaagcgtgcgatgagcagcatcttcctaccgtccggacgcaactcgacgaccgccatcgaaaagggcgaagccctgtcgatcaagctgatcgcggcctacctctgcgattttcgcgaggagaaaggcaatggcgaccttctggcgagcggcaacaaggaatccagcctctgcaccggtggcgacggcagcctgttcgacaatgcgcgcagcactcagggcgagatcgccatcaccgccagtgccggcgaacgcggtgcgacctccaacggcctcagcttcaatcccgccgacatcaagcgcaacggccgggttgtctattacaacgaggacatccgcgagagcggccaattgatcaacgcgctcaacatcccgatctacggtccgaagacctacgacggcgggaccttcttcgtcgacctggcgatactcgaactggacgagaacgagaacaaacagagccgcaagctcctgcaggagctggccaaggtcggcagcgcctcctacgcccccggcacgccggttctcaatctgctgaacagcctcggcgacgcgctgctcagcgccaacggcgacgacgtcgaacttcgctaccagatggagttcgatccgccgtaccagggacgcacgcggaaaacggatacgcagccacgcaacgggaccagcatcagcagccgggctcccttgcgcgaggggtactacgccttcgtgagaatggagcagcgtgaccgcctgccggccttcgggcagttgacagtgtccaccgggtcccacaatcccctgctggtcgaagcgaagaccatgcaactctatcgaggcggctcctggttgctggtacgggttgcccgcgaagaccatgagcaagcctcggcgcaggacgtttctaccgcgaccgctgcattccttgaacaactgggtcgcgcggatgtcccaccggacacgttcgccaaggtgctggagcaaagcctcaagctcatggctgcggagacggcgccagcccagtag

SEQ ID NO: 319557 - DNA, 915 bp, Pseudomonas aeruginosa
atgagaacctccctgctcgtcgccgccctgggcctcgccctggcggcggccctgcccggcggcgcgccgctggcgcaaccggaccccgaggcgaccatggaccgcagcctgctgcaacgccaggacctgccctatcgcttcagcgccgtggacctggattccgtcgatggccagcggcattaccggctgtggctcggccgaccgctgcaggcaccgcccgccgccggctacccggtggtctggatgctcgacggcaacgccgccgtcggcgccctcgacgagtcaaccctgagacgcctggccgacggcgacgcaccgctgctggtcgccatcggctaccgcacgccgctgcgcatcgaccgcgccgggcgtaccttcgactacacccccgcgagtcccggccaggccgatcagcgcgacccgctcaacggcctgcccagcggtggcgccgacgccttcctcgacctgctgcgcgacggcatgcgcccggccgtggcggcgcaggcgcccctggacactgcgcgacaaaccctctggggacactcctacggcggcttgctggtgctccacgcactgttcacccgtcccggcgagttcgcccgctacgccgcggccagcccgtcgctgtggtggcgcgacggagcgatcctcggcgaacgagcggggctcgaacagcgcctgcgcggaaagcgcgcggaactcctgctctggcgcggcagcgccgaaccggccagcccgcgcggctcgctgaaagccgagccgggccaggcgatggcgcggctggtagatgacctgcgccgggttgccgggctcacgctggacttccagccgctcgacggcctgggtcatggcgaaacgctgggggcctcgttgcgccttctgctcgcccgtccggcggtggaacgccagcgctga

SEQ ID NO: 319558 - DNA, 2241 bp, Pseudomonas aeruginosa
atgtcctcacgcgcccttcccgccgttcccttcctgctgctgtccagttgcctgctcgccaacgccgtacacgccgccggccagggcgacggctccgtcatcgagctgggcgagcagaccgtggtcgccaccgcccaggaggaaaccaagcaggcgccgggggtttccatcatcaccgccgaggacatcgccaagcgaccgccgagcaacgacctgtcgcagatcatccggaccatgccgggggtcaacctgaccggcaacagctccagcggccagcgtggaaacaaccggcagatcgacatccgcggcatgggcccggagaacaccctgatcctggtcgacggcaagccggtcagctcgcgcaactcggtgcgctacggctggcgcggcgagcgcgacagccgcggcgacaccaactgggtgccggccgaccaggtcgagcgcatcgaagtgatccgcggcccggcggcggcgcgctacggcaacggcgcggcgggcggcgtggtgaacatcatcaccaagcaggccggcgcggaaacccacggtaatctcagcgtctacagcaatttcccgcaacacaaggccgaaggcgccagcgaacggatgagcttcggtctcaacgggccgctcacggaaaacctcagctaccgcgtctacggcaacatcgccaagaccgactcggacgactgggacatcaacgccggccacgaatccaaccgcaccggcaagcaggccggcaccctccccgccggtcgcgaaggcgtgcgcaacaaggacatcgacgggctgctcagctggcgcctgacgcccgagcagaccctcgagttcgaggccggcttcagccgccagggcaacatctacaccggcgacacgcagaacaccaacagcaacaactacgtgaagcagatgctcggccacgagaccaaccgcatgtaccgcgagacctactcggtcacccatcgcggcgaatgggacttcggcagctcgctggcctacctgcagtacgagaagacccgcaacagccggatcaacgaaggcctggccggcggcaccgaaggtatcttcgaccccaacaacgccggcttctacaccgccaccctgcgcgacctgaccgcccacggcgaggtcaacctgccgctgcacctgggctacgagcagaccctgaccctcggcagcgagtggaccgagcagaagctcgacgaccccagctccaacacccagaacaccgaggaaggcggctcgatccccggtctcgccggaaagaaccgcagcagcagttcctcggcgcggatcttctcgctgttcgccgaggacaacatcgagctgatgcccggcaccatgctcaccccaggcctgcgctgggaccaccacgacatcgtcggcgacaactggagcccatcgctgaacctgtcccacgcgctcaccgagcgggtcaccctgaaggccggtatcgcccgcgcctacaaggcccccaacctgtaccagctgaaccccgactacctgctctacagccgtggccagggttgctacgggcaaagcaccagttgctacctgcgcggcaacgacggcctcaaggccgagaccagcgtgaacaaggaactgggcatcgaatacagccacgacggcctggtagcggggctgacctacttccgcaacgactacaagaacaagatcgaatccggcctgtcaccggtcgaccacgccagcggcggcaagggcgactacgccaacgcggcgatctaccagtgggagaacgtgcccaaggcggtggtcgagggcctcgaaggcaccctgaccctgcccctggccgacagcctgaagtggagcaacaacttcacctacatgctgcaatcgaagaacaaggaaaccggcgacgtgctctcggtgacgccgcgctacaccctcaactcgatgctcgactggcaggccaccgacgacctctcgctgcaagccacggtcacctggtacggcaagcagaagccgaagaaatacgactatcacggcgaccgtgtcaccggcagcgccaacgaccagctctcgccctacgccatcgccggcctcggcggcacctatcggttgagcaagaacctgagcctcggcgccggcgtcgacaacctgttcgacaagcgcctgttccgcgccggcaatgcccagggcgtggtcggcatcgacggggccggcgcggcgacctacaacgagcccggacggaccttctataccagcctgaccgcgtcgttctga

SEQ ID NO: 319559 - DNA, 1341 bp, Pseudomonas aeruginosa
atgcgcaggcacccgctgttatggaaactggcgctgctgcaggtcggcttctgcctgctgctgacctggctgatctacacctggggcctgtcggtggagcgcagcacctacttcctcgccccggccgaccgcagctacctggcggactacgcgcggcaggcggaggatgcctggcgcagcgagggtgccgcgggcgccgaacgcttccgcaaggaactgtcggcgaaggaagatacctgggtggcgctggtcggaccgcacctggaaagcctcggcagcacgccgctaagcgccgaggagtcgagccacctgaccttcatgcgcaagctcgactggccgatgagccggcgcctgcaggacgaactgccgtacgtcagcatcgagttccccggacatcccgagcagggccggctggtaatccagttaccggagcgcttgctgcccggcgggctgaccccctggacccacctggtcacccacggcatagtcccgaccctgctggccgccctgctcggcctgctgctctatcgccacctggtggtgccgctgaaccgcttgcgcgatcgcgccgacgccctgcgcgccgacgaactggaaagcactcccctcgccgcaccgctggcggcccgccgcgacgaactgggcgagctggcccaggccctggagcacatggccgagcgcctgcgcctgagtctcgcccagcagcgcctgctgctgcgcaccctgtcccacgaactgcgcacgccgctggcgcgcctgcgcatcgcccacgacagcgagctaccgccggaacagttgcgccagcgcctggatcgcgaaatcggcgacatgcaacgactgctggaagacaccctcgacctcgcctggatggacaccgagcgcccgcaactgcccaccgagccggtgctggcgctgtcggtgtgggaagcgctgcgcgatgacgcctgtttcgaaagcggctgggacccggcgcggctaccctgccgcttgggcgtcgactgtcgcgtcgaggtacacctggacagcctggcccaggccatggaaaacctcctgcgcaacgccatccgtcactcgcccgaggacggcacggtcagcctcgacggcgagcgcgagggcgacttctggcacctgcgcctgcaggaccagggccctggcgtggcggaagaccagttggaacgcatcttcctcccctaccagcgcctggacgatagcgccggcgaaggtttcggcctcggcctggcgatcgcccggcgcgccatcgagctacagggcggccggctctgggccagcaacggcaagcccggattgtgcctgcacctgtggctgccggcggccgcctga

SEQ ID NO: 319560 - DNA, 717 bp, Pseudomonas aeruginosa
gtgaatcattctcatatttcaatcccatctccccgcctgctgctggtcgaagacgacccgcgcctacgcgaggatctcgacgcgcatttccgccggcgcggcttccgcgtaaccgtctgcggcgatggctcgcacggactggaagccgccgggcgcgaagcgttcgacctggtgttgctggacatcatgctacccggcctcgacggcctggcgctgctggagtcgctgcgccgcgagcaggccacgccggtgatgctgatgtcggccctgggcgccgaacaggatcgcatcagcggcttcacccgcggcgccgacgactacctgccgaagccgttcagcctggccgagctggatgcccgcaccgacgccctgctgcgccgcgtacgactggaccgcctgccgtcggcgcagcggcgggatacccggctggtgttcgacgaccaggcccaggatgtgctccaccagggccttccggcggggctgacgccatccgagtaccgcctcctggcgacgctccgcgaacacgctggcgaggcgctgagcaagccgttcctctaccggagcgtgctgcaccgcagctacacgcgcctcgaccgcggtctcgacgtgcacgtctgcaacctgcggcgcaaactcgccgcggtcgccgtccgtcacctgcagatccaggcggtacgcggccagggctacctgctggtggagacggaacacccctga

SEQ ID NO: 319561 - DNA, 2226 bp, Pseudomonas aeruginosa
atgctgttctcccaacacacccgcctggtacacgtggactccccgctgggacccgaggtcctgcaactgcaacggctggagggtcgcgaagagctgggccggctgttcagccacgagctcgaactggtctcgagcaatcccgccttgcctctggatgccctgttgggcaagccgatgagcctcgcgctggaactccccggcggcagccggcggtatttccacggcatcgtcgcgcgctgtagccagggcgccggcgccggccagttcgccagctaccaggtcaccctgcggccctggctgtggctgctgacgcgcacctccgactgccgcatcttccagaaccagaaggtcccggatatcatcaagcaggtgttccgcgaccttggcttctccgacttcgaggacgccctgagccgctcctaccgcgagtgggaatactgtgtgcaataccgcgagaccagcttcgatttcgtcagccggctgatggagcaggaaggcatctactactggttccgccacgaaaagaagcgccacatcctggtgctctccgatgcctacggcgcgcaccacagcccggccggctacacaagcgtgccctattacccgccgagcctcggccatcgcgagcgcgaccacttcttcgactggcacatggcgcgcgaggtccagcccggctcgctaagcctcaacgactacgacttccagcgtcccggcacccgcctggaagtgcgctccaatgtcgggcgcgcccatgccgcggccgactacccgctctacgactaccctggcgagtatgtgcagagccaggacggcgaacactatgcacggacccgcatcgaggcgatccagacccagtacgagcgagttcgcctgcggggatgcgccaggggtatcggggcgggccatctgttccacctgagcaactacccgcgcctggaccagaaccgcgaatacctggtggttggcgccgagtaccgggtagtccaggaactctacgagaccggtaatggcgggggcggcgcgcagttcgagagcgagctggactgtatcgacgccggccaggctttccgccccttgccgtcgaccccggtgccggtggtgcgcggcccgcagaccgcggtggtggtcgggcccaagggcgaggagatctggaccgaccagtacggccgggtcaaggtgcatttccactgggaccgccacgaccagtccaacgagaacagctcctgctggatgcgcgtctcgcaggcctgggccgggaagaactggggctcgatccagatcccgcggatcggccaggaagtgatcgtcagcttcctcgaaggcgacccggaccggccgatcatcaccgggcgtgtctacaacgccgagcagacggtgccctacgagctgccggcgaacgctacccagagcggcaccaagagccgttcgagcaagggcggcacgccggccaacttcaacgagatccgcatggaggacaagaagggcgccgagcagttgttcatccatgccgagaagaaccaggacatcgaggtcgagaacgacgagacccactgggtcggccacgaccggaccaagaccatcgaccacgacgagacggtgcatgtgaagcacgatcgcaccgagaccgtggacaacaacgagaccataaccatcggcgtcgaccgcaccgagaaggtcggcaacaacgagaagatcagtatcggcgcgaaccgcaccgaggacgtcggcagcaacgagaccatcagcatcggcgtcgaccgcaccgagaaggtcggcagcaacgagaagatcagcatcggtgccaatcgcaccgaggacgtcggcaacgacgagaccatcagcatcggcgcgaaccgtagcgagtcggtgggcaacaacgagacgatcagcatcggcgccgaccgcagcgagtcggtgggcgccaacgagaccatcgacataggcggcaaccagagcaccagcatcggcaagaacgagtcgcgcagcgtcggccagggccgcgatacctcggtgggcaaggacgatagcctggacgtgggcaagagcttcacgctcaatgccggcgactcgatcaccctggtcaccggtgccgccagcatccgcatgaagaaggacggcagcatcgtcatcagcggcaagaacatcaccatcgacggatccggggcgatcaacgtcaaggccgacaagaacgtggtggtgaagggacgcaagatcctccagaactga

SEQ ID NO: 319562 - DNA, 450 bp, Pseudomonas aeruginosa
atgagtgtcgagatccatctacccggggccacgacggcccttcccgcgcgcctggacggcgtggtcatcggcgtcctcctcgacgtgccggacgccgccgctccggtggtcgcctatcccggttgcccgagcgagcacggcctggcggcggccaccaccacccagctcagtcgcgccgacatcggcgcccaggtagcgctgatgttcgtcgccggcgatccgcgccagccgctgctgatcggccgcatccagcgcctgccgcaggaagcgctggcgcaactggacggcgagcgcctggagttcagtgccgaacgcgagatcgtcctgcgttgtggcaaggccagcatcaccctgacccgcgccggcaaggtgatcatccgtggcgcctatctttccagccgctccaccggggtcaaccggatcaagggcggttcggtgcagatcaactga

SEQ ID NO: 319563 - DNA, 1113 bp, Pseudomonas aeruginosa
atggaactgttgaacgccaccccgctggccgccgcctacaaccaggggctcgacgccgaaggccgggagtcgctggtggtgatcgccaagggcagtttcgacctgccgctggacggtcgcgaggcgcgcctgctggacgagcagcagacgctgctgatggtcgatgaattctatggcgagccggggttttccgcgccgcgccgggagtgcgagttcgttcccttcaagccgttctgcgatgtgctggtgctgggcagcgcccaggcgcccggcgggcggccggtacagcagttgaccgcgggcatccgcgtcggccgggtgagcaaggcgctggcggtgcatgggccgcgccagtgggaaccgggattgctcggtgccggcgcgggcgtcgcgcagccgttccagagccaggacatttcctacgccagtgccttcggcggcagccatgcctcgccggacaaccccggtttcatggattgctacatggccaatccggccggatgtggctggtttccgcgcagcgccgacaccgccgagatcgtcggcacgccgatgccggccacggaaaagctcggcgagccggtggacagcccccacggccgcttcacgccgatggcgctcggcccgctcggccgccactggcaggcccgggtcggcttcgccggccgctacgacgacacctggttggccgagcgcttcccgttcctgcccgccgacttcgacgagcgctacttccagtccgcgccggccgaccagtggaccgaccatctgcgcggcggcgaggaggtcctgctgctcaacctcaccggcgaggagcgcgcggccttccgcgtgccgcgcagggaggtcccggtgaccttcttcctgaaaaagggtggccacgaaaccgcgcaggcacggatcgataccctgctggtggactgcgacgcccgtcgcgtggaagtcacctggcgcattcgccggccgttgaagcgcaacctgttcgagatcgcccaggtgctggtcggcagcaagtccgccgcctggtggcgcgcccgcgagctgggcaaggactactacccctcgcttgccgcgttggcacgcagccgccaggccgaggaggacgaggcatga

SEQ ID NO: 319564 - DNA, 1038 bp, Pseudomonas aeruginosa
atgagccaggccctgagcatcgtcgcctccggcatggtcagcgcggtcggtctcagcgcgccggccagctgcgcggcgatccgctgcgccctggacaacttccaggagacgcgtttcatcgaccagggcggcgaatggttggtcggcgctccggtgatgctgcccgagccgtcctccggctacgcgcaattggtggggatggctgccatggccatcgccgaatgtgtggccgggttgcccgccgaggacattcgcgaaatgccgttgctgcttggcgttgccgaagtcgaccggcccggacgactggcggggttggagcagcctttgctacaggccatcgaagagcgcctgggttaccgcttccatgaacgttcctgcgtcatcccgcgcggtcgggtgagcgccgcggtggcgctcctcaacgcgcgcaagctcatcgaacaggggtgttcgaaggtgctgatcgccggagtcgattcctacctgaccgcggcgacgctggcggcctaccaggaacgcgaccggctgctgggcagccactgccaggatggcttcatccccggcgaaggcgcggcggcggtactggtgacggccgcgtgcgccagcgaggaaccgcaattgctgtgcctggggctggggttcggggtggagaaggctaccgtcgaaagcgagggcctgccgctgcgggcggatggcctcacccaggcggtgaaagcggcgttcgcggactgcgggttcggttacgaacttgtcgactatcgcctggcagacctccccggcgagcagtattacttcaaggaggccgcgctggccttgagtcgaaccctgcgggtgcgcaaggagcgcgtcgaactctggagccctgcggattgcatcggcgagtgcggagcgatgacaggccccgcgctgctgtgcatcgcccttgccgcctcacgcaaggggtatgcacacggcccgcaggtactctgtcattcgggcaacgatgctggcgaacgggccgcggtggtgcttggctaccagcgagtgagggcgaactag

SEQ ID NO: 319565 - DNA, 948 bp, Pseudomonas aeruginosa
atggccaacgaggtctatgccaacggccgcgagctctcctgcaagtcggcctcggggaaatcgatagcgtcgttccccgacgtctgcttcacgccgcctcaggcaccaccgacgccgttgggcgtgccggtcccctaccctaataccggcatgtcgaaggacaccacccgaggtagccggaccgtaaggatcacccgcaaggaagtgatgctcaagaacaagagccacttcaagaagagctacggcgacgaggctgggcgtgcgccgaagaaaggcatcatcaccagtaccaataccggcaaggtctatttcacttcatggtcgatggacgtgaagatcgaaggcctgaacgtcgtccgccatctcgacctgaccacccacaaccacaacccctctcccggcaataccgcgacctggccgcacacctcgaagatgaaggcggccttcaagccgggcggcaagtgtgccggcatggagcacctgcgcctgcagccctacagcaaggcgtgccctagcaccgcgggcgggggcgcacagaccggccaccacctgattcctggtcgctgtatgcgcggcaaggccggctacagccactccaaggccccggtgatctgtgtgtcgcgcggcaaccagcaccagggctcgcacaagcgttgtcacgcgaagttcgatccggtcgaactggaccacttcgacaaaggcaagccgttcaagtacgaaaccgcgcgcaacaccgcggctgcttcggcagggggagcgttgagcccgccgcgcgagctgacgaaaaaagaaaaggagtgcgtcgccttccagctcgaccagtactacaaggccaagcccaagaaggggccgggctgcaccaccgccacgaacctccgcgcctcgggcgcggcgggaaaagtcataccacccgcgcgttccgcgccggcacctgcgggacgtccatag

SEQ ID NO: 319566 - DNA, 915 bp, Pseudomonas aeruginosa
atggcaaagagcgagaccgccctctatttcaccaacgtcattgcgatcgggcctcaagaggcgctgctcgccgggcacctctacctggagggcgcggaacccagcgtgacccgggtgatgatgatcgaccaggacgactggttccacgtctacgatatccccgaagtcgtctacagcgccctgcagaggagtccgcggcgcgggcagcagaaaggtgactactgcttcctgggacgcgccggcctgttgcgtgaacacccgtccgggcagtccagcacggatgccacgctggacatcgacaacgtctacctgatggatctctgcgaggtggacggtgagctctatgcctgcggcacccagaaccaggtgctgcggcagaacaagggcgtttggcagcgtatcgaccaggggctttatgtccccctgggggacgaggttaccgcttgcctgaacggtatagacgggttttcgcgcgacgatgtgtatgccgtcggcgatgccggcgccatctggcattgggacggcaagggctggcaggcatcggcggcgcccaccaacctgccgctctactgcgtgcactgcgccgccgatggcactgtctacataggcggttccggcggcatcctgctacgcggcagtgcacaggtcggctggaccgatatcggcgaccgcgacctgtgctcggaggtactggagaatatggtggagttcgccggcaagctctatgtgaccgcgaccgaccagttgctcgagtacgacggtacgcgcctgagtgagaccaaggtgccagtgcagggtaagaaggcttactacgccatcgatgccaaacccgaggtgatgtgggtggtgggcgatgaatgcgtgctcagctacgacggcggcacctggcagcgtcatgtctgcccggagaactga

SEQ ID NO: 319567 - DNA, 1233 bp, Pseudomonas aeruginosa
atgaatgtcgccgctgtcatcgaccagcacgtcgaggaggccggctttctggcggggctgcgcgaccatgccgtgcgtgctccccactacgacctggcgcacctgctggatctcgacaatcggattgaggcgcatctggatgcgttgcagataggtggactgaggagcctggacctggtgctgaaggcgctggacacaaacgccgagggagaggttttcgtcgctgcgatactggtgtttcgtggcacgaacggtacagccctggcccagttgtgcgagcacctacggcgttttcccgagggcgcgcgattcttcgccgcagccctcggctggctcgactgggaccaggcgcggccctgggtggagcgcctgctggcctcgcccgagccgctgttccgcgccattggcctggccgcctgcggcatgcaccggcatgacccggggccggcgctgctgtccgcccttggccacgccgacccggcggtgctggcgcgcgccgcgcgcaccgccggcgagctgcgtcggcgcgacctgatggcgaatattcgcgcctatcgcgcccacgatgacccgagcctgcgcttctgggccaactgggccaccgcgcagatgggcgacgaggaggcgttggggccattgcgtgcgttcgccgggcagcccggcccgttccagctgccggcgaccatggtgctgctcgcctggcagccgcgcgacaccagcatggcctggattcgccaactgatgcaggcggcggacacgcggcggatcggcatccaggccaccggcctgttcggcgatccggtggcggtgccctggctgatccagcagatgcgcgacgagagtctggcgcgggtcgccggcgaggccttcagcctgatcaccggcgccgacctggcgctgctcgacctggagctggaggccttgcccgactacgaccctggccccaacgacgatcccgacgacgacaacgtcgccctcgacgacgacgagaaccttagctggccggaggcggagcgagtctccgcctggtggcgtgaccacggcgcgcgtttcgtcgccgggcgcgcctacctgctcggcgaaccgctgggcgaggcgcgctgccgccaggtcctgcgcgacggccagcaacgccagcggatggctgcggcgtgcctgctggcgcgcttcgtgccgaacctgccgctgttccccaccggtgcgccggtgcgccgccaactggacctgttctga

SEQ ID NO: 319568 - DNA, 729 bp, Pseudomonas aeruginosa
atgccagaccgtatgcggggcgttaagtccgattctccagagcaggaaagcgctgacgatgcattgaaaaggattgtcgatggattccagcatttccgccgggaggtctttcccgagcagcaggcgctgttcaagaagctcgccaatagccagcggccgcgggcgatgttcatcacctgcgcggattcgcgcatcgttcccgagctgatcacccagagttcccccggcgacctgttcgtcacccgcaacgtcggcaacgtggtgccgccctacgggcagatgaacggtggcgtctccaccgccatcgaatacgctgtgctggcgctgggcgtgcaccacatcatcgtctgcggccactccgactgcggggcgatgcgcgccgtgctcgacccgcagaccctggaacgcatgccgacggtcaaggcctggctgcggcacgccgaggtggcacgcacggtggtggcggacaactgcgactgcggcgccagccacgacaccctcggggtgctcaccgaagagaacgtggtggcccagctcgatcacctgcgcacccacccctcggtggcctcgcgcctggccagcgggcaactgttcatccacggctgggtgtacgacatcgagagtgcgcagatccgcgcctacgacgccaagcagggtcgcttcctgcccctcgacggcgagcatccggtgccgatggccacgcccgcgccgcgctacctgaactcgtga

SEQ ID NO: 319569 - DNA, 1572 bp, Pseudomonas aeruginosa
atgcatgtttcaaaggtgtttccgtccctccgggacacgttgccgcgggacctgatggcctccgtggtggtgttcctcgtcgccctgccgctgtgcatgggcatcgccatcgcctccgggatgccgccggccaagggcctgctcaccggcatcgtcggtggcctggtggtcggcttcctggccggctcgccgctacaggtcagcggcccggcggccggcctcgcggtgctggtcttcgaactggtgcgtacctacggggtggccatgctcgggccgatcctgctgctcgccggcgccatccagctgctcgccgggcggctgcgcctgggctgctggttccgggtcacctcgccggcggtggtatacgggatgctcgccggcatcggcatcctcatcgtcctttcgcaattgcacgtgatgctcgacctggcgcccaaggcgtccggcctcgacaacctgctggcattcccccaggcggcgttcgccgcgctcggttcgctgggcatggacagcggcctcgacgcggcgctgctcgggctgggcaccatcgcggtgatgtggggctgggacaagctgcgtccgcaacgcctgcgcttcctacccggcgcgctgctcggcgtgagcctggcgaccctggccagcctctggctggcgctggacgtgcggcgggtcgaggtaccggccaacctcggcgaggccatcgactggctacgcccggccgacctgctggccctggccgatccctccctgctgctggcggcggtggtggtggccttcatcgccagtgcggagaccctgctctcggcggcggcggtggatcgcctgcacgacggcccgcgctcggacatggatcgcgagttgtccgcccagggtgtcggcaacatgctctgcggcctgctcggcgcgctgccgatgaccggggtgatcgtgcgcagctcggccaacgtcaacgccggtgcgcgaacccgcgcctcggcgatcttccacggcctctggttgctcgccttcgtcctcctgctcggcagcctgctgcggcagattccggtggcgagcctggccggggtgctggtctataccggggtcaagctggtcgatttcaaggccctcggcaacctctctcgctacggccggatgccgatgctggtgtacgcggccaccgccctggccatcgtcttcaccgacctgctgaccggcgtgctggtgggcttcgccctgaccctgctgaagctggtgctgaaggcggcgcggctgaagatcgccctgcgctacaccggcgagcatgaagccgagctgcgcctgagcggcgccgcgactttcctcaaggtgccggctctgtcgcgggtgctcgacgaggtcaagccggggaccaccctgcacgtaccgatggataacctcagctatgtcgaccatgcctgcatggagctgctcgaggattgggggcggatggcaccggtgcagggctcgcgcctggtgatcgaaccgcgcgccttgaagcgtcgcctggaagggcgcctgcgcggcagcgtcgggttgggcggcgcgcgcaatggcggggcggtcagcccaggctga

SEQ ID NO: 319570 - DNA, 639 bp, Pseudomonas aeruginosa
atgaacaccgctgccctccgtgaactcatccagcaggcgcacctcagcgaagcccgccacggttacctggctgatctgatagccagccgcctgccccgcctgcatcgcaccatccagccgcaaggcgagaacacggaagacatactcacccgcttcgtccacgcctacgtcgaacaggtaccggacctgctcgacgccgccaacagcgtggcccgcgaagccggcatcgaggaacggatcaagccggtgctgaaggtcgccgagcagttcttcctcaccccgccggcgttgctcgccggccacgacggcctcgacgccctgctcgacgaagcctacctggcgcaccgcctggtggaagaagtgaacgaccgctacatcgcccacttcggccaggcactgatcccactggacaccaccgtagccaacctggtggcccaccagttgatcggcgagcccttcgccaaccggctggacgaagccgtccaccatgcagtggagaacatgctcgacgccaccaccttcgacgccgactcggcccgcgcctaccgcgagaacctgaagaacccgcgggtggtcgccgcctggcagcagtggccgtgcctgtcgaagcagctcggggtggaactcagcctgggctga

SEQ ID NO: 319571 - DNA, 1101 bp, Pseudomonas aeruginosa
atgggcttccttttgctctcggcgatcagccaggcgaatgccgcctggacggtcaacatggccccgggcgctaccgaggtgagccggtccgtcttcgacctgcacatgaccatcttctggatctgcgtggtgatcggcgtgctggtcttcggcgcgatgttctggtcgatgatcgtccaccgccgctccaccggccagcagccggcgcacttccacgagagcaccacggtggaaatcctctggacggtggtgccgttcgtgatcctggtggtgatggcggtgcccgccacccgcaccctgatccacatctacgacacttccgagccggagctggacgtgcaggtcaccggctaccagtggaagtggcagtacaagtacctgggccaggacgtcgagtacttcagcaacctggccaccccgcaggaccagatccacaaccggcaggcgaaggacgagcattacctgctggaggtggacgagccgctggtgctgccggtgggcaccaaggtgcgcttcctgatcacctccagcgacgtgatccattcctggtgggtgccggccttcgcggtcaagcgcgacgccatccccggcttcgtcaacgaggcctggaccaaggtcgacgagcccggcatctatcgtggccagtgcgccgagctgtgcggcaaggaccacggcttcatgccgatcgtggtcgacgtcaagcccaaggccgagttcgaccagtggctggccaagcgcaaggaagaggcggcgaaggtcaaggaactgaccagcaaggagtggaccaaggaagagttggtcgcgcgcggcgacaaggtctaccacaccatctgcgccgcctgccaccaggccgaaggccagggcatgccgccgatgttcccggcgctgaagggttcgaagatcgtcaccgggcccaaggagcaccacctggaagtggtcttcaacggcgtgcccggcaccgccatggcggccttcggcaagcagctcaacgaggtcgacctggccgcggtgatcacctacgagcgcaacgcctggggcaacgacgatggcgacatggtcaccccgaaagacgtcgtcgcctacaagcagaaacaacaatag

SEQ ID NO: 319572 - DNA, 1593 bp, Pseudomonas aeruginosa
atgagtgctgtgatcgatacgcccgaccaccatgccggcgaccaccaccacggaccggccaagggcctgatgcgctgggtgctgacgaccaaccacaaggacatcggcaccctctacctgtggttcagcttcatgatgttcctgctcggcggctcgatggccatggtgatccgcgccgagctgttccagcccggcctgcagatcgtcgagccggcgttcttcaaccagatgaccaccatgcacggcctgatcatggtcttcggcgcggtgatgccggccttcgtcggcctggccaactggatgatcccgctgatgatcggcgcgccggacatggccctgccgcggatgaacaacttcagcttctggctgctgccggcggccttcggcctgctggtcagcaccttgttcatgcccggcggcggccccaacttcggctggaccttctatgcgccgctgtcgaccaccttcgccccgcacagcgtgaccttcttcatcttcgccatccacctggccgggatcagctcgatcatgggcgcgatcaacgtgatcgccaccatcctcaacctgcgcgccccgggcatgaccctgatgaagatgccgctgttcgtctggacctggctgatcaccgcgttcctgctgatcgcggtgatgccggtgctggccggcgtggtgaccatgatgctgatggacatccacttcggcaccagcttcttcagcgccgccggcggcggcgacccggtgctgttccagcacgtgttctggttcttcggccaccccgaggtgtacatcatgatcctgcccgccttcggtgcggtcagtgcgatcatcccgaccttcgcgcgcaagccgctgttcggctacacctcgatggtctacgccaccgccagcatcgccttcctctccttcgtggtctgggcgcaccacatgttcgtggtcggcatcccggtcaccggcgagctgttcttcatgtacgccaccatgctgatcgcggtgcccaccggggtgaaggtgttcaactgggtgaccaccatgtgggagggttcgctgaccttcgagacgccgatgctgttcgccgtggccttcgtcatcctgttcaccatcggcggcttctccggactgatgctggcgatcgccccggcagacttccagtaccacgacacctacttcgtggtcgcccacttccactacgtgctggtgcccggcgcgatcttcggcatcttcgcctcggcttactactggctgccgaagtggaccggccacatgtacgacgagaccctcggcaagctgcacttctggatgagcttcatcggcatgaacctggcgttcttcccgatgcacttcgtcggcctcgccggcatgccgcgacggatccccgactacaacctgcagttcgccgacttcaacatggtctcgtcgatcggcgccttcatgttcggcaccacccagctgctgttcctgtttatcgtcatcaagtgcatccgcggcggcaagccggcccctgccaagccctgggacggcgccgagggcctggagtggagcatcccctcgccggcgccctaccacaccttcagcaccccgcccgaggtcaagtga

SEQ ID NO: 319573 - DNA, 555 bp, Pseudomonas aeruginosa
atgagcgatgccaaggtcgatacccgccgcctggtcggccgcctgctgctggtgaccgtgctgatgttcgccttcggcttcgccctggtgccgctctatgacgtgatgtgccgcgccctggggatcaacggcaagaccgccggcagcgcctacagcggcgaacagcaggtggatgtcgggcgcgaggtgaaggtgcagttcatgacctcgaacaatatcgacatggtctgggagttccgctccgccggcgaccagttggtggtgcatcccggcgcggtgaaccagatggtgttctacgcgcgcaacccgagcgacaagccgatgaccgcgcaggccatcccgagcatcgccccggccgaggccgcagcctacttccacaagaccgaatgcttctgtttcacccagcaggtgctgcaacccggcgagagcatcgagatgccggtgcgcttcatcgtcgaccgtgatctgcccaaggatgtgcggcacgtgacgctggcctacaccctcttcgatatcactgcgcggaagccgcccgtaccggttgcgggacgataa

SEQ ID NO: 319574 - DNA, 888 bp, Pseudomonas aeruginosa
atggcaagccacgaacactattacgtccccgcccagagcaagtggccgatcatcgccagcatcggcctgctggtgacggtgttcggcctgggtacctggttcaacgacctcaccgccggccacaaggaatcccatggcccgtggatcttcttcgtcggcgggctgatcatcgcctacatgctgttcggctggttcggcaacgtcatccgcgagagccgcgccggactctacagcgcgcagatggaccgctcgttccgctggggcatgagctggttcatcttctccgaggtgatgttcttcgccgccttcttcggcgcgctgttctacgtccgccacttcgccggtccctggctcggcggcgagggtgccaagggcgtggcgcacatgctctggccgaacttccagtacagctggccgctgctgcagaccccggacccgaagctgttcccgccgccgagcgcggtgatcgagccgtggaagctgccgctgatcaacaccatcctgctggtcacctccagcttcaccgtgaccttcgcccaccacgccctgaagaagaacaagcgcggcccgctcaaggcctggctggcgttgaccgtgctgctggggatcgccttcctgatcctgcaggccgaggagtacgtgcacgcctacaacgagctgggcctgaccctcggcgccggcatctacggctcgaccttcttcatgctcaccggcttccacggcgcccacgtgaccctcggcgcgctgatcctcggcatcatgctgatccgcatcctgcgcggtcacttcgatgccgagcaccacttcggcttcgaggccgccagttggtactggcacttcgtcgacgtggtctggatcggcctgttcatcttcgtctacgtgatctga

SEQ ID NO: 319575 - DNA, 210 bp, Pseudomonas aeruginosa
atgttgaaagtggcgatcgtcctgctactgctggctaccctggtgagcctgttcagcggcctgttcttcctggtcaaggaccagggccatggttcccgcgtggtcaattcgctgaccgtccgcgtggtgctcgccgcggcgaccctggcgctggtcgcctggggcttctacagcggcgagctgaacagccacgcgccctggcatttctga

SEQ ID NO: 319576 - DNA, 795 bp, Pseudomonas aeruginosa
atggggggattcatgcagtatagccagcgcctcggggaggccggacgcaatgacagacgtagcatgcgtggcgcgttccgccccggcctgctgccgaccctggtggtcctcggcctgctgccggtgctgctctggctgggcacctggcagttgcagcgggccgacgagaagcgcgccctgctggccagctacgaggcccggcgcggcgccgagccggtgtcgcccgggcagctagagggactgcgcgacccggcgtacgtccgcgtgcgcctgcacggccgcttcgaccagcggcatacgctgctgctggataaccggctgcgcaacggacaggccggggtcgaggtgctgcaacccttctacgaccaggccagcggcctttggctgctggtcaaccgcggctgggtcgcatggactgaccgacgctcgccgccgacgctggaaacccccgaccgcgtcctcctgctcgacgcctggacctacctgccgccacccggcggcctgcacctggccgacgcgccggccggcggctggccgcgcctggtgacccagctcgacatcccggcgctgtggcaggccttcggtcgcgccgggctgccctgggaaatccgcctggaagcgggcgacgccagcttcgacaccgattggcccctggtctcgatgccgccggagcggcacaccggctacgccgtgcagtggttcgccctggcgacggccctgctcgccctctacctctacctcggtgtgcgccgcgcacgggagaaaaaccatgagtctcgcgattcagatgcctga

SEQ ID NO: 319577 - DNA, 579 bp, Pseudomonas aeruginosa
atgagtctcgcgattcagatgcctgaacgtccgcgccgcgcccgtggccgcctgcaactgctggcgatcatcggcctggtggtggggccgatgctgctcgccagcgccatgtacaaatggaatttctgggtaccgcaggggcgcagctacagcggcgcgctgatcggcaacggccagacccccgccgacctcggcgtgcagggacgcagccagggcgagcagtggcaactgctggtgaccgcgccgggtacttgcggcgaggactgccagcaactggtctacctggcccgccaggtcaacatcgccctcggccgcgaagcctcgcgcgccggccacgccctggccgccagtggcgagctgccggcggacttcgccaacctggtgaggcaggactacccgcgcctgcagcgctacggcctggacccggccctgtacgacaaggccggcggcggcgagcggccgctgctgtgggtggtcgacccgcacggcaacctggtgctgcgctacgacgccaaggccaacggcaagaagctgctgaaggacgtgcaactgctgctcaagctctcgcatatcggttga

SEQ ID NO: 319578 - DNA, 1074 bp, Pseudomonas aeruginosa
atgacaggcgcaacccgcaaacccggtttcaccgtcgccgtgctggcgaccctgctggccgccgtggtggtcctgctcggcgcctatacccggctgacccacgccggcctcggctgtccggactggccaggctgctacggcttcgtccacgtgccgctgagcgaggcgcaactggcccacgccgaactgcacttccccgacgccccggtggaggcacagaagggctggaacgagatgatccaccgctatttcgccggcgccctcggcctgctcatccttggcctggcgttgcatgcgctggtccgccgcgggcgcgacggccaaccgctgaagctgccgctgctgctgctcgcggtggtgatcgcgcaggccgccttcggcatgtggacggtgaccctcaagctctggccgcaggtggtcaccgcccatctgctcggcggcttcaccaccctggcgctgctctttctcctcgccctgcgcctctccggacgcttcgcggcgcggcgctacccggcggcgacccgcggactggcggggctggccctgctcctggtgatcggccagatcgccctcggcggctgggtcagcagcaactatgcggcggtggcctgcatcgacctgcccacctgccatggcgagtggtggccgcggatggacttcgccaacggcttccacctgacccagcacatcggccccaactacctcggcggccagctcgacagcgacgcgcgcacggcgatccacatgacccaccggatcggagcgctgtgcgtgaccctggtcctcctgctgctcgcctggcgcctgcagcgcagcggcctggtctggccgaccgcgctgatgctgctcggcctgtcgctgcagatcggcctgggcatcagcaacgtgctgctgcacctgccgctgccggtggcggtggcgcacaacggcggtggcgccctgctgctgctcagcctggtgctggtcaactatcgcctgcgcgcgccggccagcgtccgcgcgccggcaccgtcgccgcagcgcgtgcgccgcacgctgccgccggcgcaaggttcgcggctgaaggccgcctga

SEQ ID NO: 319579 - DNA, 915 bp, Pseudomonas aeruginosa
atggccaccgtcatcgatcgccacagccagccgacctggcgcgacttcctcgaactgaccaagcccaaggtcgtggtgctgatgctgatcacctcgctgatcggcatgctgctcgccaccaaggcgccgctggatggcttcgtgccctggcaggtgctgatcttcggcaacctcggcatcggcctttgtgccggcgcggcggcggcggtcaaccatgtggtggaccggcgcatcgactcgatcatggcgcggacccacaagcggccgctggccgagggccgggtgtcgccgagcatggcgctgggcttcgcgctgctcctggcgctggccgggatggccgtgctgctggccttcaccaacccgctgacggcctggctgaccctcgcctcgctgctcggctacgcggcgctctacaccggcttcctgaagcgcgccacgccgcagaacatcgtcatcggcgggctcgccggggcggcgccgccgctgctcggctgggtcgccatcaccggccacctgagcgccgagccgctgttgctggtactgatcatcttcgcctggaccccaccgcatttctgggcgctctgcatccaccgcaaggacgaatacgccaaggccgatatcccgatgctgccggtgacccacggcgagcgctacaccaagctgcacatcctgctctataccctggtgctgttcgcggtgagcctgatgccgttcgtcatccacatgagcgggctggtctacctgctctgcgccctggccctgggcgcgcgcttcctcgactgggcctgggcgctctactgtgacagccggccacatgcggcgataaagaccttcaagtactctatcgtctacctgttcctgctgttcatggcgctgctggtggaccactatctgccgctgaagctgcttctctga

SEQ ID NO: 319580 - DNA, 636 bp, Pseudomonas aeruginosa
atgactcgagtcaacaagaccgtcctcgtcctcgtcgccctggtcgccctggtcctcggcctcaccgtgcacaaggtgctcaccgcccagcgccaggccgatcccaccgtgctgctcgacgccggcatcgtgatcctgccgcagacgcgcaaggtgccggcgctggagttcaccaaccaggacggccaggcggtcagcactgccagtctcaagggtcgctggcacctgctgttcttcggctacaccttctgccccgatgtctgcccgaccaccctcgcccagctccgcgaattgcagggcaagctgccgcaggaggtgcgcgacgacctgcaggtggtattcgtcagcgtcgatccgaaccgcgacacgccgcagcagatcaagcaatacctgggctacttcaacgccggcttccaggggctcaccggcactccggagaacatccagaagctggccaacgccatgagcatcccctacatccccgccgacaccagcaagcccaactacaccgtcgaccacagcggcaacctggtgatcatcggcccggacggcgagcagcacggcttcatccgcgcgccgctgaacaacgccaagctggaagcccaactgcccggcgtgctcaagccgcgggcctga

SEQ ID NO: 319581 - DNA, 453 bp, Pseudomonas aeruginosa
atgtcgctcgactggacctgcaagcaccacgccgacctcaccctgaaggaactctacgcgctgctgcaattgcgcaccgaggtcttcgtggtggaacagaaatgcccctaccaggaagtcgacggcctcgatctggtcggcgatacccatcacctgatggcctggcgcgacggccagttgctcgcctacctgcgcctgctggacccggttcgccacgagggccaggtggtgatcggccgggtggtcagttcctcggccgcgcgcggccaggggctcggtcaccagttgatggaacgcgcgctgcaggcggcggagcgcctctggctggataccccggtgtacctctcggcccaggcccacctgcaggcctactacggccgctatggcttcgtcgcggtcaccgaggtctacctggaagacgacatcccgcacatcggcatgcgccgggcctga

SEQ ID NO: 319582 - DNA, 474 bp, Pseudomonas aeruginosa
atgcgttgggaagaactgagcgaacaaccctgttcgctggcgcgggtgctggcgatcctcggcgatcgctggaccctgctggtattgcgcgactgctttctcggcgtgcgccgtttcgacgacttcgagcgcagcctcggcgtgacccgtcacgtcctcgctgaccgcctcaagcgccttgtcgaagcggagatactggccaaggtgccctaccaggaaaggccgctgcgcgaggaataccggcttaccgagaaagggatggaactgtacccggccatcctttccctggtgaactggggcgaccgccacctcgccggcgtcgaggggccgccgctggagcatgtgcacaagcattgcggccagcacatgcatggcgtgctggtctgttccgaatgcggtgagccgctgcacgcgcgggacgtgacggtacgcgaggggctgttctggaaggggcgcctgctgcggcgcggctga

SEQ ID NO: 319583 - DNA, 729 bp, Pseudomonas aeruginosa
atgacccagcgcaaagcggttctggtaatgggcgccggcgacgccaccggtggcgccatcgcccggcggttcgcccgcgagggctacgtggcgtgcgtcgcccggcgcaacgcggagaagctggagccgctggtgcaggccatccgcgaccaaggcggcgaggccctggcctgcggctgcgacgcacgccaggagcagcaggtgatcgacctcttcgcccgcatcgagggtgaggtcggtgcgctggaggcggtgatcttcaacgtcggcgccaacgtctggttcccgatcaccgaaaccaccgaacgggtctatcgcaaggtctgggagatggccgccttcggcggcttcctcaccggccgcgaggcggcgcgggtgatgctgccgcggcagcgcggaacgatcatcttcactggcgccaccgcctcgttgcgcggccgcgcgcatttcgccgcgttctccggcgccaagttcgccctgcgtgccctggcccagagcatggcgcgcgagctggggccgaagggcatccacgtcgcccacccgatcatcgacggcgccatcgacaccgacttcatccgcgaaaccctgcccgagctgtacaagcgcaaggagcaggacggcatcctcgatcccgagcacatcgccgagacctactggcagatccactgccagccgcgcgactgctgggtgcacgaactggacctgcgcccctggatggaaaccttctga

SEQ ID NO: 319584 - DNA, 588 bp, Pseudomonas aeruginosa
atgagcaagcaaatcgagttcttcttcgacttcggcagtcccaccacctacctcgcctggacccaactgccgcgcatcgccgccgcccatggcgcgagcatcgcctggcggccgatgctgctgggcggcgtgttcaaggccaccggcaaccattcgccgatcgaggtgccggccaaggggcgctacaccctccacgacctggcgcgctatgcgaaacgctacggcgtgccgctggccttcaacccggccttcccgatcaacaccctgacgctgatgcgcggcgcccagagctatctcggcggcgaagggttccagccctacctgaaagcggtgttcgaagcgttgtgggtacgacagcagaacctcggcaagcccgaggtggtcgcccaggtgctggcggaggctgggttcgatccggatgagttcctccgcctggttggcgacgagcaggtcaaggaggggctcaaggcgaccaccgaagaggcggtgcggcgcggcgtcttcggcgcgcccagcttcttcgtcggcgaccagttgttcttcggccaggatcgcctcgatttcgtcgccgaggccctcgccggctga

SEQ ID NO: 319585 - DNA, 1335 bp, Pseudomonas aeruginosa
atgttcatcaagcgctgttcccgctcgatattcctgcaagtcgtgattggcctggtgataggcgtgatctgcggggtcggcattcccgacctggccgtgcagatgaagccgctgggcgatggcttcatcaagctgatcaagatgctcatcgcactgatcgtcttctgcgtggtggtcaacggcatctccggcgccggcgacctgaagaaggtcggccgcatcggcctgaagtcggtgatctacttcgaaatcctcaccaccatcgccctggtcctcggcctggtggtcgcctacagcctgggcctgggcagcggcgccaacatccatctcaacgaactgcccgccggcgacgtcgccctgtataccgggcgcacccaggaaatccatggccccgtggcattcctcatgggcctgatcccgacctctgtgttcagcgccttcgccgagaacgacatcctccaggtcctgctgttctccgtgctgttcggcagcgccctgaacctggtcggcgagcaggccagcggcgtggcccgcctgatcaacgaattcagccacatcgtgttccgcatcatgggcatgatcgtgcgcctggcaccgctcggcgtgttcggcgcggtggccttcaccaccgcccgctacggcgtcgactcgctcagccacctgggcgcgctggtgctggtgttctacgccacctgcctggtcttcgtcatggcggtgctcggtagcgtcctgcgtctctccggggtgcgcatgctgccgttcctgcgctacttccgcgaagagctgctgatcgtgatgggcaccgcctcctccgacgcggtgctgccgcaggtgatgcgcaagctcgagcacatgggcatccgcagctccacggtaggcctggtgattcccaccggctactcgttcaacctcgacggattctcgatctacctgaccctggcggtggtgttcatcgcccacgtcaccggcacgccgctggcgatgaccgacctgatcaccatcctgctggtttcgctggtcacctccaagggcgcccacggcattcccggctcggccctggtgatcctcgccgccaccctcaccgcggtgccggcgatcccggtggccggcctggtgctggtgctttcggtggactggttcatgggcatcggccgcgcgctgaccaacctgatcggcaactgcgtggccaccgtgaccatcgcccgctgggaaaacgacatcgatatgccgcgcgcgcaggccatactcgacgggcgcctggaggcgccggccaaggccgacggcgagccgctcaagcgcagcgcggtggccggggaaggcaagctgcatggctga

SEQ ID NO: 319586 - DNA, 687 bp, Pseudomonas aeruginosa
atgttttcttcgtccaagctggtcaacgcggttgcccagcgcctgctcgacaccatcgagcagggtcgctgggtcgccggccagatgttgcccggccagcgcgagctggctgaacagatggaaatcagccggccgagcctgcgcgaggcgatcatggtcctggagaccctgggcgtggtccgttcgctgccgggcaagggcgtgatggtcctcgaacgcagcgaaccgctgcgcgaggtcgcggcgcccggcgaggcgaccatggaagacgtcctgcaactgcgctatgcgctggagccgttcatcgtcggcatcgtcgcgcagagcgccggggcggcggagatcagcgaactgcggctgttgctgctggacctgcgcgaagcggtcgaggatggcgacccgcaggctctggttgaggcctacacggccttccaccggcgcctggtgaagctcacctcgaacccgatcttcctcagcgtttccgaacagatcggcagcgccctggaacgcagcgacaacctggtgcgccgccagccggaatacgccgaggagatcctccaggaacacgacgccatcctccgtgcgatccgccagcacgacagcgagcgggcgagccaggcgatgcgccagcacatcctcaacgaaggcgcgcgcctgaacatcgacctgcgcttgccgcaggtctga

SEQ ID NO: 319587 - DNA, 735 bp, Pseudomonas aeruginosa
atggtcggattcgaagcacgtacccagcagggcgccgcgctgcgccccaccagccatttcgtctacgaaagcatctacacggcaatcctggaaaagcgcctggcgccggccgccaagctgagcaaggaaaccctcgggcagatcttccgggtcagcaacggcaccatccagcgtgccctcacccgtctcgccgaggacggcgcggtggtgatgccgccgaaggaggtcgccagcgtcgcccgcccggacgagcgccaggcgcggcaggtgctggacgcgcgcctgctggtggaaagcgaagtggtgcggcaactgcccgcggggctggatcccgccgcccttgccgagctacgggcgctggtcgacgaggagcaggcttgcctcgcggcccgcgacagcgccgggctgatccgtctcgccgggcgcttccacctgcgcctggccgaactgaccgagaatcccttgctgcagggtttcgtccgtggcctggtggcacgcgcctcgctggacatcgcgctgaacaagggggcggtctataccgccgaggcctgcgccgcgcagcgcgccctgctcgatgccctggaggacggcgacagcgcggcggcggctgcgctgatggacgcttacctgcgaggcctgttcgcccgcatgcgcttcctgccgccacccaccaccgacctgcgcgaggcattcggcatgaaggcccctcgcggggaaaaacgccggagggcctga

SEQ ID NO: 319588 - DNA, 411 bp, Pseudomonas aeruginosa
atggcatacgcagaatggatcgcagtgaaggtcgtggtatccaaatccatcggcacggtgggcatccgcaacgccaccttgcaatggggcaagttctaccgctacaccaacaaggacgacgagatttccaccgaggaagtcagcagcatgaacgtgcaggccggcagcccgcaatggatcgcctcctgcggacgggagaacgcttcgtccggcacccagggcagcttcgactgctacgacggcaacaccaagatgggcaccttcagctgggatgacccgtggaaatccggcgccaccaacacctggagcttcacgccggcatcggcggactatgctggcatcaccagcggcggcaacgctacgggcacggacatcggcgaggtcaccctgaccctcggccgcttctcctga

SEQ ID NO: 319589 - DNA, 909 bp, Pseudomonas aeruginosa
atggattcgctgaaaggcatggcgatcttcgccactgtggtggacaagggctcgatggcagccgcggcccagagcctgggcatgaccccttcggcagtcagccagcagatccgcaagctggagagccgcgcccaggtcactttgctgcatcgcaccacccgccggctgaccctgaccgaggccggcgaggcgttctatcgcagttgcgcgcagatgctggcgatcgccgaggaagccgagcggcggcttggcgaatggcgcgatgcgccggtgggtgagttgcgcctggcggcgccggtggggttctccggcacgctgatcacccaggcgctgaaaccgttgctggagaaccaccgccagttgcgcctgcagctgttcttccaggacgagcgcatcgatctggtcgccgagcgcatcgacctggcgatacgcgtcggcaatctcgccgactccagcctggtggcgcgccacctcggcgattggagcagcgtgctctgcgcggcgccggcctatttgcgccaacgggcgccgatcaaccgtccggagcagttgaccgaggtcgactggatttccctgaacacctcgaaccacctcaaccacctgacgctcagcgggccgggcggggaagtctgcaaactgcgcctggagccacgggtggccgccaacgggatgctcgcggtgcgtcagttcaccctcgacggactcggcgtgtcctaccagccgctgccggaggtgcgcgacgcgctgaacgacgggcgcctgcaacagctattgccggagtggaggattcccgggctcggcatctatgcggtgacgccacggcgcgaggcccagccggccaaggtgaaggtcgccatcgaggcgctgcggcgagcgttcgccacggacggggatgagcgctggagctga

SEQ ID NO: 319590 - DNA, 282 bp, Pseudomonas aeruginosa
atgagcctgaagtggacccgcaaggcggccgccgacctggacgccatctacgaccattacgtcgtgctgatcggcccggaaaaagctctgaaagccgttcaggacattgtcgagcaggtgaaaccgctgcagcaggtagccaaccagggggcagggcggcccagcgaggtgccaggcgtacgcaccctgaccctggagcgctggccgttcagcgccccgtttcgggttaaaggcaaggaaatccagattttgcgcatcgacagggtcgaaattaccccctga

SEQ ID NO: 319591 - DNA, 228 bp, Pseudomonas aeruginosa
atgagcaccgtagtctcgttccgcgccgatgacgccctggtcgcggccctcgacgaactggcccgcgccacccaccgcgaccgcccctaccacctgcggcaggcgctcgcgcagtacctggaaaggcagcagtggcaggtcgccgccatcgatgaaggcttggccgatgccaatgccggtcgcctgctggaacacaccgagatcgagaagcgctgggggctgcaatga

SEQ ID NO: 319592 - DNA, 621 bp, Pseudomonas aeruginosa
atgcctacacgcgttctgcgcggcctcgtcgccgccctcccactgttcctcgccgcctgctcggactccgctccgtccagcgaggagatcgcccgcctgctcgccgagcgcggcttcgacaaacccgcctgcgccagctccaccctgttcaagacgttcccggtgacgctctccgacagcttctccggccccggcccggcgaaaggcaacgccgcggtctacgacgcgctggtcggcgtcggcctgctgcgccgcgacggcgattcctacgacctcacgcccgccggccgcgaggactacaagcccgagtcgaaggccttctgctacagcagcggcttcgacgtcagcgtccgttcggtggaccccgccaagcccgacgactacggcccggccgtggaaaagggctggttggtcaccgtcgaggtcaagccacgcgaagtgaaggactgggcgaagaaccccgaggtgctcaagcaggccagcctgaccaccctgcaacagatcacccaaccgcaggtcggccaggtctcgctggtcaagccacgcggcgaggaaggctacaagctcgtcaacacccgcttctcgcccaggcagggcttccacttcaaccaggcctggtaa

SEQ ID NO: 319593 - DNA, 501 bp, Pseudomonas aeruginosa
atgcgcctgcctgcgaacctcggccgcctgctgccggccctgtgcctgggcgtcctgttgagcgcctgcagcaccttcggccagcgcgatccgttgcgtatcgacctggtcggcctggaacccctgccggggcaaggcatggaaatgcgcttcatggtcaagctgcgggtacagaaccccaacgacgagccgatcgaatacaacggcatcgccctcgacctcgacgtcaacggccagcccctggccagcggcgtcagcgaccagaccggcgaggtgccgcgcttcggcgagcgggtggtgagcgtgccgctgaccgtctccgccttttccgccttccgccaggcctggggcctgagcaacaacgctccgacccggggcatgccctacgtggtgaagggcaagctcgccggaggcctgttcggcaccgtgcgcttcagcgaaaagggcaccctcgacttctccgggccggccgtcggcgcgccgaagaccaaggggctctga

SEQ ID NO: 319594 - DNA, 342 bp, Pseudomonas aeruginosa
gtgagcacgctgccgccctgtccccaatgcaactccgaatacacctacgaggatggtgcgctgctggtctgcccggagtgcgcccatgaatggtcgccgaacgaggccgctacggcgtccgatgatggcaaggtgatcaaggattctgtgggcaacgttctccaggacggcgataccatcaccgtgatcaaggacctgaaagtgaaaggctcctcgctggtggtgaaggtcggcaccaaggtgaagaacatccgcctggtggacggcgaccacgacatcgattgcaagatcgacggcattggcgcgatgaagctgaaatcggaattcgtgaaaaaggtttga

SEQ ID NO: 319595 - DNA, 1209 bp, Pseudomonas aeruginosa
atgaataaaccaacttttataaagcgcgtaatattaagaaacttcaaaagcataggttattgcgatgtaaagctaatgccattaacctatttggttggatccaatggctctggaaaaagcaattttcttgacgctctgcatttagtaaaagacgcattaaccggatcacttgaaaatgccctaaatgaaaggggcgggctatctgaagtacggagacgatcaagcggacacccaacccactttggaattcgaatagagttcatgctccccaatggagagcaaggacactacgcattcaatgtaggagctcttcaaggcagaggatatgaagtacaaaatgaggaatgcatactatctggcgtcggcaaaggacctttctataaagtggagcgcggcaatctggtgtcctccagcgaatctccttttccctctttaactgctgataggctagcgctagttgcgctttccgggataactaaatttcgcgcagtctatgacgcactgacttctatgggattctacaacctcaaccctaaagtcatgcgagaactgcagaagcctcaggaaggaagaatcctaaaacctgttggagagaatatatccagcgtaataggccatcttgagcgtacttcaccggagcaaatcaagacaatccaagaatatctacaaacggtagtccccatggttcatggcgtggaaagaaagcaagttggaccgatggaaactatagaattcagacaagatatggctggagcaaagcacccttggagatttcttgcgcaaaacatgtctgatggcactcttcgggctctcggagtacttacagcactatttcaaacaaaccgtgattacgccccctcctttgtcggcattgaagaacctgagaccgctctgcatcccgctgctagcgctgcgctgagagaagcgttgactcgtgcagcagagaaaacacaaatcatagtaaccagccatagccccgacctactggatgatcccacactcgatgcagagtcacttctggcagtcatttcggataaaggcgaaacacacattgcccccctagacgaagcatcaacctctgcaatgcgcaatcatctattctctgcgggagagcttcttcgtctaaaccaattagcaccagacgaaaaaattattgaaactcagatccagcgccaaagcgatctcttcggggagataatagaaaaatga

SEQ ID NO: 319596 - DNA, 1428 bp, Pseudomonas aeruginosa
atgtccaaagtcgtactggcttcacaactgccgaacaagcgcaacgcctcgctcgcgcccggcctgaaacaacgccacgtcaccatgctgtcgatcgccggggtgatcggcgccggcctgttcgtcggctccggccatgccatcgccgccgccggcccggccgccctgctcgcctacctgatcgccggcaccctggtggtgctggtcatgcgcatgctcggcgaaatggcggtcgcctcccccgataccggttccttctccacctacgccgaccgctccatcggccgctgggccggtttcaccatcggctggctctactggtggttctgggtgctggtgatcccactcgaagcgatcgccgccgcggccatcctcaacgcctggttcccggccatcgacacctggatcttcgccctcgcggtgaccttcctgctcaccgtcaccaacctcttcagcgtggcccgctacggcgagttcgagttctggttcgcgctgctcaaggtgatcgccatcatcgccttcatcgtgctcggcgcggtggccatcgtcggcggcctgccggagcgtgaggtcagcggcctgtccagcctgatggcgagccacggcggcttcgtgccgaacggctacggcgcggtgctcggcgccctgctgacgaccatgttcagcttcatgggcaccgagatcgtcaccatcgccgccgccgagtccaaggacccggcgaagcagatcacccgcgccaccaactcggtgatctggcggatcggcctgttctacctggtgtcgatcttcatcgtgatctccatcgtgccgtggaacgacccgctgctgatccaggtcggctcctaccagcgcgccctggagctgctggacatcccgcacgccaagctgatcgtcgacctggtggtactggtcgccgtggccagttgcctgaactcggcgatctacacctcgtcgcggatggtcttctccctggccaagcgcggcgacgccccgagcgtgctcaagctgaccaacaccgcccacgtaccgcgcccggcggtgctggccagcaccgcggtgggcttcctcaccaccatcgtcaactacttcgcaccggagaaggtcttcaccttcctcctcgccagctccggcgccgtggcgctactggtgtacctggtgatcgccgtggcccagttgcgcatgcgcaagcaattgcaggccagcggccagcccatcgagttccgcatgtggctgtatccctggctgacctgggcggtgatcctgttcatcgtcgccgcgctgagcatcatgctgatcatgccggagcaccgtcacgaggtgttcgccaccgctctgctgacgatcttcaccgtctgcctcgggctgctcaacgcgcgacgcaagccgcgcctcggcgaggactacgccgggaagacggcgcgggtctga

SEQ ID NO: 319597 - DNA, 1494 bp, Pseudomonas aeruginosa
atgggcaccctccaccacctgatcaacggcgaaatggtcgccgacaacggccgcagcgccgacgttttcaacccctccaccggcgaagccatccacaaggtcccgctggccgacggcaagaccctgcagaaagccatcgatgccgccagggccgctttcccggcctggcgcaacaccccgccggccaagcgtgcacaggtgctgtaccgcttcaagcaactgctggagcagaacgaggcgcggatttccaagctgatcagcgaagagcacggcaagaccctggaagacgccgccggcgaactcaagcgcggcatcgagaacgtcgagtacgcctgcgccgccccggaaatcctcaagggcgagtacagccgcaacgtcggcccgaacatcgacgcctggagcgacttccagccgatcggcgtggtcgccgggatcaccccgttcaacttcccggcgatggtgccgctgtggatgtacccgctggccatcgcctgcggcaacaccttcatcctcaagccctccgagcgcgaccccagctccaccctgctgatcgccgagctgttccacgaagccggcctgccgaagggcgtgctgaacgtggtgcacggcgacaaggaagccgtggacggcctgctccaggcgccggaagtgaaagccatcagcttcgtcggctcgacccccatcgccgaatacatctatgccgagggcaccaagcgcggcaagcgcgtgcaggccctgggcggcgcgaagaaccatgcggtgctgatgcccgacgccgacctcgacaacgccgtcagcgcgttgatgggtgccgcctacggctcctgcggcgagcgctgcatggcgatctcggtggcggtatgcgtcggcgaccaggtggccgacgcgctgatcgccaagctggttccgcagatcagggcgctgaagatcggcgccggcacttcctgcggcctcgacatgggcccgctggtcactgccgccgcgcaggccaaggtcaccggctacatcgacagcggcgtggcccagggcgcggagctggtggtggacggccgcggctaccaggtcgccggccacgagaacggcttcttcctcggcggcagcctgttcgaccgggtgaccccggaaatgaccatctacaaggaagagatcttcggcccggtgctgtgcgtggttcgcgtcaacagcctggaagaggccatgcagttgatcaacgaccacgaatacggcaacggcacctgcatcttcacccgcgacggcgaggccgcccgcctgttctgcgacgagatcgaggtcggcatggtcggcgtcaacgtcccgctgccggtgccggtggcctaccacagcttcggcggctggaagcgctcgctgttcggcgacctccacgcctacggcccggacggcgtgcgcttctacacccggcgcaaggccatcacccagcgctggccgcagcgggccagccacgaggcctcgcaattcgccttccccagcctctga

SEQ ID NO: 319598 - DNA, 288 bp, Pseudomonas aeruginosa
atgagcggccgcccgcaagccgtacccaccgtgcaggtggacaacgccgaggtgatcgtgaccgaatggcgcttcgcccccggcgcggaaaccgggcgccaccgccacggccacgactatgtggtggtaccgctgaccgacggcacgctgctgctggaaacccccgagggcgaccgccacgcgccgctggtcgccggacaggcctacttccgcaaggccggcgtcgagcacaacgtgatcaacgccagcgcacacgaagtggtcttcgtcgagaccgagatcaagtaa

SEQ ID NO: 319599 - DNA, 1347 bp, Pseudomonas aeruginosa
atgaaccagccgctcaacgtggccccgccggtttccagcgaactcaacctgcgcgcccactggatgcccttctccgccaaccgcaacttccagaaggacccgcggatcatcgtcgccgccgaaggcagctggctgaccgacgacaagggccgcaaggtctacgacagcctgtccggcctgtggacctgcggcgccggccactcgcgcaaggaaatccaggaggcggtggctcgccagctcggtaccctcgactactcgccgggcttccagtacggccatccgctgtccttccagttggccgagaagatcgccgggttgctgccaggcgaactgaaccacgtgttcttcaccggttccggctccgagtgcgccgacacctcgatcaagatggcccgcgcctactggcgcctgaaaggccagccgcagaagaccaagctgatcggccgcgcccgcggctaccacggggtcaacgtcgccggcaccagcctcggcgggatcggcggcaaccgcaagatgttcggccagctgatggacgtcgaccacctgccgcacaccctgcaaccgggcatggcgttcacccgcgggatggcccagaccggcggcgtcgagctggccaacgagctgctcaagctgatcgaactgcacgacgcctcgaacatcgccgcggtgatcgtcgagccgatgtccggctccgccggcgtactggtaccgccggtcggctacctgcagcgcctgcgcgagatctgcgaccagcacaacatcctgctgatcttcgacgaggtgatcaccgccttcggccgcctgggcacctacagcggcgccgagtacttcggcgtcaccccggacctgatgaacgtcgccaagcaggtcaccaacggcgccgtgccgatgggcgcggtgatcgccagcagcgagatctacgacaccttcatgaaccaggcgctgcccgagcacgcggtggagttcagccacggctacacctactccgcgcacccggtcgcctgcgccgccggcctggccgcgctggacatcctggccagggacaacctggtgcagcagtccgccaagctggcgccgcacttcgagaagggcctgcacggcctgcaaggcgcgaagaacgtcatcgacatccgcaactgcggcctggccggcgcgatccagatcgccccgcgcgacggcgatccgaccgtacgtccgttcgaggccggcatgaagctctggcaacagggtttctacgtgcgcttcggcggcgataccctgcaattcggcccgaccttcaacgccaggccggaagagctggaccgcctgttcgacgcggtcggcgaagcgctcaacggcatcgcctga

SEQ ID NO: 319600 - DNA, 918 bp, Pseudomonas aeruginosa
atggccaaatcccgcaacccgtcgctcggccaggtcagcgatttcgatatccgcctgctgcgcatcttcaagaccatcgtcgagtgcggcagtttctccgccgcggagagcactctcggcctcagccgctcggcgatcagcctgcacatgggcgacctggagaagcgcctgggcatgcgcctgtgccagcgcggccgcgccggcttcgccctgaccgacgagggccgcgaggtctatcgcgcgacccagaccctgctggcggcgctggaggggttccgcgccgaggtcaacgacctgcaccagcacctgcgcggcgaactcaacatcggcatcatcaacaacctggtgaccctgccgcagatgcgcatcacccacgctctcagcgcgctcaaggggcagggaccgcaggtgcggatcaacatcggcatgaccacccccaacgagatcgaactgggcgtgctcgacggccacctgcatgtcggcgtggtgccgttgatcagtccgctgtcggggctcgagtacctgccgctgtatgacgagcacgcgcagctctattgcagccgcggccacgcactgttcgagcgcgccgacggcgatatcgcggtggacgaggtgctcgccgcggacgccgtggcgcccagctaccgcctgcccgccgaagcccaggcgcgccaccaggagctgaacaacagcgccagcgcctcggaccgtgagggcatggcattcctgatcctgaccggcaacttcatcggctacctgccgtcgcactacgctgccgactgggtcgccgccgggatgctgcggcccctgctgccggagcgtttccactatgccatcgcgctgaccatcgtgacccgcaagggacgccggccgaacctggtgctggagcgcttcctggaggcggtggcggtgtcgtga

SEQ ID NO: 319601 - DNA, 1299 bp, Pseudomonas aeruginosa
atgagcagttcggcccatcgcgggcggatcctgcatttcctcggcgacccggcgaaactcggcgacaaggcctgggagtatttcgaggacggcctgctgtggatcgaacacggccacgtgcgcgcgctcgatcacgcaacctacctgctgccgcaactgcccgccgacctgccgctggaggagcatccgcagcgcctgctgctgcccggcttcgtcgactgccatgtgcattacccgcaactcggagtgatcgcctcctacggcacccaactgctggactggctggaaacccacacctttcccgccgagcagcgctttgccgatgccggctacgccgccgcccaggccgagctgttcctcgacgaactgctgcgccacggcaccactaccgcgctggtgttcggcacggtccatgcggtatccgccgaggcattcttccaggccgcgcagaagcgccgcctgcggatgatcgccggcaaggtgctgatggaccgcaacgcgccgccggcgctgtgcgataccgcggccagtggctacgccgagagccgcgcgctgatcgagcgctggcacggcaacgggcgcctgcaatacgcggtcaccccgcgcttcgcgccgacctcctcgcccgagcaactggccgcggcggcgcgcctgctggacgagtatcccggcgtctacctgcacacccatctttcggagaacctcaaggaagtcgcctgggtcggcgagctgtttccccaggcgcaggactacctggacgtctatcatcgcgccggcctggtcggcgaacgcagcgtgttcgcccatggcatccatctctccgaacgcgaatgccgctgcctggcgcacaagaacgcggcgctggcgcactgtcccagttccaacctgttcatcggctccggcctgttcgaccttggccgcgcccagcaatacggcatccgcgtcggcatcggcagcgacgtcggcggcggcaccagcctgtcgctgctggccaacctcgccgacgcctacaagatccagcaattgcgcggcaccagcctcgatccgttccaggcgctctacctggccaccctcggcggcgccagggcgctcgacctggacggcctggtcggtaacttcctgcccggccgcgaagccgacttcgtcgccctcgacctggccgccacgccgatgatcgcccagcgcatggagcatgcgcgcggcctggccgataccctgttcgtgctgaacaccctgggcgacgaccgcgcggtggcggagacctgggtgatgggggagcggcgccatgtgaaggggtga

SEQ ID NO: 319602 - DNA, 885 bp, Pseudomonas aeruginosa
atgtgcccatctggctgccggcaggcgatccgcgaaaagcgttccggcaccttgagtccgccttgcgaaatgcccggtcggcaactggcgcttctgtgggtttgtctgtggaaaagctgttcgcattccccgttgaaaaaatgccttcggcggtcgggggaaaggcattggacggagccgcaggatttctcccggttggcgaaagagccagggaaaaggtgctgtggaatgcgccacgacggtgcatcgcgaaactgtggacagcggatccacccatggcgccgccgagcatgcttccgtcgatcgccgcggactttcctggaaagccggaaaacccagtatccatgggcatcatggcgtctaaaggggaagtcctggagacattttcacgggcattcccgttccgcgggtttcctgtggaaaagctgttggcaaactgtgccggaagcgggccgccggggctgccccagggattcggccgacccgtggcttggccgggagagatcgtcctgccgtgctcctccgaacggctgtcgatatcttgtggataaagctgttggcaaagtgttggaaaaaatgccttgccaggtcgcgcccatggcctgccgggttggctgttttctgtccatcgccaatgttgcgaaaatcgccgggacgatcggcgcgggaggcttcccaaggtcccggatgggctcccgacacgctgtggataactctgtgagcaaggtggtgatgactgttttgcgacaaatgctcacgcgggtgcgccgcagggttgcccgcaaatgtgccgcggcgtcccaggcgtgctccggcttggtgccgctcggcgcggcagcctggcccgtggctcccggcgcaagccgcgttccagggctttcctga

SEQ ID NO: 319603 - DNA, 1572 bp, Pseudomonas aeruginosa
atgtccgcaccttcctccttcgcgccgccgcgcctcgaactgcgcgggatcagcaagcgctatccgggttgcctggccaacgaccgcatcgacctgtgcatcgacgccggcgagatccacgccctgctcggtgagaacggcgccggcaagagcacgctgatgaagatcatctacggcgtgacccgtcccgatgccggcgaggtccgctggcagggcgagccggtgcaggtacgcgacccggctcgcgcccgggcgctggggatcggcatggtgttccagcatttctccctgttcgagacgctcagcgtggcggagaacatcgcgctcgccctcggcgccgaggcgggcagcccgcgccggttggaggcgcgtattcgcgaggtgtcgcagcgctacggcatgccgctggagcctcgccggctggtccatgggctgtccatcggcgagcgccagcgggtggagatcgtgcgctgcctgatgcaggacatccgcctgctgatcctcgacgagccgacttcggtgctgaccccacgcgaggccgaggatctcttcgtcaccctgcgccgtcttgcggaggagggctgcagtgtcctcttcatcagccacaagctggccgaggtccgtgcgctctgccagcgcgccacggtgctgcgcggcggacgggtggccggacagtgcgtgccggcgcaatgttccgatctcgagctggcgcggctgatggtgggcgacgccgagggcctggcggcggagtatccgaaggttaccggcggcgcgcctttcctccaggtgcgcgacctgcactggcgcaacccggaccccttcggcgtgtccttcgccggcctcgatctggaggtgcgcagcggcgagatcctcggtatcgccggggtcgccggcaacggccaggacgagttgctcgctctgctcagcggcgaagtgcgcctgccgcgcgcccaggccgagcgcatccgcctcggcggctgcgccggcgcggacctggcgccggatgcgcggcgccgcgccggccaggccttcgtgcccgccgagcggctggggcacggcgcggtgccggagatgagcctggcggacaatgcgctgctcaccgccttccagcagggtctggtgaagcgcgggttggtccggcggcgcaaggtgctggcgctggccgaggagatcatccgccgtttcgccgtgaagaccccgggtgccggggcgccggcacgcagcctttccggcggcaacctgcagaagttcattctcggccgcgagatcctccaggccccgcgcctgctggtggcggcgcatcccacctggggcgtggacgtcggcgcggcggcgctgatccaccgcgcgctgatcgccttgcgcgatgccggtacggcgatcctggtggtctccgaggacctcgacgagctgttcctgctcagcgaccgcatcgccgcgctgtgttcgggtcggctgtgcccggcggtcgccaccgcgagcgcttcgccgcagcaggtcggcggctggatggccggtcaattcgaggcgccggcggcagtcgccggcgccgttgcccaagggagcctgtga

SEQ ID NO: 319604 - DNA, 1098 bp, Pseudomonas aeruginosa
atgctgttgtccctggaaccgcgcggccggcagtcacgctggatgctgctggcctctccgctgctggcggggctgctgaccctggtctgcggtgcgctgctgttcgcctgtctcggccacgatccgtggcagaccctgcataccgtgctggtacagccgctcagcgacctctatgggctcggcgagctgctggtcaaggccatgccgatcctgctctgtgccctcggcctggcactggcctaccaggcgcgcgtgtggaacatcggcgcggagggccagttgctggtcggcgccctggccggcagcgcggtggcgatccagttgctcgactggcagagccgctgggcgctggcctgggtgctgctcgccggcaccgctgccggggcgctctgggccgggttcgccgcctggctgcgaacgcgcttcaacgccaacgagatcctgaccaccatcatgctcaactacatcgcgctgaacctgctgctgtacggcgtgcacgggccgttgaaggacccggatggcttcaacttcccgcagtcggcgctgttcggcgaggccagccgcctgccggcgctgttcgaggacagccgggtgcaccttggcgcattgttcggcctgctggcgctggcggcggtctgggtgctggcgcagcgcagcttcctcggtttccaggtccgcgtgctcggcctcgaccgccgcgccgccggtttcgtcggtttccgcgagaagcgcctggtctggttcgtgctgctgttctccggcgcgctggcaggcctggccggcgtctgcgaggtcgccgggccgatcggccaactggtgccgcaggtctcgccgggctacggctatgcggcgatcaccgtggccttccttggccgtctcaatccgttcggcatcctctgcgccagcctgctgatggcgttgctctacctcggcggcgaggccgcgcagatgagcctcaacctgccgttggcgctgaccgggctgttccaggggatgatgctgttcttcctcctcgcctgtgacgtgctgatcctctaccgcccacgtttgcacggacgctggcgcaagcgcccggcgctgcgcgacgccctggcctga

SEQ ID NO: 319605 - DNA, 927 bp, Pseudomonas aeruginosa
atggatatcgatctgctcgacaacctgctgttcgccatggtccgcaccggtactccgctgctgctggtggccctgggcgaactggtctgcgagagaagcggggtgctcaacctgggccaggaggggatgatgctgttcggcgcggtgatcggcttcatggtcgccttctccagcggcagcctgtggctcggcgtgctcctcgcggtgctcgccggcatgctgctggcggcgctgttcgccggggtcgccctgtacctgaacgccaaccaggtggcctgcggcctggcgctgaccatcttcggcgtcggcctttcgtcgttcgtcggcgccgcctgggtcggcaagccgctgcaagggttcgccccgctggcgctgccggtgctgggcgagttgccgctgctcgggcgcatgctgttcgcccaggacgcgctggtctacctgagcctggcgctgttcgccgcggtcgcctggatgctcctgcgcagccgcgccgggctggttctccaggcggtcggcgagaaccctgacgcggccagcgcgatgggcctgccggtgctgcgcgtgcgcaccctggcggtgctcttcggcggcgccatggccggcctggccggtgcctacctgtcgctggcctacacgccgatgtgggcggagaacatgaccgccggacgcggctggatcgccctggcgctggtggtcttcgccagttggcgggtgttccgcgtgctgctcggtgcctggttgttcggcctggccagcatcctgcacctggtggcccaggggatcgggctgtcgattccggccaacctgctggcgatgctgccctatgcggcgaccatcctggtgctggtcctgctctcccgcgatgccctgcgcacccggctgtatgccccggtttccctgggccagccgtggaaggccgggcactga

SEQ ID NO: 319606 - DNA, 564 bp, Pseudomonas aeruginosa
atgtccctgatcaacactcaagtccaaccgttcaaggtcaacgctttccacaacggcaagttcatcgaggtgaccgaggaatccctgaagggcaagtggtcggtcctgatcttcatgccggctgccttcaccttcaactgcccgaccgagatcgaagacgccgccaacaactacggcgagttccagaaagccggtgccgaggtctacatcgtgaccaccgacacccacttctcgcacaaggtctggcacgaaacctccccggcagtcggcaaggcccagttcccgctgatcggcgacccgacccaccagttgaccaacgccttcggcgtgcacatcccggaagaaggcctggccctgcgcggtaccttcgtgatcaacccggaaggcgtgatcaagaccgtcgagatccactccaacgagatcgcccgtgacgtcggcgagaccgtgcgcaagctgaaggccgcccagtacaccgccgcccacccgggcgaagtctgcccggccaagtggaaggaaggcgagaagaccctcgctccgtccctggacctggtcggcaagatctaa

SEQ ID NO: 319607 - DNA, 1566 bp, Pseudomonas aeruginosa
atgttggacgccaatcttaaaacccagttgaaggcctacctggaaaaggtcagccagccgttcgagatcgtcgcgtccctcgatgacagcgacaaatcccgcgagctgctgggcctgctgcaagacatcgtcggcctgaccgacaagatcaccctgaagaccgacggcagcgatgcgcgcaaaccgtcgttctcgctgaaccgccccggtgcggacatcggcctgcgcttcgccggtatccccatgggccacgaattcacctcgctggtgctggccctgctgcaggtaggcggccacccctccaagctcgacgcggacgtgatcgagcaggtcaagggcatcgagggcaccttcgagttcgaaacctacttctcgctgtcctgccagaactgcccggacgtggtccaggcgctgaacctgatggccgtgctcaacccgaacatccgtcacgtcgccatcgacggcgcgctgttccaggatgaggtcgaggcgcgccagatcatgtcggtgccgagcatctacctcaacggcgaagtcttcggccagggccgcatgggcgtggaagagatcctcgccaagatcgacaccggcgccgccgcccgcgacgccgagaagctgaccgcccgcgacgccttcgacgtgctggtggtcggcggtggcccggccggcgccgcggcggcgatctacgccgcgcgcaagggcattcgcaccggcgtcgccgccgagcgcttcggcggccaggtgctggacaccatggccatcgagaacttcatctcggtgcaggagaccgaagggccgaagctggcgcgggcgcttgaagagcacgtgcgtcactacgaggtcgacatcatgaacctgcagcgcgccagcaagctggttccggcgaagaacgccggcgagttgcacgaggtgcagttcgagagcggcggcagcctcaaggccaagaccctgatcctcgccaccggcgctcgctggcgcgaaatgggcgtgcccggcgagcaggagtacaaggccaagggcgtgtgcttctgcccgcactgcgacggcccgctgttcaagggcaagcgcgtggcggtgatcggcggcggcaactctggcgtcgaggcggccatcgacctggccggcatcgtcgcccacgtgaccctgctggaattcgacagcaagttgcgcgccgacgccgtgctgcaacgcaagctctacagcctgccgaacgtcgaggtgatcaccagtgccctgaccagcgaagtgaagggcgacggccagaaggtcaccggcctggtgtacaaggaccgcaactccgaggagttcaagtcgatcgagctggaaggcatcttcgtgcagatcggcctgctgcccaacaccgagtggctcaagggcagcgtcgagctgtcgccgcgtggcgagatcatcgtcgacgcccgtggcgagacctcgctgcccggcatcttcgccgccggcgacgtgaccacggtgccgtacaagcagatcgtgatcgccgtgggcgagggcgccaaggcttcgctgagcgccttcgaccacctgatccggacctccgcgccggagtga

SEQ ID NO: 319608 - DNA, 954 bp, Pseudomonas aeruginosa
gtggccagcccggcgcagaaggcccgcgaggagatccaggcaatcagccagaagccggtggccctgcaggtcgccagtgcgccccacggcagcagcgaggacagcacctcggcgagcctgccggcgaactatccctatcacacgcggatgcgccgcaacgagtacgagaaggccaagcacgacctgcagatcgaactgctcaaggtgcagagctgggtgaaggagaccggccagcgcgtggtggtcctgttcgaaggccgcgacgccgccggcaagggcggcaccatcaagcgcttcatggaacacctgaacccgcgcggcgcgcggatcgtagccttggagaaaccgtcctcccaggagcagggccagtggtatttccagcgctacatccaacatctgcccaccgccggcgagatggtcttcttcgaccgctcctggtacaaccgcgccggcgtcgagcgggtcatgggcttctgttcgccgctgcaatacctggagttcatgcgccaggcgccggagctggagcgtatgctcaccaacagcggcatcctgctgttcaagtactggttctcggtgagccgcgaggaacaactgcggcgcttcatctcgcgccgcgacgatccgctcaagcactggaagctgtcgcccatcgacatcaagtctctggacaagtgggacgactacaccgccgccaagcaggcgatgttcttccataccgacaccgccgacgcgccgtggacggtcatcaagtccgacgacaagaagcgcgcgcgactcaactgcatccgccacttcctgcactcgctggactacccggacaaggaccggcgcatcgcccatgagcccgacccgttgctggtggggccggcctcgcgggtgatcgaggaggacgagaaggtctacgccgaggcggccgccgcgccgggccacgcgaacctggatatcccggcctga

SEQ ID NO: 319609 - DNA, 1314 bp, Pseudomonas aeruginosa
atgaccgccgccaccctcgccgccgacgccgctccggaaccggccaactcgaccacccgggtcgcagtcgccagcttcatcggcaccgccatcgagttctacgatttctacgtctatgccactgccgccgccctggtgatcggtccggtattcttcccgcagacatccggcaccgcgcagatgctcagcgccttcctcaccttcggcatcgccttcctcgcccgtccgctgggctcggcgctgttcggccacttcggcgaccgcatcgggcgcaagtcaaccctggtcgcctcgctgctgctgatgggggtatccaccaccctgatcggcgtcctccccggctacgacagcatcggctactgggcgccgttgctgctctgcgtgctgcgcttcggccagggcctcggcctcggcggcgagtggggcggcgccgcgctgctggccacggagaacgcgccggccggcaagcgcgcctggttcggcatgtttccccagctcggcccgtcgatcggcttcctcgccgccaacggcctgttcctggccctggcgatgctgctcagcgaggagcagttccgtgagtggggctggcggatcccgttcctgctcagcgcggcgctggtcgtggtcggcctctacgtacgcctgaagctggcggaaaccccggtgttcgccaaggccatggccaagcacgagagggtccgcctgccgatcgccgagctgttcgcccagcactggcggccgaccctgctcggcgccctggcgatggtggtgtgttatgcgctgttctatatctccacggtgttctcgctgagctacggggtggccagcctcggcttcagccgcgaggagttccttggtctgctgtgcctcgcggtgctcttcatggccgccgccacgccgctgtcggcctggctcagcgaccgcttcggacgcaagccggtactgctgctcggcagcctggcggcgatcgcctccggcttcgccatggagccgctgctcagccagggctcgacgttcagcgtcgccctgttcctctgcatcgagctgttcctgatgggggtcaccttcgccccgatgggcgcgctgctgccggaaatattccccacccacgtgcgctacaccggcgcgtcggcggcctacaacctgggcggcattctcggcgcctcggtggcgccctatatcgcccagaagctggtcggcatcggcggcctgggctgggtcggcggctacgtctccgcagcggcgctgctcagcctgctggcggtgctgtgcctgaaggaaacccgcgacaacgacctcggcgcagtgtcctga

SEQ ID NO: 319610 - DNA, 750 bp, Pseudomonas aeruginosa
atgcgccggctggcaacgctggcctggtgggcggcggctctgccgttgctgccgctggcggtgccgttggctatccgcacccgccgccgagccttgcgcctggcgcccgcggcgggacctcgcgaagggctggtcggtgggtccggtgccgaagagccgctgcgcttgctgttgttcggtgagtcgacagtggccggggtcggcgccagttgcctggactacgccctggccggccgcctggccgcggcgctgggcgagcgtctgcggcgcccggtggcctggcaggcgctgggcgagaacggtatcaccagcggcgaggcgcgcgaacgcttgctaccgcaggtggcgggacgtttcttcgaccaggtgatcctggtcttcggcgtcaatgacaccaccagcctgcgctccctcgaacgctggcgcgccgactgcgcggccctgatcgacggcttccaggcggccggcgcgcaggtgacctgcaccgcggtgccgccgctgcagcatttttccgccttgcccgggttgctgcgggccctgctggggtggcgcgggcggctgctcgacgaggcgctgtgcgatctcgctggcgcgaccggcgccggctactgcccgatctcgctggacctgcttccgggctacctggccatcgacggctttcatccgtcgcagctgggctaccaggtctgggccggggccctcgccgactggttggcggcgagggagaagggcggcgtcgcggtagtctga

SEQ ID NO: 319611 - DNA, 1182 bp, Pseudomonas aeruginosa
atgacccgtatcggtacccccctgtcgccgagcgcgacccgcgtccttctctgtggctccggcgagctgggcaaagaagtcgccatcgagctgcaacgcctgggttgcgaagtgatcgccgtcgatcgctatggcaacgcgccggccatgcaggtggcacatcgcagccacgtgatcagcatgctcgacggcgccgccctgcgcgcggtgatcgagcaggagaagccgcactacatcgtgccggagatcgaggccatcgccaccgcgaccctggtcgagctggaggccgaaggctacaccgtggtgcccaccgcccgcgccgcgcaactgaccatgaaccgcgagggtatccgccggctggctgccgaggagctcggcttgccgacctcgccctatcacttcgccgataccttcgaggactaccgccgtggcgtcgagcgcgtcggctacccctgcgtggtgaagccgatcatgagttcgtcgggcaagggccagagcgtcctgaaaggccccgacgacctgcaggcggcctgggactatgcccaggaaggcgggcgcgccggcaagggccgggtgatcgtcgagggcttcatcgatttcgactacgaaatcaccctgctcaccgtgcgccacgtcgacggcaccactttctgcgcgccgatcggtcaccgccaggtcaagggcgactaccacgagtcctggcagccgcaggcgatgagcgcgcaggctctggccgagtccgagcgggtcgcccgggcagtgaccgaggccctcggcggacgcgggctgttcggcgtcgaactgttcgtcaagggcgaccaggtgtggttcagcgaggtgtcgccgcgcccgcacgataccggcctggtgaccctgatttcccaggatctttccgagttcgcgctgcacgcgcgggcgatcctcggcctgccgatcccggtgatccgccagctcggcccgtcggcctcggcggtgatcctggtggaaggcaagtcccggcaggtcgctttcgccaacctcggtgccgcgctgagcgaggcggatacggcgctacgcctgttcggcaagccggaagtggatggccagcggcggatgggcgtggccctggcgcgcgacgagtcgatcgacgccgcccgcgccaaggcgacccgggccgcccaggcggttcgcgtcgaactctga

SEQ ID NO: 319612 - DNA, 195 bp, Pseudomonas aeruginosa
gtgaacgagcgaccggtggcttcgccctgcgtgcatgtctgcgcgctggacgagcaggacatctgcatcggctgccagcgcacggcggccgagatcacccgctggggcctgatgagcaacgacgagcgccgcgaggtgctcggtcgctgtttcgagcgcgccaaggcgcaagggctggtcagcggttccgcctga

SEQ ID NO: 319613 - DNA, 525 bp, Pseudomonas aeruginosa
atgaaataccgcctgggcgatgcccgcgtcgaaacccatcccgacagctggatcgcgcccagcgcagcggtgatcggcaaggttcgcctggatgccggcgccagcgtctggtttggcgcggtgctgcgcggcgacaacgagctgatccatatcggcgagcacagcaacgtccaggacggctcggtgatgcacaccgacatgggctatccgctgaccctcggcaagggcgtcaccgtcggccacaacgccatgctgcatggttgcagcgtgggcgactacagcctggtggggatcaacgcggtgatcctcaatggggcgaagatcggcaagtactgcatcatcggcgccaacgcgctgattcccgagggcaaggagattcccgacggctcgctggtgatgggctcgccgggcaaggtagtgcgcgagctgagcgagccgcagaagaagatgctcgaggccagcgccgcccactatgtgcacaatgcccgccgttacgcccgcgacctcgtcgaggacccggcgtga

SEQ ID NO: 319614 - DNA, 612 bp, Pseudomonas aeruginosa
atgaactgcacgctcgacgagctgcgccaacgcatcgaggcgcaccgcccccgccaactggataccgaccagcgcttcccccaagcggccgtgctggtgcccatcacccgcagcgacgatccggagctggtgctgaccctgcgcgccgccggtttgtccacccatggcggcgaggtcgccttccccggcgggcggcgcgacccggaagacgccgacctggtgcgcaccgccctgcgcgaggcggaggaggagatcgccttgccgccgggcctggtggaagtggtcgggccgctgagcaccctggtctcgcggcatggcatcgaggtcactccctatgtcgccttcattcccgacttcgtcgagtaccagcccaacgacggtgagatcgccgcggtgttcaacgtgccgctgagtttctttcgcgacgacccgcgcgaggtcacccaccgtatcgactacttcggccgcagctggtacgtgcccagctatcgcttcggcgagttcaagatctggggcctgacggccatcatggtggtggagctggtcaacctgctgtacgacgaccccatcgacctgcacacgccgccggcttcgttcatcaaactgagttga

SEQ ID NO: 319615 - DNA, 555 bp, Pseudomonas aeruginosa
atgaaattctgcagcctgtgcggcgccacggtggtccagcgcatcccggacggcgacaaccgcctgcgctacgtctgcgacgcctgccacaccgtgcactaccagaacccgcgtatcgtcgccggcagcctgccggtgtgggacggccaggtcctgctctgccgtcgcgccattgcgccgcgcctgggctactggacgctgccggccggcttcatggagaacggcgagaccctcgcccaggcggcggcccgcgagacagaggaagaagccaacgcgcggatcggcgacctgcagctctatacccttttcgacctgccgcacatcagccaggtctacctgttcttccgcgccgagctgctcgacctggatttctccgccggcgatgaaagcctggaggtgcggcttttcgacgaagcggagattccctggtcggagctggcttttccgaccatcggccgtaccttagaatgctacttcagcgaccgccgcgaaggctgcttcccggtgcgcaacgaagccattgcacctatgctggcttcctataagaaagactga

SEQ ID NO: 319616 - DNA, 501 bp, Pseudomonas aeruginosa
atgcgctggttgcttgctttgctgtgcttgaccttcgccagtctgacccaggccaatgccgcgccgagcctggaaggcaaggtggacaaggtcctggtgctcaagtccgagcgaaaactgctgctcctcaacaaaggcaacgtcctgaaaagctaccgtgtctcgctgggcaagcgcccgaccggcccgaagctggccgaaggcgacaaccgcaccccggaaggcttctactggatcgactggcgcaagaccagcaacaactacaacctctccatgcacatttcctaccccaacgcccgcgacgtggccaaggcccgggaaaagggcctgccggccggtggcatgatcatgatccacggcaccccgctggatgacgaatacccggagtggtacttctccaccctggactggaccaatggctgtatcgccatgaacaacaccgacatgcgcgaagtctggagcgtggtgaaagacggcacgctgatcgagatccgcccctga

SEQ ID NO: 319617 - DNA, 744 bp, Pseudomonas aeruginosa
atgaagacagcccacgacctgctcctggccctgcgtcccgacgaggcgcaacccacccccctctatctgcagctggcgcgcaatctcgagagcgcgatccatgccggccagtggaaagcggaggaagcgctgccctccgaacgcaacctcagcgaaaccctgaacatttcccgcgtcaccgcgcgcaaggccctcgaagtactcttcgagcagggcctgatccgccgcaaccagggctccggcaccttcattacgccgcgtctcgaacaaccgttgtcgcgtctctccagcttcagcgagatgctccgcctgaaaggcttcacccccggctccacctggctggagcgcggcatcgccctgcccacccacgacgaactgatccgcctcggcctctcgccgaccgagaaggtcacgcgcatgaagcgcctgcgcaaggccgacggcacagtgatggcgatcgagaacagcaccctgccggcgcgcctgctgccggacccgacagcggtcggcgattccctctacgaatacctggacggcatcggtcgcccagtggtccgcgccctccagcacgtgcgcgcgatcaacgcgtccgcgtccgatgccgcgctggtcggcatcgcgccgggcaccgcgatgctgctgatgacccggatcggctacctcgaggacaacaccccgatcgagctgaccgacacctactgccgcaacgactactacgacttcgtcgccgaactgcgacgctga

SEQ ID NO: 319618 - DNA, 1092 bp, Pseudomonas aeruginosa
atgctcgaaggcaacattctcaccccgcaaggctgggtcctcggccgcctgcacatccaggacgggcgtatccagcggatcgaaggcgagccctgcgatccggccggcaacgccgatccgtacctgctgccaggcttcatcgacctgcatgtgcacggcggcggcggccgcgacatcatggaaggcggcgacgccttcgccaccatcgcccgcacccaccggcgcttcggcacgacctcgctgctggccaccaccatgaccgcaccgcgcgaggagatcgccgacatcctcagccagctcggcgcttactgccgccgctcgctggagggcggttcacggatactcggcgtgcacctggaaggcccctacatcaactccggcaagctcggcgcgcagcccaacttcgcccatgccgcggtgctcgaggaagtcgaggactacctgcgccgcgcgccgatccgggtgatcaccatcgcccccgagatcgccggacaccggccgctgatccgcgccctcgccgagcgcggcgtacgcctgcagatcggccatacactgggcagctacgaggatggcgtggccgcactggaagccggcgccagcagcttcacccacctctacaacgcgatgaccggcctgcaccaccgcgaaccgggtatcgtcggcgcggccctggcccacgcacgctacgccgagctgatccccgacctgctgcatgtccatcccggcgccatcagggtggccctgcgttcgatcccgtgcctgtactgcgtgaccgactccaccgccgccgccggcatgcccgacggccagtacaagctcggcagccacacggtgaccaagtgcctgggcggcgtgcgcctgcccgacggcactctggccggcagcaccctgaccatggaccaggcgctgcgcaacctggtgaagatcggcctgcccctggccgaagcctcgcaacgcctttcgcaattccccgccgattacctcggcctcgccgagcgcggccgcctggcgcccgcagcctgggccgatgtggtgcgcctggatcgctccctggaactcgacgccgtgatggtggaaggagaactcgaatga

SEQ ID NO: 319619 - DNA, 1023 bp, Pseudomonas aeruginosa
atgacttcgctgatgctcgaggaagcgctctccgccgccacggtggcgagccgtcaactggccgtgctcgacgcctgcctgccggcgcttggccagcgtctgcgggaggtcgatccgaacctggcactgactgtcgcgcgcggcagctccgaccatgccgccagctacttcgcctacctggccatgcagcacgccggcttgccggtggcctcgctgcccatgtcggtagtgaccctgaaccgctcgccactgcgtgtcgccgggcaggccgtcttcgctttctcgcagtccgggcagagccccgatctcgtggacagcctgcgcatcctgcgcgaacgcggcgccctgggcatcgccctggtgaatgccgaggattcgccgctggaagccgccagcgaattcgtcgtgccgctctgcgccggcgccgagcgcagcgtcgcagcgaccaagagcttcatcgccacgctcagcgccagcgcccgcctgctcgcccactggcagcgcgacaatgccctgctggccgcaggccagggcctggcggccgggctggagcaggccgccaggctcgactggtcgccggccatcgaggccctgcgcgactgccagcggctgatggtgatcggtcgcggcgccggctacgccatcgcccaggaggccgcgctgaaattcaaggaaacctcggcgatccaggccgaggccttcagcagcgccgaggtccgccatggaccgatggcgctggtcgaggagcgctatccgctgctggtgttcgctccccgcggcccggagcaggaaggcctgctggcgctcgccgaggatatgcgccaacgcggtgcgcaggtattgctcgctgccccggacgacatcgccgaacgcgacctgccgctgcagcgcgccgcgcatccggcgctcgatccgatcctggcgatccagagcttctacgtcatggccgccggcctggccgaagcccgcggcatggacccggaccagccacggcacctgagcaaagtcacccgaacccactga

SEQ ID NO: 319620 - DNA, 2529 bp, Pseudomonas aeruginosa
atgaacaacaagaatctcgccctcaaagcgcccctgagcggccccgtgatgccgctcaaccgagtacccgacccggtgttttccagcggcaccctgggcgaaggcatcgccatcgacccactcaacgactgcctgcacgcgccctgcgccgggctggtcagccacctggcgcgaacccgccacgcgctcagcctgcgcgccgacaacggtgccgagctgctgctgcacgtcggcctcgataccgtacagctgcaaggcgaaggcttcgaggcgctggtcgaggaaggtgcgcgggtgatcgagggccagccgctgctgcgcttcgacctggaccgcgtcgcccgcggcagccgcagtctgatcacggtgatgatcctgaccaacggcgacggcttccaggtacgcccgctgaccaccaacccggtggaggtcggcgcgccgctcctgcaactgagtccggagaaggccgagcaacgtccggccaatcccgcgcctggcgaaggctccgcgcagcgccaggtccgcgggcgggcgcgggtcgcccatcatggcggtctgcacgcacgcccggcagcgctgctacggaagaccgcgcagggcttttccagccaggccgaactgcacttcgccgggcaggtggccagcgtcgacagcctggtcggcatcatgggcctgggggtcgccgaacaggacgaggtagaggtgatctgtcgcggcgaagacagcgaggcggccctcgacgccctgctcgcggccctcgccagcgccaccgcgggggctccgaaggaggccccgcgcgccatcgccccgggcgagccggcgcgacctgcggctgtcgccggtaccctggccggcgtctgcgcttcgcccggcctggccagcggtcccctggcgcggctcggcgccatcagcctgccggcggatgacggccggcatcgtcccgaggaacagcacctcgccctggaccaggccctgcaacgggtgcgcgacgacgtacaggggagcctgcagcaggccaggctcggcggcgacgagaacgaagcggcgatcttttccgcgcatctcgcgctgctggaagacccgggtctgctggacgccgccgacatgctgatcgaccagggcgtcggcgccgcccacgcctggcaccgggcgatccaggcccagtgcgagattctccaggcgctgggcaacctgctgctggccgagcgcgccaacgacctgcgcgacctggaaaaacgcgtgctgcgggtactgctcggcgacaccgcgccattgcgggtgcctgctggcgccatcgtcgccgcccgggagatcactccctccgacctcgcgccgctggtggatgccggcgcggctggcctgtgcatggccgaaggcggcgccacctcccacgtggccatcctcgcccgcagcaagggcctgccgtgcctggtggcgctcggcgccgggctgctggagctggaggaaggccggcaggtggtgctggacgccggccagggccggctggaactcagccccgacgctcgacgcctggagcaggtcgccttgcaagtggcgcagcgcgaggaacaacgccgccgccagcaggccgatgcgcagcgcgaggcgctcacccgcgacggccggcgcatcgagatcggcgccaacgtcgcctcgccgcgcgaggccgccgaagccttcgccaacggtgccgacggggtcggcctgctacgcaccgagtttctctttctcgagcgccgcgccgcgcccgacgaagaggagcagcgcaacgcctaccaggaggtcctggacgccatgggccagcgcaaggtgatcatccgcaccatcgatgtcggcggcgacaagcacctcgactacctgccgctgccggtggaagaaaacccagcactgggcctgcgcggcatccgcctcggccaggcgcgcccggagctgctcgaccagcagttgcgcgcgctgctcagggtcgaaccactggaacgctgccggatactgctgccgatggtcagcgaggtcgatgaactgcgcgccatccgtggccgcctcggcgagctggccacgcagttggggatcgagcgcctgcccgaactcggggtgatgatcgaggtgccctccgccgccctgctcgccgatcaactggccgaacacgccgacttcctctccatcggcaccaacgacctgtcgcagtacgccctggccatggaccgttgccacgccggcctggccgaccgcatcgacgccctccacccggcgctgctgcgactgatcgcccagacctgcgccggagcagcccgccacggccgctgggtcggcgtctgcggtgcgctggcctcggacccgctggcgacaccggtactggtcggcctcggggtcgaggaattgtccgtcgggccgaacctggtcggcgagatcaagacccgggtgcgccagctcgacgccgctgaatgccgccgccacgcccaggcgctactggacctgggcagcgcccgggcggtgcgcgacgcctgcctgcaacactggccgctggcctga

SEQ ID NO: 319621 - DNA, 1713 bp, Pseudomonas aeruginosa
atgcccccgttcctgatcgaaagcctgcaacgcctgggccgcgccctgatgctgccgatcgcgatcctgccgatcgccggcctgctgctgcgcctgggcgacgtcgacctgctcgacattccgctggtccacgacgccggcaaggcgatcttcgccaacctggcgctgatcttcgccatcggcatcgccgtcggtttcgctcgcgacaacaatggcaccgccggcctcgccggcgccatcggctacctggtgatgatctcggtgctcaaggtgatcgatccgggcatcgacatgggcgtgctctccggcatcatcagcggcctggtggctggcgccctgtataaccgcttcaaggacgtgaagctgccggaatacctggcgttcttcggcggccgccgcttcgtgccgatcgccaccgggatcagcgcggtctgcctgggcctgctgttcggggtgatctggccaccgctgcaacagggcatcaacggcctcggccaactcatgctggaaagcggcagcttcggcgccttcgccttcggcgtgctgaaccgcctgctgatcgtcaccgggttgcaccacatcctcaacaacctggtgtggttcgtcttcggtagcttcaccgacccggaaaccgggcgcgtcgtcaccggcgacctggcgcgttatttcgccggcgacccgaagggcggccagttcatggccgggatgttcccggtgatgatgttcggcctgcccgccgcctgcctggcgatgtaccgcaacgcccgtccggagcggcgcaagctgatcggcgggctgctcctgtcgatggccttgaccgccttcctcaccggcgtcaccgagccggtggagttcgccttcatgttcctcgcgccgctgctctacctgctgcatgcgctgctcaccggcctgtccatggccctcaccgacctgctcgacatccgcctcggcttcaccttctccggtggcgccatcgacctcgccctgggctggggccgctccacccacggctggatgctctggccgctgggcctgctctatgccggcatctattacctggtgttcgacttctgcatccgccgcttcaacctgaagaccccgggccgcgaagacgacgcgagcagcgaatcgggcgacaacgccgaagccgagcgcgccccggcattcatccgcgccctgggtggcgcagccaacctcgaagtggtggacgcctgcaccacgcgcctgcgtctgcgcctggtcgaccgcgacaaggcctcggacgcccagctcaaggccctcggtgcgatggccgtggtacgtccgggcaaggccggcagcctgcaggtggtggtcggcccacaggccgacagcatcgccgacgagatccgccgcgccctgcccttcgatacgcaaccgggcgaagccgtaccgccgctgggcagtccgaacgcagccgaagaggtggtgtcgatgcaggccaccgtcgacgccgccgaagcccaggcctggctcggcgccctcggcggcgccggcaacctgcgcgaggtacgggacgtcgcactgacccgcctgcgggtcagcgtggcggacgaacgcaagctggccaccgagcaactgcgtcgtctcggcggacagggcgtcagctccctcaccggcggcatctgccatatcctggtgggcccccgcgccgcggccctgagccaggccctgcaaccgctactgcggcgctga

SEQ ID NO: 319622 - DNA, 318 bp, Pseudomonas aeruginosa
atgtacaagctgtgtttctatgtgcctgagagccatctggatgtcgtcaagcaagcggtgttcgccgcgggtggcgggcgcatcggggcgtacgacagttgctgctggcagtcccttggccagggccagttccggcccctggacggtagccaaccctacctgggccaggtcggccaggtcgagcacgtggcggagtggaaagtggagctggtggtggccgacgagctcatccacgccagcgtcaaggcgctgaaggcggcgcatccctatgagaccccggcctacgaagtctggcgcctgaccgacatggtcttctga

SEQ ID NO: 319623 - DNA, 279 bp, Pseudomonas aeruginosa
atggcgggcgatgcggactccaactcgtcgcccgaccttcttcccgaggttcgccgggtctctcccggcgacaccttgcggctctgtacctgcggggcttcggcttcgcttcccgattgtcccgccgactgccgcaacggcctgacgctccacgcgacccgcgagcgcctgttgctgttgtgccgctgcgggcgctccgccgacctgccgtattgcgacggcagccatgcgccttccgcctccgggctgaaggccaggtggcggcgtttccgcggctga

SEQ ID NO: 319624 - DNA, 3897 bp, Pseudomonas aeruginosa
atgctgatcctgcgcggcgctcccgccctttccgctttccgccacggcaaactgctcgagcaactgacccagcacgtacctgccgttaccgggctgtacgctgagttcgcgcatttcgccgacgtcaccggcgcgctcaccgccgacgaggagcaggtgctggcgcggctgctgaaatacggcccgagcgtgccggtgcaggagcccagcggacggctgttcctggtggtgccgcgcttcggcaccatctcgccgtggtcgagcaaggcctccgatatcgcccgcaactgcggcctggcgaagatcgaccggctggagcgcggcattgcctactatgtgcagggcgaactgtccgagagcgacgcccagcaggtcgccgcccgcctgcatgaccgcatgacccaactggtgctggaccgcctggaaggcgccgccgagctgttcagccatgcgcagccccgcccgctcaccgccgtcgacgtgcttggcggcggtcgcgccgcgctggagaaggccaacgtcgagttgggcctggccctggccgaggacgagatcgactacctgctgaagagcttcggcgaactggggcgcaacccgcacgacgtcgagctgatgatgttcgcccaggccaactccgagcattgccggcacaagatcttcaatgccagttgggacatcgacgggcaggcccaggacaagagcctgttcggcatgatcaagaacacctacgagatgaaccgcgaaggcgtgctgtccgcatacaaggacaacgccgcggtcatcgtcggccatgtcgccgggcgtttcttccccgatccgcagacacgcgaatacgccgccagccgcgagccggtgcagatcctgatgaaggtggagacccacaaccacccgaccgccatcgcgccgttccccggtgcctccaccggttccggcggcgagatccgcgacgagggcgccaccggccgcggcgccaagccgaaggccggcctgaccggcttcaccgtgtccaacctgcagatccccggtttcgaacagccctgggaagtgccctacggcaagcccgagcgcatcgtcaccgcgctggacatcatgatcgagggcccgctgggcggcgccgcgttcaacaacgagttcggccgtccggcgctgaccggctacttccgtaccttcgagcagaagatcgctacccctcacggcgaggaagtgcgcggctaccacaagccgatcatgctcgccggcggcatgggcaacattcgcgacgaacacgtgcagaagggcgagatcagcgtcggcgccaagctcatcgtccttggcggcccggccatgctgatcggcctgggcggcggcgccgcctcttcgatggccaccggcgccagctccgccgacctcgacttcgcctcggtgcagcgcgacaacccggaaatggagcgacgttgccaggaagtgatcgaccgctgctggcagctcggcgagcgcaacccgatcagcttcatccatgacgtcggtgccggcggcctgtccaacgccctgccggaactgatcaacgacggcggccgcggcggtcgcttcgagctgcgcgcggtgcccaacgacgagccgggcatgagcccgctggaaatctggtgcaacgagtcgcaggagcgctacgtgctgtcggtggacgccgccgacttcgagaccttcaaggccatctgcgagcgcgagcgctgcccgttcgcggtggtcggcgaggccatcgagcagcgccaactgaccgtcgccgacagccatttcgacaacaagccggtggacatgccgctggaagtcctgctcggcaaggcgccgcgcatgcaccgcgcggtcacccgcgaggccgagctgggcgacgatttcgacgccgccgggctggagctgcaggaaagcgtcgagcgcgtcctgcgccatcccgccgtggccagcaagagcttcctgatcaccatcggcgaccgcaccatcaccgggctggtggcccgcgaccagatggtcgggccctggcaggtgccggtggccgactgcgccgtcaccgccaccagcttcgacgtctacaccggcgaggccatggcgatgggcgaacgtaccccgctggcgctgctggacgccccggcttccggacgcatggccatcggcgagacggtcaccaacctggctgccgcgcgtatcggcaagctgtccgacatcaagctttccgccaactggatggccgccgccggccaccccggcgaggacgcgcgcctgtatgacacggtcaaggccgtgggcatggaactgtgcccggaactgggcatcaccatcccggtgggcaaggactcgatgtccatgaagacccgctggcaggacaatggcgaggacaagagcgtcacttctccggtctcgctgatcgtcaccggcttcgccccggtcgccgacgtgcgccagagcctgaccccgcaactgcgcctggacaagggcgagaccgacctgatcctgatcgatctcggccgcggcaagaaccgtctcggcggctcgatcctggcccaggtccacggcaagctcggccgcgccgtgccggacgtcgacgacgccgaggacctgaaagccttcttcgcggtgatccaggggctcaatgccgacggccatatcctcgcctaccacgaccgttccgacggcggcctgatcaccagcgtgctggagatggccttcgccggtcactgcggcgtcgagctgaacctcgatgccctggccgatagccgcgaagagctggcggccgtgttgttcagcgaggaactgggcgcggtgatccaggttcgcgagggtgccactccggaagtcctcgcgcagttcagcgccgccggtctcgacgactgcgtggcggtgatcggccagccggtcaacggctacgagatcaacctgaactacaacggcgagaccgtctacagcgcccagcgccgcatcctgcaacgcatctggagcgagaccagctaccagatccagcgtctgcgcgacaacgccgactgcgccgagcaggagttcgacgcgctgctggacgaagacaaccccgggctgtcgatcaagctcagctacgacgtcaacgacgacatcgccgcgccctacatcaagaagggcgtgcggccgaaagtggcgatcctccgcgagcagggcgtcaacggccaggtggagatggccgcggcgttcgaccgcgccggcttcgccgcgatcgacgtgcacatgagcgacatcctcgccgggcgggtcgacctggacgccttcaagggcctggtggcctgcggtggcttctcctacggcgacgtgctcggcgccggcgagggctgggccaagtcgatcctcttcaacgcccgcgcccgcgacggcttccaggcgttcttcgcgcgcaaggacagcttcgccctcggcgtctgcaacggctgccagatgatgtccaacctgcacgagctgattcccggcaccgagttctggccgcacttcgtgcgcaaccgttccgagcagttcgaggcgcgggtggcgatggtccaggtgcaggagtcgtcgtcgatcttcctgcagggcatggccggttcgcgcctgccgatcgccatcgcccatggcgaaggccatgcggagttcgagtcggaggaagcgttgctcgaggccgacctttccggctgcgtgtcgctgcgtttcgtcgacaaccacggcaaggtcaccgaagcctacccggccaaccccaacgggtcgccgcgcggcatcaccgggctgagcagccgcgacggccgggtcaccatcatgatgccgcaccccgagcgggtgttccgcgccgtgcagaattcctggcgtccggacgactggcaggaagacggcggctggctgcgcatgttccgcaacgcccgggtctgggtggactga

SEQ ID NO: 319625 - DNA, 1473 bp, Pseudomonas aeruginosa
atgtttgccctgaccgcgtaccgcttacgttgcgccgcctggctgttggcgaccggcatctttctgctgcttgcgggctgtagcgaggcgaaagcccctaccgccctggagcgcgtgcagaaggagggcgtactgcgcgtgatcacccgcaacagcccggccacctacttccaggaccgcaacggcgaaaccggcttcgaatacgaactggccaagcgcttcgccgagcgcctcggcgtcgagctgaagatcgagaccgccgacaacctcgacgacctctatgcccagctttcccgcgagggcggcccggcactcgccgcggccggcctgaccccgggacgcgaagacgacgccagcgtgcgctactcgcacacctacctcgacgtaaccccgcagatcatctaccgcaacggccagcagcgcccgacccgcccggaagacctggtcggcaagcgcatcatggtgctcaagggcagcagccacgcggagcagctcgccgagctgaagaagcagtatcccgaactgaagtacgaagaatccgatgctgtcgaagtggtcgacctgttgcgcatggtcgacgtcggcgacatcgacctgaccctggtcgactccaacgaactggcgatgaaccaggtgtacttccccaacgtccgcgtcgccttcgacttcggcgaagcccgcgggctggcctgggccttgccggggggcgacgacgacagcctgatgaacgaggtcaacgcgttcctcgaccaggccaagaaggaaggcctgctgcaacgcctgaaggaccgttactacgggcatgtcgacgtactcggctacgtcggcgcctacaccttcgcccagcacctgcagcaacgcctgccgcgctacgaaagccacttcaagcagagcggcaagcagctggataccgactggcgcctgctcgccgccatcggctaccaggaatcgctgtggcagcccggcgctacctccaagaccggcgtgcgcggcctgatgatgctgaccaaccgcaccgcccaggcgatgggcgtgtccaaccggctcgacccgaagcagagcatccagggcggcagcaagtatttcgtgcagatccgcagcgaactgcccgagagcatcaaggaaccggaccgcagctggttcgccctggccgcctacaacatcggcggcgcgcacctggaagacgcgcgcaagatggccgagaaggaaggcctcaacccgaacaagtggctggacgtgaagaagatgctgccgcgcctggcgcagaagcagtggtacgccaagacccgctacggctatgcgcgcggcggcgagaccgtgcacttcgtacagaacgtgcggcgctactacgacatcctcacctgggtgacccagccgcagatggaaggcagccagatcgccgagagcgggttgcacctgcccggcgtgaacaagacgcgcccggaagaagacagcggcgacgagaaactctag

SEQ ID NO: 319626 - DNA, 585 bp, Pseudomonas aeruginosa
atggccaatgatccatacatccaatccttcacctgcttcgacggcacgcgccggctgctgacggcggcgctgccggaggtcgcgctggccttgaagcaagcggtcgccggcggtgcagccggaccgctgctggtattcgacaatgccactgggcgctccgtcgatctcgatatccgtggttccagcgaggacctgctggcgcgcctggtcgtcgcaggcgagcggcaaccggcggaggaggccgcgccgcgcgggcgcgggcggccgaagctgggcgtggtggcgcgcgaggtgaccttgttgccgcgccactgggaatggctcgccgcgcagcccgggggcgcctcggtggcgctgcgcaagctggtcgaggaggcgcgccgcagccagtccgggcgtgcgcggcaggcgcaggagcgcgcctaccatttcatgaatgcgatggccggcgacctgccgggcttcgaggaggcgacgcgggcgctgttcgccggggatcgcgagggcttcgccgagcggatcgccggctggccgaccgatgtgcgcgagcacgccgcctggctggcaagcgacggagaatcctga

SEQ ID NO: 319627 - DNA, 1257 bp, Pseudomonas aeruginosa
atgagtgatacccgggtccagcagtatcaggatcacgccggggcggaagccgtcgattcctcgggactggaggtcaagcgcctgacgttcctggaggcggtggcgatgatcgtcggaaccaacatcggcgcaggcgtgctgtccatggcctacgccagccgcaaggccggcttcatgccattgctgctctggctggcggtggctggcctgttcaccaccatttccatgctctacgtctcggaaaccgccctgcgcacgcgcacccacaaccagttgagcggccttgcccagcgctatgtcggctccttcggcgcctgggcgatcttcctgtccgtagcggtcaacagcatcggcgcgctgatcgcctacatgagcggcagcggcaagatcctcagcgccttcttcggtatcagcccggccctgggcagcgtgctgttcttcattccggccgccggcgtgctgtacttggggctgagcgccatcggcaagggcgagaagttcatcagcatcggcatggtcagcatgatcctgatcctggtggcggccaccctgctcaacgacaataccgagttcgcccgtctgctcgacggcgactggatctacatggtgccggtattcaacatcgcggtgttctgcttctccgcccagtacatcgtcccggagatggcccgtggtttcagccacgccccggagcgcctgccgaaggcggtgatcaccgggatgctgaccaccttcgtcctgctcagcatcgtgccgctctcggtgatcgccctgaccggcctggagaaccagtccgaagtcgccaccctggcctggggcaaggcgctcggcgaatgggccttcttcaccgccaacaccttcgccctgtgcgccatgctgacgtcctactggggcctgggcggtagcttcctgaccaacatcttcgacaagttccacaagctcggtccggagaaccggccgaagacccgcctgctggtgctggcgatcgtcgcgctgccgccgttcgtcctggcctacagcgggctggtcggcttcgtcaacgcgttgtacttcgccggggccttcagcggggtgattctctcgatcatgccgatcctgatgctgcgctcggcgcgtaggaacggcgacttcgagccggcctggaaatgcggctggatcgcccatccggcgatccaggcggtgatcgtgacgatctacctggccagcgccgcctacgccatttgtagcgccatgaacctgctgccggccggctggtag

SEQ ID NO: 319628 - DNA, 543 bp, Pseudomonas aeruginosa
gtgactaagctgatcagcaacggcaagggctacccgacggtaaaaggcgtgcgtccgatcatcgatcgcagccgggacccgcatttcatgcgcgaggccctggcagaggcggaaaaggccgccgccctcggcgaagtgccggtgggcgcggtcctggtgcgcgagggcgagatcatcgggcggggcttcaaccggccgatcagcagccacgatcccagtgcccacgccgaaatgctggcgatccgcatggcagcggcggaggcgggcaactaccggctgccaggcagcaccctgtatgtgaccctggaaccctgcagcatgtgttccggactgctggtgcacgcacgcatccagcgcctggtgtacggcacggtcgagcccaagtcgggcgcagtggaaagccgtgggcgattcttcgagcaggagcatctcaaccatagggtcatggtcgagggtggcgtgctggcggaagaatgcagccaggcgctctcggcgttcttccgcgcgcggcgcgaagcggcgaagaagcctcgcgaagactga

SEQ ID NO: 319629 - DNA, 1392 bp, Pseudomonas aeruginosa
atgacatttacccgtagacaagtgctcggcggcctcgccgggctggcggtggtcggcctcagcgccggcggcgcgcgcctctggctggcgcgtccgcaggtggcgcaggagtacgactacgaactgatcgccgcgccgctggacctggagatcgtcccgggcttcagcagtccggcgctggcctatggcggccagtgccccggcgtggagttgcgggcgaagcagggcgagtggctgcgggtgcgcttcaccaacaggctggacgaaccgaccaccatccactggcacggcatccgcctgccgatcgagatggacggcgtgccgtacatttcccagccgccggtgcagccgggcgagagtttcatctaccagttcaagacccaggacgccggcagctactggtaccacccgcacctgatgagcagcgagcagctcggccgcggactggtcggcccgctgatcatcgaggagcgcgaacccaccgggttccgccacgagaaggttctctgcctgaagacctggcacgtggacgagcagggcgccttcacccccttcagcgtgccgcgccaggctgcgcgcgaaggcacccgcgggcgctattcgacgatcaacggcaagcatgtgccgaccatcgacctgccggccgggcagatcgtccgggtgcgcctgctgaacgtcgacaacaccgtcacctaccgtctcaacctgcccaacggcgaggcgaggatctatgccatcgatggccatccggtggaaccgcgccgattcgaggggcagtactggatcggccccgggatgcgcctggagctggcgctgaaggtgccggaagcgggcaccgagctgtccctgcgcgacgggccggtacgcctggcgacgatccgcagcgtggccagcgccgaggctcctgccggcgactggccgaagccgttgccggcgaatccggtgagcgaaccggacctggccaatgccgagaagatcggtttccgtttcgagtgggtcggggcgatgtccgataccagcggcaagaatccctatccgtcgttctggcagatcaacggcaaggcctgggaaggcggcgaggagcacaagcacaacgcgccgccgctggccaagctcaaggaaggccagagctacatcttcgagctgcgcaacatggcgcagtaccagcacccgatccacctgcatggaatggccttcaaggtgctggattcggatcgccgggagatcatcccgtacttcaccgacacctacctgctgggcaagaacgagaccgcccgcgtcgcgctggtggcggacaatccgggcctgtggatgttccactgccacgtcatcgaccatatggagaccggcctgatggggaccatcgcggtcggcgaggcctggtgcgggtga

SEQ ID NO: 319630 - DNA, 996 bp, Pseudomonas aeruginosa
atgatcaaccgtcagatcgttctgagcgagcttccccggactgcgctcgctgtccggcattttcaggggcgcgaggtgcgttgtccggttccggccgacggtgagctgttgcttcgtgtcctgtacataccgctggacgccgccagccgggcctggatgcacggcgcgacctatcgccccggcctcgtggccggggaggtgatggcggggttggggctggccgaggtggtggaatcgcgctcggcgtcgttccagcccggcgacctggtctgtgccgagaccggctggcagactttcgcggtcgtgccggcggccgggctcatcaggctgccgcgcctggagcccctcacgcatctgctcagcgtctacggcgtagcaggcctgacggcctatttcggccttctcgaatgcgccaggccggtgcagggcgaaacgctggtagtgtctgccgccgccggtgccgtcggctctatcgtcgggcagatcgccaggatcaggggctgccgtaccatcggcattgcgggaggcgccagcaaatgcgcctggctggttcgtgaactgggtttcgacgcggcactcgactacaagacggggacgctggccgatgacttgcggcggacctgtccggacgggatcgacgcgtatttcgacaacactggcggtgcaatcctcgatgcctgcctgccgaacatggcggagcatggacgggtcgcctgttgcggcgcgatttcgcaatacgacctggaccgacccgccgccggtcctgccgggatccccgggctactcatcatcaagcgcctgacgttgcgcggattccttcttggcgactttctcgagagcagagagcgggcgctctccgatctcaaggcatgggtcgactccgggcagatcaaggtatacgaggatgtgctctacgggctggaaagcctgccggcggctctggtcggcctgttgaatggcgagaacttcggcaagcgcatcgtgaaggtagcctga

SEQ ID NO: 319631 - DNA, 915 bp, Pseudomonas aeruginosa
atggatcctctctccgaagtcctttccctggtcaacagccaggactcctccttcggcgccctgaagaccggcggcgattgggcactccgctttccggcaccggaaggtgtgaagttcaacgtggtagtccatggcgcttgcctgctggccaccgacggcatggaagagccgatccgactggaagcgggcgactgctttctggtgtcctgccgcagtccgctgctggtcggcagcgatctatcccttcccgccgccgacgccacgctgctctaccgagatgcccctgacggcgtcgcgcactatggggaaagcgaggattgtttcctgatcggcggtcgcttcgcctttggcgaagaagccaacctgctgttcgacgggctgcctccggtgaccgtcgtgaaaagcgattcggaccaggcatccgtactgagctgggcgctgcaccgactggcccatgagttttcctgcccgtcacccggtagcgcgctgatcgctcaccacctgggccacatcatgctggcgcaggtgctgcgcctctatctcgccggcgagggcagcgacacgcccagttggctgctggcgttgtccgatccgcgcataggcgcggcgatccgggcgatccacgccgagccggccaaagtctggacggtcgagcgcctggccgacgtagcgggtacctcgcgctccacgctggccctgcgtttcaagcaaaccgcgggactggcgccgctggaatatgtatcgcactggcgtatgcaattggccgctcgcgccctgcgcgacagcaaagcgacgatttcctcgatcgcgcaaaccctgggctacggctcggacagcgccttcagcaacgccttcaaacgcatcatgaaatgctcgcccagagactatcgcagccggcaggccagcagggcatag

SEQ ID NO: 319632 - DNA, 1149 bp, Pseudomonas aeruginosa
atgacctccagcagcgtagggaaaggtattgccatctccggcatgttcttcatgctcggactgtgtttcgggagcctcagctcccggatggccacgataaaagacggactccagctttccgacggggtgttcggcagtgcgcttttcgccatgtcggccggggtggtgctttcgttgccggtatccggctggatgatcgcgaagctcggcagcagaaacgttggagtaatggcgattctcacgaacgccgttctgctgtcgttggttcccttggcttctagcgtctaccagcttgctgccctgttgttcgtatcggggttctcctatagcgcggtcaatgtgtcgaacaatacccaggcaagcctgtcggaggcgctcagcggaaagaccgagttgccgttcttccacggtatatgggggttggcgggattcgtcggcgccgggttcggggcgttgatgatcgggcaggactttgccttgtccacgcatttcggcgtgatatcggtgatcgccttcctggccgccctggcctgctggcgctttctccacgaccagcctggcgcggagcgggtcgggcgggccttcgcgatgccggacaggaggcttttcaactacgggctgatcgtttttttctcgatggcctgcgaaggcatcatgtacgactggagcgtcgtctatttccaggacgtggtatcggccgagcggcaactggtcggagtcggtttcatggtattcatgggcgccatgactgtcggccggcttctgctgaaccgggtcgccgaccgtttcggtacgcgcagcaccttgcagtggagcggggggcttgccttgatcggcatggtcacgacgattgcttatccgagcctgccggcgtcgaacattggcttctgccttgtcggtctcggcatctgtaccgtcattccgctggtggcgggggccgccgcccgctcctcgagcatggcgccgagttcggctatcgcagccgttctgacgatcggattcctgggcacgttgatcggcccgccgctgatcggctttctctccgaagcgttcggcctacgttatgccttcggcgcgtgcgtggtcctggccatcgggatcatccttcgggcgggaaagataccgcggcaagctccgtcggtcgtttga

SEQ ID NO: 319633 - DNA, 963 bp, Pseudomonas aeruginosa
atggctatcaggcaaacccccatcaattcgggattcggagcgaaaacgcaggccagcgaggtgatggcggggcgagacctctccggaaagaccgccatcgtgaccggcggctactccggtcttggcctggaaaccacgaaggcgctggccgacgcgggcgcgcgggtcattgttacggcgcgcagaccggatgtggcaagggaggcgctgctcgggctcgacgaagtcgaggtgcaggcgctcgacctggccgagttggccagcgtgcgtcggttcgccgaggccttctccgcctcgcgccgtcgtgccgatatcgtcatcaacaacgccggtgtgatggcctgtcccgagacccgcgtaggcccgggctgggaagcgcagttcgcgaccaatcaccttggccactacgccctggtgaacctcttgtggccgtcgctcgcggatgacgcgcgagtggtcgccgtgtcctccgccgggcaccactactcggcgatccgctgggacgacgtgcagttcgaacggggctacgacaagtggctggcttatgcgcagtcgaagactgccaacgccctgttcgccatccagttggatgcgctgggtcgcgagaggggtgtgcatgccttcgcattgcatccgggcagcatcgccacaccgttgcaacgccatgttccacgggcggagatgatcgccctgggctggatggacgaagccggcaatccggccagccccgacacgctcaagaccccgcagcagggggctgccacccagctgtgggctgcgacctctccgctgttggcggggatgggcgggctctactgcgaggattgcgacatcgcaggcgtcgcgccggacgactcgcgcaccctggccggcgtacgcgagcatgcgatcgatccggagcaggcccgccgcctctggaggctttcggcgacgctcaccgggatcgacgcattcgcgtcctag

SEQ ID NO: 319634 - DNA, 1578 bp, Pseudomonas aeruginosa
atgaaaataaaggccgcgttgattgttgatgatctttcattgagtgagtggcaaaagcgggcgattgaagactcttctgagtatcttgatattcaattggttctcagttgtcgtaatagcgcgaccaagaaaagtgtcatcaagcattgcgggtattattttctcaatattctttccctgaagaatgatatgactcgtcgagtgcagttagactctcgtggctcagaagtcattcatttcgattctgattacgaaggggcctggcagcgcatcccggaagatgtctgcgcccgaattctggataagggaataaagctggtcatcaagtttggcatgtctctgctccgcatcgatggaggattgcagaggctggacattctttcctaccaccatggcgatccagagtactacagggggcggcccgcgggcttttatgagatctatgaaaatgcagacagcgtcgggatcatagtccagaagctctccaacaaactggacgccggcgaggtcttggtgcgcgggtactccaaggttcatcaccactcctacaagaaaacctcaagaaacttttatctgaattcggtcgtgctgcttcgcaaggcgcttgtcaattactctcggggagagcaggtggtattagaaaagctgggcaaaaactaccgtctgcccagcaatttcaccgtcttcaagtttttctgcaagactatcttccgggggcttgcccggctatcgtacggggcgtttttcgaaaaaaaatggaatgtcgttgcgcttccttacaacgatattccttcgttgcaagaattgtccgtctcagcaggaaagattccgaaggtggagaaggggtatactttctacgccgatcctttctttagtgcggacggtaagctgatacgtctcgaagccttgaatgctagcaacggtctgggtgaaatcattgaattgaaggcccagagtcttgacttttcacgtgtgatcttgaaggggaatcatttttcctatccctattcgttcgaggcgtctggtgtcgaatatctgataccggaagtcgcctctcattccgctccctgtcttctgcctcctcctttcgctctggagagcaagaagctattccagggaatggagggtgagcggattctggatggcacgcttttcgaacacgggggcaggtactacctgttctgcggccaggcggtatcaggttcggacaacctttatctttatgtcggcgagagcctggaaggaccctacacttcccatccctgtaaccctgtggtgatgaatcccggctccgcacgaatgggcgggcgtatcttcaaggagggaggaaagctttaccggttcggtcagaacaactcctatggttatggaagcagtctggccgtaaacgaaatcgaggtgctcgatccagagcattattcggagaagcgtgtagcaaacctggcgttccaggacgcacgcggtccgcataccatcgacattcatgggcaaaccatgatcctcgatttctaccaggacagattttcgcttctggcggggtatcgccgtttggtggccaggctgctcagcaagggctga

SEQ ID NO: 319635 - DNA, 1578 bp, Pseudomonas aeruginosa
atgtcccaagacattcacgcccaccgtatcctgatcctcgatttcggctcccagtacacccaactgatcgcccgccgcgtgcgcgagatcggcgtgtattgcgaaatccatcccttcgacatgagcaacgaggcgatcatcgccttcgcgccgcgcggcatcatcctcgccggtggccccgagtcggtacacgaagccgacagcccgcgcgcgccgcaggcggtgttcgacctgaaggtgccgctgttcggcatctgctacggcatgcagaccatggccgagcagatgggcggcaaggtgcagggctccgacctgcgcgagttcggctacgcccgcgtcgacgtggtcggcaaggcgcgcctgctggacggcatcgaggaccacgtggacgacgacggcgtgctcggcctcgacgtgtggatgagccacggcgacaaggtcaccgagatgccggccggcttccacatcctggccagcaccccgagctgcccgatcgccgccatggccgacgatgcccgcgcctactacggcgtgcaattccacccggaagtcacccacaccaagcagggcctgcgcattctctcgcgcttcgtcctcgacatctgcggttgcgccgcgctgtggaccccctcgaacatcgtcgacgacgccatcgccaccgtgcgcgcccaggtcggttcctccaaggtcctgctaggcctctccggcggcgtggactcctcggtggtcgccgcgctgctgcacaaggccatcggcgaccaactgacctgcgtgttcgtcgacaacggcctgctgcgcctgcacgaaggcgaccaggtgatggccatgttcgccgagaacatgggcgtgaaggtgatccgcgccaacgccgaggacaagttcctcggccgcctggccggcgtcgccgacccggaagagaagcgcaagatcatcggccgcaccttcatcgaagttttcgacgaagaagccaccaagctgcaggacgtgaagttcctcgcccagggcaccatctaccccgacgtgatcgagtcggccggcgccaagaccggcaaggcccacgtgatcaagtcgcaccacaacgtcggcggcctgccggaggacatgcagttcgaactggtcgagccgctgcgcgaactgttcaaggacgaagtgcgcaagatcggcctggagctgggcctgccctacgacatggtctaccgccacccgttccccggcccgggcctgggcgtgcgcatcctcggcgaggtgaagaaggagtacgccgacctgctgcgccaggccgaccacatcttcatcgaggaactgcgcgccttcgactggtaccacaagaccagccaggcgttcgtggtgttccagccagtgaaatcggtcggcgtggtcggcgacggccgtcgctacgcctgggtcgtcgccctgcgcgcggtggagaccatcgacttcatgaccgcgcgctgggcgcacctgccctacgaactgctggagaaggtctcgaaccgcatcatcaacgagattgccggtatctcccgggtcacctacgacgtgtcgagcaagccgccggcgactatcgagtgggagtga

SEQ ID NO: 319636 - DNA, 1470 bp, Pseudomonas aeruginosa
atgctgcgaatcagtcaagaagccctgactttcgacgacgtccttctgatccccggttattccgaagtcctgcccaaggacgtgagtttgaaaactcgcctgacccgcggcatcgaactgaacatcccgctggtatccgccgcgatggataccgtgaccgaagcccgcctggccatcgccatggcccaggaaggcggcatcggcatcatccacaagaacatgggcatcgagcagcaggccgcggaagtccgcaaggtcaagaagcacgagacggccatcgtccgcgacccggtcaccgtgaccccctcgaccaagatcatcgaactgctgcagatggcccgcgagtacggcttctccggtttcccggtggtggagcagggcgagctggtcggtatcgtcaccggtcgcgacctgcgggtgaagccgaacgccggcgataccgtcgccgcgatcatgaccccgaaggacaagctggtcaccgcccgcgaaggcaccccgctggaagagatgaaggccaagctctacgagaaccgcatcgagaagatgctggtagtcgacgagaacttctacctgcgtggcctggtgaccttccgtgacatcgagaaggccaagacctacccgctggcgtccaaggacgagcagggccgcctgcgcgtcggcgccgccgtcggcaccggcgccgataccggcgagcgcgttgccgcgctggtcgccgccggggtcgacgtggtggtggtggacaccgcccacggccactccaagggcgtgatcgagcgtgtgcgctgggtcaagcagaccttcccggacgtccaggtgatcggcggcaacatcgccaccgccgaggccgccaaggccctcgccgaggctggcgccgacgcggtcaaggtcggcatcggcccgggctcgatctgcaccacccgcatcgtcgccggtgtcggcgtgccgcagatctccgccatcgccaacgttgccgccgccctcgaaggcaccggcgtaccgctgatcgccgacggcggcatccgcttctccggcgacctggccaaggccatggtcgccggcgcctactgcgtgatgatgggctcgatgttcgccggtaccgaggaagcgccgggcgagatcgagctgttccagggccgttcctacaagtcctaccgcggcatgggttcgctgggcgccatgtccggctcccagggctcgtccgaccgctacttccaggacgcctccgccggcgccgagaagctggtgccggaaggcatcgagggtcgcgtgccgtacaagggtgccctgtccgccatcgtccaccagctgatgggcggcctgcgcgccgccatgggctacaccggcagcgccgacatccagcagatgcgcacgcagccgcagttcgtccggatcaccggcgcgggcatggccgagtcccatgtccacgacgtccagatcaccaaggaagcccccaactaccgggttggttga

SEQ ID NO: 319637 - DNA, 978 bp, Pseudomonas aeruginosa
atgaaagggagcactgacccgcattcgtcatccgcagccttgctcgcggcgttcggcgccgccgtgctggacatcaaccggctggcgcgcgacaagaccctggagcgtttccatcgcaccgcgctggaacgtctgcagcaactggtgccgttccagcgtgcctggtggggccgcgcggcgctgatcgacggcgtgccggtggagcacagcgcacacctgttcaacctcgaagagcactatgtcgaggactggaaatcgatcagccacgacgacatcaccgtcggcctggtacacgcccgcccgggcaccgccgtggccgttgacatgcaggccaccgccgggctgcgctggcttggcgcgcgtcacgacatcggtgagctgctctgcgtgatccacgtcgatccgatcacccgcctcagcgaccatgtcgccctctatcgcacgcctggcggcccgcccttcgcggaccaggagaaactgctcctcgggcaactctcggcgcacctggccgcggccgtctcggccaaccagatccgtaccctggtggccctgcgcgaatccctcgaacgccaggctctggccatggcggtatgcgatcgctacggcgtgctgcattgcgccgaacgcggcttcgtcgacctgctgctcggcgcctggccgggctggaccggcccgcagctgccggaggaaaccagcccgcagggctatcgcgatgcgcgcctggtgatcgactcgcggcaggtcggcgacctctacctgctcaccgcgcggcaaccgagcgcgatcgaacagttgagcaatcgcgaaggcgacgtcgccctgctgttcagcgaaggcaagacctacaagcagatcgcccgcgacctcggcctggcgccgaacaccgtgcgccatcacatacgcaccatctattccaagctcggcgtcaacgacaaggcgagcatcgcccacctgctgcaccagttcccgcctggctga

SEQ ID NO: 319638 - DNA, 897 bp, Pseudomonas aeruginosa
atgacccaccgcaccgcctcgatggccgcaccgaccgccagcgccctcgcgctgttcggcatccagctcctgctgggcgccgaggccggcgccgccgacctcaacgcccgcgacttcttcggcgccccggcgggcaccacgctcggcgtactctacctgccggcgacccgcgcccatgagttccacgggccggccgatcgcaacggcaaggccgaactgaagaccaacgcggtggcctaccgccaggtgttcttcagcgacatctgcggcactctctgcacgccgcagttcatcattcccttcgtcgacatcgatgcgcgcctgcccggcagcgtcgggcataccggcgagaccggtttcggcgatccccaggtcggcggcaccctgtttttcgtcaacgacccggaacggcgccgctacagcggcctgctgaccctgatcaccctgccgctgggcgagtaccacgcgaagaaccccgatgtctcgcccggcgccaaccgctggggcgccaccttcgtctacaactacacccagggcatcggccgcgactgggtgctggaagccaacctggaagcgcagttctacgcgaagaacgacgactacttcggcagcgacctggaacagaaaccgctctatcgcctgcaagccttcgcctcctacgacttcagccagagcacctacggcgccctcaagctggtgcacgccgatggcggcgaactgaagctgcagggccataccctcgacgacacccaccagcgctacacccaactcggcttcgagctaggccactggctggaccggcgcaacagcctgatgttcggtctctcgcgcaacgtcgccaccgacaatgctttccatggcagccaggccctgttgcgcctggtccatgtgttctga

SEQ ID NO: 319639 - DNA, 1158 bp, Pseudomonas aeruginosa
atgagcgcttccgacaagactctcgccagcgcctctccggcgtctggcaacctcgcgctgctcgcggcaatcgtggtgttcgccgcgatcaccccgaccatcctgatgaccgcccccgccgtcgccgcgcaactggcgacccagtggcaactgagcccggcgcgggtcggcgacctgttttcggtggagctgggcgccatgagcctggcgacgctgccggccttccattggctgaaacgcgtcgattggcgccacgcggcgctgctcgccggcctgctgttcatcgccgccaacctggcctcggcgctggccggcagctacccgctgctgctcgccctgcgtttctgcagcgccctcgccggcggctcgctgatgatcctctgcctgtccagcgccgccagcaccgccaccccgagccgggtctacgggctctgggtgatgggccaactggtggtcggcgccgtcggcctggcactgctgccggcgctgttcgaacgcttcggcctggccgcctgctacctcttgctggccggcctgatgggcctcgccctaccgttgtcgcgggccttccccagtggcagcccgccagcggaagcccgcgccagtaccggcgcggttcactcgcgactgcgggtcgggctgggtatcctcgccgtgctcaccttctatatcagcctcagcggcgtctggaccttcatcggcgccatcgccgaaggcgcggggatcggtgccggcgccagcggcgaggtactcgccggcgccaccctgatgggcatcgcgggggcggcctgcgcctccttcatcggcaaccgcctgccgcgcgacctgatgctgctcggcggctacatggcgatggccgcggcgatcctcctgctgatcggccagccgccgctggcgcgcttcgccctggccgcgctgctgttcaagttcacctggaccttcgccctgccgttcatcctcgcctgcctcgccgacctggaccgctccggccgcctgatgaacgcctccaacctggtcatcggcggcgggctggccatcggcccggcgctggcaggacgactcatcgaaggcagcggcggtttcctcccgctgctgccgatcgccgccggcctggccgccctctcgctgctgctggccctggcctgccggccacgctga

SEQ ID NO: 319640 - DNA, 1143 bp, Pseudomonas aeruginosa
atgacccgacgtaccgctttcttcttcgacgaactctgcctctggcacgccgccggcccgcacgcgctgaccctgccggtcggcggctgggtgcaaccgcctgccgccgccggacacgccgaatcaccggaaaccaagcgccggctgaaaagcctgctcgacgtgtccggcctgaccgcccgcctgcaactgcgcagcgcaccgccggcgagcgacgaggacctgctgcgcgtgcatccggcgcactatctggaacgcttcaaggcgttgagcgacgccggcggcggcagcctcggccaggacgcgccgatcggcccgggcagctacgagatcgcccggctctccgccggcctggccatcgccgcgctggacgcggtgctcgccggcgaggcggacaacgcctactcgctgtcgcggccgccaggtcatcactgcctgccggaccaggcgatgggcttctgtttcttcgccaacatcgccgtggccatcgaggcggccaaggcgcgccacggcgtcgagcgggtcgcggtgctggactgggacgtgcaccacggcaacggcacccaggcgatctactaccggcgcgacgacgtgctgagcatttccctgcatcaggacggctgcttcccgcctggctacagcggcgccgaagacatcggagaggatcgcggtcgtggcttcaacctcaacgtgccgctgcttcccggcggcggtcacgacgcctacatgcaggccatgcaacgcatcgtgttgccagcgctggagcgcttccgcccgcaattgatcgtggtcgccagtggcttcgacgccaacgcggtggacccgctggcacgcatgcaactgcacagcgacagcttccgggcgatgaccgcgatggtccgcgacgcggccgagcggcatgccggcggacgcctggtggtggtccacgaaggcggctactcggaagcctacgtgccgttctgcggcttggctgtgatcgaagaactcagcggcgtgcgcagcgcggtgcgcgacccgctgcgcgacttcatcgagttgcagcagcccaacgcggcgttccgcgacttccagcgccagcgcctcgaagagctggccgcacagttcggcctgtgcccggcgcagccgcttcaagcggccaggtag

SEQ ID NO: 319641 - DNA, 783 bp, Pseudomonas aeruginosa
atgtcctcgctcgatccgtcagtcctgttcgccgccctgccgttcagcctatggcaatggctgctggtcgaactggccatcgtcctcgcctatgtggtgttcggcatcgccggcttcggcaccgcgctggtcgccggcccgttgctggccggggtgctgccgctgtcgcagatcattccgctgctggtcctgctggatttcagcgcgtcgttcggcaactggctgccggcgcggcggcagatcgccatcactgagctcaagcgtctgctgccctgcatgctgctgggctgtgcgctgggggcgtacggacttctggcgctacgcgcggagctgctgatgctggccctcggcgtgttcgtcagtctctatgcgctctacgcgctgttcctccagccacgcggccagccgcgctggcgggcgacctgggcgttgcccttcggtgtcttcggcgggctgttcggcgcgttgttcggcagcggcggcttcctttattcgctgtacctgaacggacgcctggcgagcaaggagcagatgcgcgccacccagagcgcgctgatcggttgtagcaccttcgtccgcctggggctgttcctgctcgccgggctgtatgccgcgcgcgagccctggctgctcgccgcctgcctgctgccgggcatggcgctgggcctgtggatcggccgtcgggtgaccctgcgtctgtcgcgtgaagccttcgtccgcctggtcacctggctggtgctgtgcagcggcctggcgctggtcgggcgctacctggccgcttga

SEQ ID NO: 319642 - DNA, 909 bp, Pseudomonas aeruginosa
atgatctctttgcggcaactccattacttcgtcgaaatcgtcgagtccggcggcttcagccgtgccgccgaacgcctgttcgtcgcccagtcggcgctcagccggcaggtgcgcgaactggaggacagcatcggcaccccactgctccgccgcggtccgcgccaggtcgagctgacgccggccggtcgcgccttcctgccacgcgcgcagcgcctgctcggcgacctggaggccgcccggcgcctggctcgcgaggtcggcgaaggcggccatggcctgctgcgcctggggcactccagctcggtgccgctggtgggcggcctgcaagcggcgctgcgcggctacctcgcggcgcagagcggcgtccgcctggaactgacccagcaatcctccgagcagcaactcgccgatctcgccgaaggacgcctggaccttggcctgctgcgcctgccggtgctgcgccagcatccccggctgcacctgcgcgccctgtaccgcgagccgttgctcctggctctcgccgccgaccatccgctggcccgccgtgaagcccccgtggccctggccgccctggccggagaaaccttcgtctccattccccacctgcaacgcggcggtctcagctatcgcgccgccgaactctgcctcggcgccggtttctacccacgcccggcgcgcgcgctgtcgcgcaaaaccagccagttgcaactgatcgaggccggcttcggcgtcgccctggtgcccgcctcgatgcgcgccatcgcaccgcccgccgtgcgcttcatgtctctggccgaggccgaggcatacagcgaggtggcgctggcctggcgacgcgacgatagtcccctggtggaaggcttcgtcgaatatttcctggagaatctgccgaacgaagccaaggattga

SEQ ID NO: 319643 - DNA, 1389 bp, Pseudomonas aeruginosa
atgccgcccatgcgtaacgatcccttccaacggctcggcctcgatcgcgaggtgctgaccgtcagccaactgaaccagcgcgcccgcctgctgctggaagacgtgttcccgcaggtctgggtcgagggcgagctgtccaacctcgcccggccggcctccggccatgtctacttcaccctcaaggacagcaacgcgcagatccgctgcgcgccgttccggcagaacgccctgcgtgtacgccaggccttgcgcgacgggctggcggtaaaggtgcgcgggaagatctcgctgttcgagggacgcggcgactaccagttgatcgccgataccgtcgagccggccggcgacggcgccctgcgcctggccttcgaggcattgaaagaaaaactcgccggcgaagacctgttcgccagcgaacgcaagcgtccgctgcccgcccatccgcgccgcatcggtatcgtcagttcgcccagcggggcggtgatccgcgacatcatcagcgtgtttcgccgccgcgcaccgcaggtcgagctgaccctggtgcccaccgcagtgcagggccgcgaggccgtcgcgcagatcgtccgcgcgctgcaactggccgaccggcagggcttcgacgcgctgatcctggcccgtggcggcggttccctggaagacctctggtgcttcaacgaagaagcggtggcgcgcgccgtggcggcctgcgccacgccgatcgtcagcgcggtcggccacgagaccgacgtatcgatcagcgacttcgtcgccgacgtgcgcgcgccgacgccttcggccgccgccgaactgctggcgcccaacgccggcgacctgcagcagcgtctcgacggcctgcgccggcgcctggtgctgcgcatgcgcgaccagttgctgcgcgaacgcctgcgcctggaaggcgtcgcccgccgcctgcgccatcccggcgaacgcctgcgccagcaggcacagcgcctggacgacctggacatgcgcctgcgccgtgccttcgagcgccagctggcggtccgccacgaacgcctggtccgcctggagacgcgtctcgccgcacagcatccgggccgcaccctggcgctgctccggcagaagctcgacagcctcgccgcgcgcctgccgcgcgccgcccgcgaggtactgaaggatcgtcgtcagcgcctcgaaggactggcgcagacgctcaacgtggtcagcccgctggcgaccctgggccgcggctacagcatcctcctcgacgagcgtggccgggcgatccgcgatgccggccagacccagccgggacagcgcctgaaggcgcgcctggcggaaggcgaactggaggtgcgggtcgaggacaaccaccggacgccggtgaccctgtcgctgctggactga

SEQ ID NO: 319644 - DNA, 936 bp, Pseudomonas aeruginosa
atgatccgcctcagccagcgcgccctggcctacctcaacgaggtgatccaccacggttctcttcgccgcgccgcccagcacctgaacatcgacccctcggccatcagccggcagctcgccagcctggaggaacatctcggcgtgcgcctcctgcaacgcaccccgcaaggcgtggcgcctaccgaggccggcgagctgctggtggcgcactaccgccagcaacgggccaacgaagagggcgtgctgtcgcgtctgtcggccctgcaggggctgcgccagggcaaggtgcgcctggcggtcggcgagggcttcatcgccgacctgatctcccagccattgcagagtttcatcctgcgctaccccggcatcgagctggaggtccgcatggccggggccaacgaaggcgtggcgctggtcaaggaagacgccgtcgacctggccctggtctacgccccggtcgaggacggcgaactggacgtgcacgtcgacacccgccagcccctcgacctgatcatccccgccaaccatgccctcgccggacaccgcggtgcggtgccgatgcgcgcgctgcgcaacgagtcgctggcgttgatccacaacagcaccggcatgggccaactggcggtgatcgccgcccaactggagcgcatcgagctaaggccgaagctgcgcaccaactcggtggcggtgctgaccaatttcgtcaagtccggcatcggcgtggccttcatgccggagttgacggtcagccacgagatcgaggccgggcatatccgttgcctgccgctggcccacccggcgctgcgcgacgcccgcgcgcggatcgtcagccacaagggccgcgagctgaccgtggcggcgatcgcctgcctggaacacctgcgccgcggcatgcgcttcttcagtggcgacgcgcccgggctctcgcagcgctga

SEQ ID NO: 319645 - DNA, 1041 bp, Pseudomonas aeruginosa
atgcacacgaatccgcgccacggcctcgcccgccgcttcgccgccggactgctggccgccgccctgggcctgggcggcagcctcgcccaggccgccaccaccctcaacctgagctataacggcgccgccgacagcgagaagaacctggtgcacctgttcgccagcaacctcaagcgcctggccgaggaaaagagcggcggcgaactgcagttcaagctctaccccaacagcatgctcggcgaagaggagcagcgcatggaacaggtgatgaccggccccggcctgaacatcgcctccttcgccgggatcgccccgctgttcccggagatctacgtcagcgccacgcccttcatgttcaaggacgccgccgcggcccacgccttcttcgacagcggcagctactggcaggccgcccgcgaggccttccgcgagcgcaccggcaccgagctgctggcggtggtcgaggaaggcggcttcctcaacttcaccaacggcaagaagccgatccacggcccggcggacttccagggcctgcgcttccgcgccatggatcccagccaggtggcgctctacgaagccttcggcgcctccggcacgccgatcccctggaccgagttgtacatgggcctgcgcaccggcgtcgccgacggccagatgaacccgacctcctacatcatcctcggcagcctctaccaggtgcagaagtacctgaccctggccaacatccagtactccgaccagttcctggtggccaacggcgatctgctcgccagcctcccggcaaaggagcgccaggccctgctcgacgccgccgccgaagccacccggctgaaccgcgaggcggtcgctgcccagcaggagcgcgacctggcgttcctcaaggaaaagggcatgcagatcatccagccgtccgccgatgacctcgccgccttccgcgagaaaggccagccgtcctacctggcctggctgaagacccaggacatcgagccgcgctggaccgagatggccttccgcgacgccggtctcgccaccgccccctga

SEQ ID NO: 319646 - DNA, 495 bp, Pseudomonas aeruginosa
atgccgtcattgctcaagggcatgcgcgccgcgttgctgaacctcgccacgctgctgttgctgctcgacctggtcctgctcatctacggcgtgttcgcccgctacctgctcggcagctcgccgatctggatggacgaactggcccgctacctcatcatcggcgcagtaatgctggcgctcggcgcggtatggatggaaggcgggcacatgcgcgtcaacctgttggaacaacgcctgccgccgcgcctggcgcaggccctcaggctctaccagtggctgctggcgctggccttcttcgccttcgccgcctgggtcagcacccgctacgcgctgaacgccgggcgctttcgcagcctcggcctgggcgtcagccgcacctggccgttgctcagcctgccgctcggcttcggcctgctgaccctcatgctgttgctccaggggccctggccgcggcagccggccagcaccaccgtcgagggagggtcgcaggcatga

SEQ ID NO: 319647 - DNA, 1281 bp, Pseudomonas aeruginosa
atgatggccatcgccatgatcgcagccttcgtggtcaacctcctgctcggcctgccgctgttcctctgcctgctgctcaccgcgctggtggggttcctcttcgtcgacccggcgctgttcgccaacaccctgccgcagcgcttcttcggcggcatggacatcttctcgctgatggcgatcccgctgttcgtgctggccggcaacctgatgaaccattccggcatgaccccgcgcctgatgcgtctggccaacgccctggtcggccacttccgcggcggcctcggccacgtcaacgtggtcgccggggtgttcttcgccggggtcaacgggtccgccgcggccgacgcttcggcactcagcaccctgctggtgccggccatggaaaaggaaggctactcgcggcgcttcgccgccgggctgaccgcgggcagctcgctgatcggtccgatcatcccgccgagcatcttcatgatcctctactcctcgctgaccaacacctcggtgggcgagctgttcctcgccggggtgattcccggcctgctgctggccgccgccttcatgctgctgaacgcggtgtacgcctaccgcaacgggctgcaggcgcgccatgcggctccggcctggggcgagatcctggcggcgctgtccggcgccctgaccgcgctgatcgcgccggtgatcatcgtcgccggaatcgtcctgggactggtcacgcccaccgagtcgggcgccctgatcgctctctacgtggcgctggtcggtatgctccagcgccaactgagcctggtcgggctgtggaactcgctgcgcgagacggtacgcctgaccgccagcatctacgtgatcatcgccgccgcttcggtggtcaactggttgctcaactacgcccaggtcgccagcgagttcgcccagttgctggagccgttcggccactcgccgaccctgatgctgttcatcatcagcgcggtgatcttcgtctgcggcatgctcatggaagaagtctcggtactgatgctgctgacgccgatagtcgctccggtggcgctggccgccggcgtggatccggtgcacctggggctgatcttcaccctgaacatcaccatcgccctgatcaccccgccaatgggcgcctgcctgttcatcgtggcgaccatcagccgcctcgatatcctggaaatgttcaagggtatctggccgttcatcctcgtggccctgggggtgctgtcgctgctgatcctgttcccgtccctgaccctgtggctgccacgcctgctcaattga

SEQ ID NO: 319648 - DNA, 762 bp, Pseudomonas aeruginosa
atgaccgacttcacccaagccatccccgttctcccggagcccgactggcacgccgtggccggcatccccatcgtcgatgccggcacgccgctggaggcgctcgggctgagccgcgagttcagcgtctggccggcctaccacaagctcggcattcctcacgcgatcccggagtgccacgctcgcggcgaggtcttcgagcgtctcctgcgggtcgccgccgccctccccggcggcgtgcgcctggtggtgctggacgcctggcggccgttcgccgtgcagcagtatctctacgacagcctgtccagcgccctggccgcgcactacccacgggccggcgaggccgagctggaacggctcacccgccagttcgtctcgccgccgagcagcagccgcgaggcgcccagcccgcatctcaccggcggcgcggtggacgtcaccctgtgcgacgcccagggccgctggctggacatgggcagcgccttcgacgaagccgttccggcctcctacaccgcctacttcgaacgcctggcggagcccgacacgcgccagcgacgcgtccgcgatcaccgtcgcctgctctatcacgcgatgctcgacgccggtttcagcaacctgcccagcgaatggtggcactacgatttcggcgaccagctctgggcctggcacaccggcgcgacgcaggcgctgttcggcccggtgcagttgcaggcgatggacgcgctctggcgccagcagttgcagaagcgccctccggcggactag

SEQ ID NO: 319649 - DNA, 954 bp, Pseudomonas aeruginosa
atgtcccgccagtccgtggccgtggtggccttcgaccgcatcagtccgttccacctgtcggtgccctgcctggtgttcggccaggagtgctacgacccctgcgcgcaggccttcgacctgcgtgtctgcgccgccgagccgggccggctgcgaaccacggtggggttcaccatcgaggccgaggccgggctggaagcgctggccgaggcgcagaccgtgatcgtgccgagctggcgcgatccacacgagcgtccgccacaagcgctgctggatgcgttgatcgcggcccgtgcacgcggagcgcaactggtgggcttgtgcctgggggccttcgtgctggccgaggccgggttgctcgacggtcgccgcgccaccacccactggatgtgggcggaggatttcgccgggcgcttccctgcggtgcgggtggagcccgacgtgctgtacatcgaggacgacggcctgctgacctcggcaggcaccgtcgccggtatcgactgctgtctgcacctggtccgccagcggctcggtgcgcagactaccaatcacctggcccggcgcctggtggtggcgccgcatcgacagggcggccaggcccagttcatcgagcagccgctgccggacagtgcccaggacggccgtctcggcgagctgctggtgtggctgcggcagaacctcgaccaggcgcacagcctggacagcctggcacagcgggtgctgatgagccggcggaccttcacccggcatttccgccagctcaccggcaccaccgtcaaccagtggctgcaggccgaacgcctggccctggcccagcgcctgctggaaaccaccgagcattcggtgcaggcgatcgccgggctggccggcttcggttcggcggtgtcgttgcgccagcagttctccgccgcgttcggcctgccgccgctgggctaccggcgcgccttcgcctcctag

SEQ ID NO: 319650 - DNA, 630 bp, Pseudomonas aeruginosa
atgtccgcacgtcaacccaaacgcgccttgctggtcatcgacgtacagaacgaatacgtcagcggcaacctgcgtatcgaatttcccgccatccaatcgtcgctggaacgcatcggcgccgccatggatgccgcccacgcggcgggcatcccgatcgtcgtggtgcagcacctggcaccggcggactcgccgttgttcgcgcgcggcagccggcaggccgagctgcacgaggtggtcgcctcgcggccctaccagcacaaggtggaaaagcaactggccagttccttcgtcggcaccgggctggccgactggctgcgcgagcgcgacatcgacaccctcgccgtggtcggctacatgacccagcactgcgacgactcgaccatccgccaggcgatccacgaaggctggcaggtggaatacctgcacgacgccagcggctcggtgccctaccgcaaccgcgccggccaggccagcgcggaagagatccaccggatcttcggcatcgtcctgcagtcctccttcgccgccgtgctcagcaccgaggagtggctggaaagcctcgccggccggcacgttccggaacgcgacaacatctacgactccaaccagcgagccctggccaaccgctga

SEQ ID NO: 319651 - DNA, 573 bp, Pseudomonas aeruginosa
atgagcagcaacagatatcccttgccggcgcagaccggcctggtggtggctcccggcctgccgccgaagaactccaccctgcgtccggaccagctcaacaagcgcctgagcagcgcctggcaccatctctacgacctttgcccggaactgctgaagatcgatccgccggatggcctgaccatcctccgcggtttcctgcaatgggcggccgagcagaaggccgcctggaactgggcgatgcacctgcgcctgtactgctggctgttgcagtcgccgttcggcgccaaggtgaccgacgagcatctggaggtgctgatggacgcctccgccgcgcgttggacggtggacgacaccagcgccaaccgcggcatcctcctggccagccagggcggtgcgcacatcacccaggactggaaggcgccgcaggccggcgccggcacgcgtgtgccgctggagcgcctggacctgccggcgccgaactggacattcgcctattgcgcggtgcccgacccgcggctgcgcgagttcccgggctggaagccgttgccggcgcgcggctcgctggtcggctga

SEQ ID NO: 319652 - DNA, 477 bp, Pseudomonas aeruginosa
atgcgcacatccttctttgctgccgcggccctgctggccgtttccgctttcgcccaggcccacgagtacaacgccggccagctgcacatcgagcatccctgggcgctggccctgccgccgacctcgccgaacggcgcggcctacttcgtggtgcagaaccacggcaaggaaaacgacaccctgcttggcgccgacacgccgcgcgcggcttccgccgaggtgcacgagcatgtgcacaagaacggcatgatgagcatgcagaaagtcgacagcgtcgacgtcgcaccaggcaaggacctgcgcttcgctcccggcggctaccacctgatgctgatgggcctgaagcagccactggtggccggcgagcgcttcccgctgacgctgcatttccgcaaggccggcgacgtgccggtggaaatcgtcgtcgagtccaaggcgccggccgaacagggcgggcacgagcagcacggccactga

SEQ ID NO: 319653 - DNA, 390 bp, Pseudomonas aeruginosa
atgcccctgtcccggcgccccgtggcctggctggccagcctggccgtgctgatgaacctgttcgtggtgccgctttcgcaggcgctgacgacgcaggagcgcgcctcgttgctgctcggcggcttctgcagcacctcgtccgattcgctgctgcgcctgaagctgggtgccgcgctcaaggacatcgatcttcccgacgaccacgagagcctggccccgcacctctgctgctgcgccggcgccgccggcacgcccggactggtcgcctcctggccggcattgccgctggcgccgctggccagcccggcccgtaacgccttctccgccaccgacctgcctcccctgcgctattggcgcctcgccaatccgcgcgcttctcctgtcgcctga

SEQ ID NO: 319654 - DNA, 849 bp, Pseudomonas aeruginosa
atgccccgcaccctagccttcgtttccacgctgttgctcgccgctttctgcgccctgcccgcccaggccgacagcttcatcatgcgcctgctgaacaagccggtgcccggcggggtggcggtggtcgacctcggcgaggaaggcccgccgccgcgggccttctaccagggcaagccggtgctggtggtgcgcgaggaaggccgccgctggatcgccgtggtcggcatcccgctgagcaccaagcccggcccgcagaagctggaagtgcgagcggcgaccggcaaccacgaggaacgcttcagcgtcggcagcaagcactaccgcgagcagcgcatcaccctgaagaacaagcgccaggtcaatccgctgccggaagacctcaagcgcatcgaacgcgaactcgccgagcagaccgccgcctaccgccgcttcagtcccggcctgcccagcaacctgatgctcgacaagccggtcgacggtccgctctccagccccttcggcctgcgccgcttcttcaacggcgaagagcgcaacccgcattccggtctagacttcgcggtaccggccggtacgccgatcaaggcgccagcggccggcaaggtgatcctcatcggcgactacttcttcaatggcaagacggtgttcgtcgaccatggccagggcttcatcagcatgttctgccacctgtcgaagatcgacgtgaagctcggccagcaggtgccgcgcggcggtgtactcggcaaggtcggcgccaccggcagggccaccggaccgcacatgcactggaacgtcagcctgaacgacgcgcgagtcgacccggcaatcttcatcggtgccttccagccctga

SEQ ID NO: 319655 - DNA, 396 bp, Pseudomonas aeruginosa
atgactcacccgcttcgcctgctctggctgtgctcggcactgttcgtggtcctcggcctgggcttcgtcttcttccccggcccgctcgcctccctgctcaccagcggcgaaccgctcacccccgccgccctcaccgacctgcgcgccagctacggcggcaccagcttcggcatcggcctgctgctcggctatgccgccctgcgcccccgctacctggtgctcggcctgctcgccgccctggcggtgatcgccagcggcggcgcggcgcgtctctacggtgtgctgatcgacgcctcgccggcgctaaccaccttcctctggctcggcgccgaggcgctgctctgcgtgctgttgctggcggcactctggaagacccgccagctcgacctcgactga

SEQ ID NO: 319656 - DNA, 1416 bp, Pseudomonas aeruginosa
atgcaatcgaacgaaaagaacggccgtgacttctacgcgctggcctggcgctggcatttctacgctggcctgttcgtcgcgcccttcatgatcctgctggcgctgaccggaatcgtctacctgttcaagccgcaactggatgcgctgctctatccgcaactgctgcgggtcgaggccggtgcgcagatgcgcagcgccgaccagttgctcgccggggtgcgccaggcgcacccgcaggccgccgtcagccagtacctgccgccgagcgaggcggggcgcagcgcgcaattcgtgattggcgaagagggcaggcaatggaacctcttcgtcgatccctacagcgggcgcgaactcggccgccaggatgcgcagctgaatctccaggcggtggcccgggcactgcatggcgagctgatggtcgggaccgtcggcgaccggctgatcgagctggccgccggctggggcatcgtcctggtggtctccggtctctacctatggtggccgcgcgggcgggcggcgagcgcgctgttctggccgcgcctgcacctgcgcggacgaccgctgtggcgcgagctacatgtgctcgccggtttctggggcagcctgctgttgctcttcatgctgctcagcgggatgacctggaccggctactggggcaagcagttcgccgatgtctggaaccgtttcccggcggcgatgtggaacgatgtgccgacctccgacatgcaggccggtagcctcaacagcgcgtcgcgccagcaggtgccctggccgctggagaacactccgctgccgcgctcgcagccgccggcggccgacgcccatgccgagcatcgcgggcattccgcccaggccgggcacgcgatgccgatggacatgccgatgccggcgggcatccctctgcaaagggtggtggatatcgcccgcgagcgcggcgtggcggcgggctacgggatcgccctgccgagcgggatggagggggtctacacgatttccgtgttccccgacgatccgcgccacgacgccaccctgcacatcgaccagtacagcggcaaggttctcgccgacgtgcgttggcaggactacaacgcggtggcgaggagcgtgcagatgggcgtcgtgctgcacgaaggcaagctcttcggcctcggcaaccagttgctgatgctcgcggtctgcctggcgatcctgctcagctcggcgagcggcctgtggatctggtggaagcgcaagccggccggacgccttggcgtgccgccgctgcgccacgagctgccgcgctggaagagcggcatcgccatcatgctggcgctgggcgtggccttcccgttggtgggggcctcgctcctgctggtctgggcgctggactggctggtgctgtcgcggctgccggcggttcgccgggtcctggcttga

SEQ ID NO: 319657 - DNA, 1983 bp, Pseudomonas aeruginosa
gtggagctggcgccgagcgtggtcaccggagtcgcccagagttcgccgctgaccatcgtcaccaatcccaaggagccgcgccaaccggtgccggccagcgatggggccgactacctgaagaccattcccggcttcgcggtgatccgcaacggcggcagcaacggcgacccggtgctgcgcgggatgttcggttcgcgcctgaacatcctcaccaacggcggcatgatgctcggtgcctgtccgaaccggatggacgcgccgacctcctacatctcgccggaaacctacgacaagctcaccgtgatcaagggcccgcagacggtgctctgggggccgggcgcgtcggccgggacgatcctcttcgagcgtgagccggagcgcttcggcgaactcggctcgcgggtcaacgccagcctgctggccggctccaatggccgcttcgacaaggtgctggacgccgccgccggcaaccggctcggctacctgcgcttcaccggcaaccacgcgcagtccgacgattacgaggacggcgccgggaataccgtgccgtcgcgctggaagaagtggaacggcgacgtcgcggtcggctggacccccgacgaggacaccctgatcgaactcaccgccggcaagggcgacggcgaggcacgttacgccgggcgcggcatggacggctcgcagttcaagcgcgagagcctgggcctgcgcttcgtcaaatcgaacgtcagcgatgtgctggagaaggtcgaggcacaggtctactacaactacgccgaccacatcatggacaacttccgcctgcgcactcccgacccatccagcatgatgcccatgccgatggcgtcccaggtggaccgacgcaccctcggcggtcgcctggcggccacctggcgctgggacgacttcaagctggtcaccggggtcgacgccatgcgcaacgagcaccgcgcgcgcggctccaagtacgacatgatgaccgactactacaccgacgccgaccagttcccctggaacaaggacgcggtgttccacaactacggggccttcggcgaactgacctggttcgccgccgagcgcgaccggctgatcggcgggttgcgcctggaccgcgcctcggtcaaggactaccggcagaccctgaagtccgggcacatgggccacgccatggccaacccgacggccaacgacacccgcgccgataccctgcccagcggcttcgtgcgctacgagcacgacctcgccgactcgccgaccaccctctacgccggcctcggccatgccgagcgcttccccgactactgggagctgttctcgcccaagcgcgggccgaacgggtcggtcaacgccttcgacaagatcaagccggaaaagaccacccagctcgacttcggcctccaatacaacggcgacaagctgcaggcctgggcctccggctacgtcggggtggtccaggacttcatcctgttcagctatcgcgagggcatgatgggttcctcgacccaggcgaccaacgtcgacgcgcggatcatgggcggcgagctgggcgcttcctaccagctcaccggcaactggaagaccgacgccagcctggcctatgcctggggcaagaacagctcggacggccgcgcgctgccgcagatcccgccgctggaagcgcgcttcggcctgacctacgaggaaggcgactggagtgccggcagcctgtggcgggtggtcgcgccgcagaatcgcatcgccagggaccagggcaacgtggtcggcaaggacttcgacaagagcgccggcttcggcgtcttctcgctcaacggcgcctaccgggtgactcgcaacgtcaagctgagcgccggtgtcgataacctgttcgacaaggactacaccgagcacctgaacaaggccggcgacgccggcttcggtttttccgccaacgaaacggttcccgagccgggccggaccttctggaccaaggtcgacttcagcttctga

SEQ ID NO: 319658 - DNA, 462 bp, Pseudomonas aeruginosa
gtggcgaccactctgaaacgacaaggcatcggtgcatggctggctctgttcgccatgctgatgatcttcgtcgggccgctgatctcccagtcgatgccgatggaccacccgatgccgatgggcgtggggatgggccatgaaggcatgtcccacgagaacatggaccatggcgacatggcccatgccggctgttccgatacccagcgctccgtcgtccatgccggcatgccggggatgggcggcgaggaaggcaatcgcctggccagcgacgtgctctgggagaagtgcggttattgcagcctgttgttccacagcccgccgctcaccgaagacgcctgcctggcgctgttctccgttcccttcgcgacggcgcccgccgtcgctttcctgaacgaggcgttcgtcgcctcgccggtgtttcccggcgcccgtacccgtgcgccgccgttcctgatcgcctga

SEQ ID NO: 319659 - DNA, 1671 bp, Pseudomonas aeruginosa
atgagcatgttgaaagacccttcgcagaaataccgcccattcccggccatcaatctgcccgaccgcacctggccgtcgaagaccatcaccgaggtgccgatctggtgcagttccgacctgcgcgacggcaaccagtcgctgatcgaaccgatggacgcggcgaagaagatgcgattcttcaagaccctggtgcaggtcggcctgaagcagatcgaagtggccttcccgtcggcttccgataccgacttcaacttcgtccgcgagttgatcgaaggcaaccacatcccggacgacgtcaccatccaggtgctgacccaggcccgcgaagacctgatcacccgcaccttcgaatccctgcgcggggcgaagaaggccatcgtccacgtctacaacgccaccgccccgtcgttccgccgcatcgtcttcaaccaggacaagcagggcgtcgtggacatcgccaccaacgccgcgaaactgatcaagaagctggccgccgagcaaccggatacccagtggtcgttccagtactcgccggaaatcttcagctctaccgagctggagttctcggtggaggtctgcaacgcggtgatcgacgtctggcaaccgaccccggacaacaagatcatcctcaacctgccggccaccgtggagtgcgccacgccgaacgtctacgccgaccagatcgaatggttcggccgccacgtcgacaagcgtgacagcgtgatcatcagcctgcacacccacaacgaccgtggcaccggcgtggccgccaccgagctgggcctgatggccggcgccgaccgcgtcgaaggttgcctgttcggcaacggcgagcgcaccggcaacgtcgacctggtgaccctggccttgaacatgtacacccagggcctgcatccgcaactggacttctccgacatcgacgcggtgcgcaaggtggtcgaagagtgcaaccagttgccggtccacccgcgccatccatatgtcggcgacctggtccataccgctttctccggctcgcaccaggatgccattcgcaagggcttcgcccagcagaaggaagacgcgatctgggaagtgccgtacctgccgatcgatccggccgacatcggccgcgactacgaagcggtgatccgggtcaacagccagtccggcaagggcggcatcaccttcctgctcgaacaggagtacggcatcagcctgccgcggcgcatgcagatcgagttcagccaggtagtgcaaggcgagaccgaccgtctcggcctggaaatgaccgcacaacagatctactcgctgctggaaaacgaatacctcaaggcgacctcgccctacgtcctcgccagccatcgcctgcaggaagagaacggcaccagcgccgtcgacctggaagtctccttcgacggcgagaagcagcactggcgcgggatcggcaagggaccgctggaagccttggtggccgccctgccggtcaaggcggaaatcatggactaccatgagcacgccatcggcgccggcgccaatgccaaggccgcggcctatatcgagatccgcctggagggccagcgcccgctgcacggcatcggcatcgacgagaacatcaccaccgccagcttccgcgccctgttcagcgcgctgaaccgcgcggtgacccaggccgaggccaaggcggcctga

SEQ ID NO: 319660 - DNA, 333 bp, Pseudomonas aeruginosa
atgactacacaacgctacctgctcgatgaactggaaaccgccgacatgctcgagatcgacggtctgcacgcctggcgcttcgaactcaacgagaacctgctggaccaggcggacctggcggcggaagccgaccagccgttcgccagcgaagactgggtgctggcggtggaaagcctggatggacgcacccgtcgcgagtggcgtttttcctacaacgcggtgatggaagccgagccccaggccgatggcgagtcctggcgcctgaccacaggggagggggcgtaccagctccgttgcctgggagcggtcagcgtcagcggcgaggatgagtga

SEQ ID NO: 319661 - DNA, 456 bp, Pseudomonas aeruginosa
atgaacagcgacaccgagaatccgttccgcccaccggaggcccgcctggacgagcctgacgccacccatggcgagccgctgtacaggctttccgcgatcggtctgggtaccttcatcggcacgcccctggccggtgccttcctcgcggcggtgaatctccgtcgcctgggacgggcgcaggaagtcgggaaaacctggctggtcggcctctgcctgtttgtcctgctgccagttctgggcgcgatactgccggagaacatcccctcgatcggcttcacggtggcgcagatattcggcatggtctactacgccaaatcagccttcggtccggccctggacagccacaaggcagcgggcggagcgttcatttccaactggcgggcggcggggatcggcctgctgttcatgttggtggtcctgtcggtagcgatcccggtggtgatgctggtggtgtga

SEQ ID NO: 319662 - DNA, 951 bp, Pseudomonas aeruginosa
atgaccacacgcaaactcggcaactccggcctggagataccggcactggtattcggcggcaacgtcttcggctggactgccgacgaaagcacctccttcaggctgctggacgccctgctcgacgccggcctgaactgcatcgacaccgccgacgtctattcgcgctgggttcccgggcaccagggcggcgagtcggaaaccctcatcggcaagtggctgaaacgcaccggcaaacgcgaccgcatggtgatcgccagcaaggtcgggatggacatgggcaatggccacaaaggtctctccgccgcctatatcgagcaggccctggagcgctcgctacgacgcctgcagaccgactacctggacctctaccagtcgcacaccgacgatccccacaccgacctggaggaaaccctttccacctatggcgaactgatcaagaaaggcaaggtacgggtcatcggcgcctccaactacgacgcccggcgcctcctcgaagcacgccaggtcagcgcccggcttaacctgccgagctaccagagcctgcaacccgaatacaacctgtacgatcgcgccgactacgagaccaacctggagccgacggtggaagaactcggtatcggggtgatcagctactactcgctggccagcggcttcctcagcggcaagtaccgcaaccaggccgacaccgccgggcgagcccggggagagaaggtgaagggttatctcaacgagcgcggcgtggccatcctcgcggcgctcgacgaagtggccgagcagtacaacgccaacccgacccaggtcgccctggcctggctcatcgctcgtccgacggtgaccgcgccgatcgccagcgccaccagcctggaacagctcgacgacctgatcgccgccacccacctgaagctcgacgaacaggcgatccaccgcctggacagcgccagcgcctattga

SEQ ID NO: 319663 - DNA, 588 bp, Pseudomonas aeruginosa
atgggactgctcgattcgattctcggttcggcgctgggtggctctgaaggacagggaggtgctcgcgatccgaaagtggccctgttgatcgggctggtgaccatgctgatgtcgcgccagggcggtgcggcacagggcggtggcgatggcggtggtctgctcggttcgctgggcagcatccttggtggtgccggcggcggggccgcgagcggcgggctgggtggcgtcctcggcgatctgctcggtggcgccgcgggcggtgccgggcaggcggcgccgggcgtggaggccggctcactgggcggactcggcgggttgttccagatgctccagaacgcaggcttgggcgatgccctgaattcctggatcggcggtgggccgaaccagtcggtgtcggcggcggacatttcccgggtcttcggcgacggtcaattgcagcaactggcggactccgccggagtcagccagggcgaggcggccgaacacctgagcagcctgctgccggaattggtcaacaagctgacgccggacggccaggcgccgcagggcgacctggacatcggttcgctgctggcgcgcttcagctaa

SEQ ID NO: 319664 - DNA, 795 bp, Pseudomonas aeruginosa
atgcgcgatctgacggttctgccggacctggacatcgccctggtccaatcctccctggtctggcacgacgcccaggccaaccgcgagcatttcgccgccctgctggagagcgccgccggtgccgacctggtggtcctcccggagatgttcaccacgggtttcagcatggcttcggccgagcaggccgagcccgaactggggccgacccatgcctggctgctggagcaggcccggcgccttggcgcggtggtcaccggcagcctgatcgtccagctcgccgacggcagccatcgcaaccgcctgctctgggcgcgtccggacggcgagatgctgcactacgacaagcgccatctgttccgcatggccggcgaacacgagcactacagtcccggcgaacgccaggaactgttcgaactcaagggctggcgggtgcgcccgctgatctgctacgacctgcgtttcccggtgtggagccgcgacccgcacgacaccgacctgttgctctacaccgccaactggcccgcgcctcgtcgacagcactggaaccgcctgctgccggcgcgggcgatcgagaacctttgctacgtggtggcggtgaaccgtatcggcgaagacggcaacgccttgcgctacgctggggatagccaggtcctggacttccagggcgacagcctgttcaacgcggcggacgccgacggcgtgttccgcgtccggctggacgcggcggcactggcggcctatcgccagcgtttcccggcctacatggacgcggatcgcttcgaaatccatccttga

SEQ ID NO: 319665 - DNA, 1149 bp, Pseudomonas aeruginosa
atgattcagagcaagctgccgaatgtcggcaccaccatcttcacccgcatgtcgcaactggccgccgagtgtggcgcgatcaacctctcccagggctttcccgatttcgacggcccgccggagttgcgcgaggcggtaggtaggcatatcgccgccgggcacaaccagtacgcgccgatgaccggcttgccggccctgcgcgagcaggtggcgaagaagatcgagcagttctatggacgccgggtgagcgccgacagcgaggtgaccatcacgccgggggcgaccgaggcgatcttcagcgcgatccaggcgctggtccatccgggcgacgaagtggtggtgctcgacccgtcctacgacagctacgaaccctccgtgcaactcgccggcgggcgttgcgtgcacgtgccgctggcgctgccggacttctccatcgactggcagcgcatggccgaggccatcgggccgcgtacccggctggtcatcatcaataccccgcacaaccccagcggcgcgctgatcagccgcgaggaactggaccgcctggccgcgctgatccgcgaccgggatatctatctgatcagcgacgaggtctacgagcacctggtgttcgacggtgtcgcccataccagcgtgctgtcccacgacgagttgtatccgcgttccttcgtggtcagttcgttcggcaagacctaccacgtcaccggctggaagaccggctacgtggtcgcgccgccggcgctcagcgcggagctgcgcaaggttcaccagtacgtcaacttctgtggcgtcacgccgctgcaatgggcattggcggactacatggccggccatccggagcacttgcggcaattgcccggcttctaccaggccaagcgcgacctgttctgcgacctgctgctggactctcgcttccgttttacccgtgcgccgggcacctacttccagtgcgtggactattcggccatccgtccggacctggacgacgtggccatggccgagtggctgacccgcgaacacggagtggcggcgatcccggtttcggtgttttatgaaaaggctccggacgccatgcggctggtccggttctgttacgccaaacgcgaggagacgctgcgtcaggcagcggaaaagctatgcgcgatctga

SEQ ID NO: 319666 - DNA, 1482 bp, Pseudomonas aeruginosa
atggttcccgttattgccctggtgggtcgcccgaacgtcggcaagtccactctgttcaaccgcctgaccaagtcgcgcgacgccatcgtggcggagtacgcaggcctgactcgcgatcgccagtacggcgaggcgcgctggcagggccgcacctatatcgtcatcgataccggaggcatctccggcgatgaggaaggcattgatgcgaaaatggccgagcaatcgttgcaggccatcgaggaggcggatgccgtcctgttcctggtcgattcgcgcgccggcatgaccgccgccgaccagatgatcgccgagcacctgcgcaagcggaacaagcgcagcttcctgatcgccaacaaggtcgacaccatcgatcccgatctcgctcgcgccgagttcagcccgctgggcctgggcgatgcgctgccgatcgccgccgcccacggtcgcggcatcaaccatatgctgcaggaagccctggggatcttccccaaggacaacgcggaggaagagggcgagggcgagccggcgagcgaagaggtcgccgaaggcgaggaaccgacccggattcccggtcccagcgagaaggacgggatcaagattgccatcatcggccggcccaacgtgggcaagtcgaccctggtcaaccgcatgctcggcgaagagcgggtgatcgtctacgaccaggccggcaccacccgcgacagcatctacatcccgttcgagcgcaacgaggagaagtacaccctgatcgacaccgctggcgtgcggcgtcgcggcaagatcttcgaggcggtggaaaagttctcggtggtgaagaccctccaggcgatccaggacgccaacgtggtgatcttcgtcatggacgcccgcgaaggggtggtcgagcacgacctcaacctgctcggcttcgtcctcgagaccggccgtgccctggtcatcgccctgaacaagtgggatggcatggaggcggccgagcgtgactacgtgaagaccgaactggagcggcgcctgctgttcgtcgacttcgccgacatccatttcatttcggccctgcatggcaccggcgtcggccatctctacaagtcggtccaggagtcctttcgttcggcggtgacccgctggccgaccagccgcctgaccagcatcctcgaggacgccgtgcaggtgcaccagccgccgatggtcaacggtcgccggatcaagctgcgctacgcccacctgggcggcgccaatccgccgctgatcgtgatccacggcaaccaggtggacgcggtgccgaaggcctatacccgctacctggagaagacctaccggcgggtattgaagctggtcggtacgccgatccgcatcgagtacaagggcggcgagaacccctacgagggcaagaagaactcgctcaccgcgcgccaggtcaacaagaagcgccggctgatgtcgcaccacaagaaagccgagaagaagaagaaggacaagcgccgctga

SEQ ID NO: 319667 - DNA, 1143 bp, Pseudomonas aeruginosa
atggtgcaatggaaacacgcggcgctgctcgccctggccctggcggtcgtgggttgcagcagcaacagcaagaaggaactcccgcccgccgaactgaccgacttcaaagaggaagtcgtgttgagcaagcagtggagccgctcggtcggtgatggccagggtgacctgtacaacctgctcgaaccggccgtcgatggttccaccatctacgccgcgtccgccgaagggcgggtgatggcgatccagcgcgagaccggcgacgtgctctggaagaaggacctggaacgtccggtttccggcggtgtcggcgttggctacggcctggtgctggtgggtaccctgcgcggtgacgtgatcgccctcgacgaagccaccggcaagaagaagtggaccaagcgagtcaacagcgaagtgctgtcggcgccggccaccaacggcgacgtggtggtggtgcagacccaggacgacaagctgatcggcctcgatgcggccagcggcgaccagcgctggatctacgaaagcaccgtgccggtgctgaccctgcgcggcaccggcgcgccgctgatcgccggcaacatggccctggccggcctggccagcggcaaggtggtggcggtcgacgtacagcgcggcctgccgatctgggagcagcgggtagcgattccccaggggcgttccgaactggatcgcgtggtggacatcgacggcggcctcctgctgtccggcgacaccctctacgtggtcagctaccagggccgtgccgcggcgctggacgtgaacagcggccgcctgctctggcagcgcgaagcgtcgagctacgtcggcgtcgccgaaggcttcggcaatatctacgtcagccaggccagcggttcggtggaaggcctggactcgcgcggtgcctcttcgctgtggaacaacgacgccctggcgcgtcgccaactgtcggctccggcggtgttctccagcaacgtggtggtcggcgacctggaaggctacgtgcatctgctgagccaggtggacggtcgcttcgtcggtcgcgagcgggtcgacagcgatggcgtgcgggttcgtccgctggtggtcgggagctggatgtacgtgttcggcaacggtggcaagctcgtcgcctacaccatccgctag

SEQ ID NO: 319668 - DNA, 645 bp, Pseudomonas aeruginosa
gtgacatcgcgtaccgaagacgaagacctggcgcagatcaaggactggtggcagcgcaacggcaagcccctggtcaccggcggcatcctcgcgctggcagtggtattcggctggcaggcctggcagaagtaccagaccaaccaggcgcagggcgcctcgatcgtctaccagcaactgatcgaaaccgcgctgaatccggccggccagccggatccggcgaaggtggcggagctggctggcaagctgaagagcgagttcggcggcacccattatgcccagtacggcagcctgttcgtggccaaggtcgcggtcgacagcggcaagctggatgacgccgttgccgagctgaaggcggtcatggacaagccggccgacgccaccctcggcgaactggcgcggcagcgcctggcccgggtcctggcggcccagggcaaggtcgaggaaggcctgaagctgctcgatggcgatgccgacaaggcctacgtctcgacccgcgaggagctcaggggcgacctgctggtgcagctcaagcgcaccgacgaggcgcgcgcggcctacgagaaagccaagcagtcgctgcccgaagacggtgccggcgatgccctgcagatcaagctcgacgacctgtccaagggagaggcctga

SEQ ID NO: 319669 - DNA, 1290 bp, Pseudomonas aeruginosa
gtgagcaagtccctgcaagccattcgtggcatgaacgacatcctgccggagcagactccggcctggcgctatctggaacgcaccttcgccggcctgctggacggctacggctacagcgagatccgcctgcccatcctcgagttcaccgaactcttcgcccgcggcatcggcgaaggcaccgacgtggtcgacaaggagatgtacaccttcctcgaccgcaacggcgaatccctgaccatgcgtccggaaggtaccgccggttgcgtgcgcgccgtgctggagcacggcctgagcggcggtggccaggtgcagaagctctggtacaccgggccgatgttccgttacgagaaaccgcagaaaggtcgctaccggcagttccaccagatcggcgtggaagtcttcaacctgcccggtccggacatcgacgccgagttgatcatcctcacctggcgcctgtggcagaagctcggcatggccgacgcggtgaccctgcagctcaacaccctcggctccagcgaggcccgcgcacgctatcgcgaggccctggtggcctatctgcaggagcgcttcgagcaactcgacgaagacagccagcggcgcatgaccaccaatccgctgcgaatcctcgacagcaaggtggagagcacccaggcattgctggttggcgcgccgaccctgcacgactatctcgacgaagaatcgatcgcccacttcgagggtctcaaggcccgcctggatgctgtcggactgcgctacgaaatcaaccagaagctggtgcgcggcctggactattactgccgcacggctttcgaatgggtcaccgacaagcttggcgcccagggcaccgtttgcggcggtggccgctacgacgggctggtcagccagttcggcggcaagccgaccccgggtgtcggtttcgccatgggcgtggaacgcctggtgctgctgctggaaaccttgggggtgatccccgccgaactgaaccgtccggccgacctctacgtctgcgccttcggcgaaccggccgagctggccgccctgaccctcgccgaacagttgcgcagcgccattcccggcatacgcctgctggtcaacgccggcgccggtagcttcaagagccagttcaagaaggccgacaagagcggcgcgcgctttgccctgatcctcggggaggacgaggtggccaatcgcgtggtaggtttcaagcccctgcgtgacgagggcgagcaacaaagcattgcctgggatgctctgcccgagcacctggcagcctgtctggcacaggcttga

SEQ ID NO: 319670 - DNA, 1116 bp, Pseudomonas aeruginosa
atgagcattcatagcgcttctccgatcattcgccgcaagtctcggaaaatctgggtcggcaacgtcccggtgggcggcgatgcgccgatcgccgtgcagagcatgaccaacaccgagacctgcgacgtcgctgccaccgtcgcgcagatccgccgcctggaagatgccggcgcggacatcgtgcgggtttccgtccccgacatggacgccgccgaggcattcggcaagatcaagcagcaggtcaacgtgccgctggtcgccgacatccacttcgactatcgcatcgccctgcgcgtcgccgagctgggagtggactgcctgcgcatcaatccgggcaacatcggtcgcgaggaccgggtcaaggccgtggtcgatgccgcgcgcgagcgcaacatcccgatccgtatcggcgtcaatgccggttcgctggaaaaggacctgcagaagaaatacggcgaaccgaccccggaagccctgctcgaatcggccatgcgccacgtcgatcatctcgacaagctggacttccagaacttcaaggtcagcgtcaaggcctccgacgtcttcatggccgtcgccgcctatcgcctgctggccaggcagatcgagcagcccctgcacctgggcatcaccgaggccggcggcctgcgctccggcacggtgaagtcggcggtggggctgggcatgctcctggccgagggaatcggcgacaccatccggatttccctggctgccgatccggtcgaggagatcaaggtcggtttcgacatcctcaagtccctgcacctgcgctcccgtggcatcaacttcatcgcctgcccgagctgttcgcggcagaacttcgacgtggtgaagaccatgaacgagctggaagggcgcctggaggacctgctggtaccgatggacgtggccgtgatcggttgcgtcgtcaacggtccgggcgaagccaaggaggcccatgtcggcctcaccggcggcactccgaacctggtgtatatcgacggcaagccgtcgcagaaactgaccaacgacaacctggtggacgagctggaacggctgatccgccagaaggcggccgagaaggccgaggccgatgcgagcctgatcgcccgcggctga

SEQ ID NO: 319671 - DNA, 1044 bp, Pseudomonas aeruginosa
atgatgaaagcgccgcagcccgaagtcgtagccaccgcttcccgtcagaaccccggggaaaccctgcgccaggcgcgcgagcagaagggcctgtcgctgtcgcaggtggccgggcaactgaacctgaccgagaattcgctgcgtcagctggaaaacggcgcgttcgacaagctgccgggacacaccttctcgcgcggttacatccgcgcctacgccaagctcatgggcctcgaccaggccgagctggtcaacagcttcgaccatttcaccggcaccaatgccagcggcagcaccgtacagagcctgggacgggtcgccgagccggtgcgcctgtcgcgcaacgtgctgcgtatcgtcagcctgttgctgctcgccctgctgatcggcttcggctacttctggtggcaggagcattccgcgcgcacgccggaaaccgccggtctgagccttgagcatgtcgaagtggaaagcgccgacggcaccaccgagatccataccctggacgagcctgaagaccaggcggtgatcgaagcgcagaaggaaggcgagcaagcgcccgccgaggtttctccggaagtcgctgcccaggccgagggagcgccgccggtggcgagcgagggcgcgcaggttcccgccgctccggcccagggcacccccgccgcaccccagcagcccgttaccgccgcgcctgccggcacggctcccgctcccggtactgctccagccgttccagcgacggccagtccggccgccccgccagcgccgagcgaacctgccgccgcgcccgtggtggccggcgagggccagggggtggtcaaggtacagttcgtcgccgattgctggacccaggtcaccgacgccaacggcaaggtcctggtcagcgcgctgaagcgcaagggcgacagcctggaactggccggcaaggccccgctggagctgcgcctcggtttcgctcgcggcgcccaggtcagctacaacggccagccggtggacgtgacccccttcgtccgcggcgaaacggcccgtctgaaggtaggacaatga

SEQ ID NO: 319672 - DNA, 759 bp, Pseudomonas aeruginosa
atgactgtacgcgccgcgctggtgttcctgttggcagttgggctgacaggctgcgtgacgagcggagatcagaatcccctgaaaaccgacaagggccgtgacgaggcgcgcgacgcctatatccagcttggcctcggctatctccagcgggggaacaccgagcaggccaaggtgccgctgcgcaaggccctcgagatcgacccttccagcgccgacgcgcacgccgcgctggcggtggtgttccagaccgagatggagcccaagctggccgacgaggagtaccgcaaggcgctcgccagcgatagccgcaatgcccgggtactgaacaactacggcggtttcctctacgagcagaagcgctacgaggaggcctaccagcgtctcctggaggccagccaggacaccctctatcccgagcgctcgcgggtcttcgagaacctcggcctggtttcgctgcaaatgaagaaaccggcccaggccaaggagtacttcgagaaatccctgcgtctgaaccgtaaccagcccagcgtcgcgctggagatggccgacctgctctacaaggagcgcgagtacgtgccggctcgccagtactatgatctctttgcccagggcggcgggcagaacgcccgcagtctgttgctgggcattcgtctcgcgaaggtcttcgaagaccgcgacacggccgccagctatggcctgcagttgaaacgcctgtacccaggctctcccgaatatcaggaattccaggcggaaaaatga

SEQ ID NO: 319673 - DNA, 1140 bp, Pseudomonas aeruginosa
atgacaacgaccaccgccggcaaggtgaacctgctgggcctgacccagccgcagctggaacagttcttcgagtccatcggcgagaagcgtttccgggccggccaggtcatgaagtggattcaccactttggcgtcgacgatttcgacgccatgaccaacgtcggcaaggccttgcgcgaaaagctcaaggcctcagccgagatacgcggtcccgagatcgtcagccaggacatctccgccgacggcacccgcaagtgggtggtccgggtggcgtccggcagttgcgtcgagaccgtgtacatcccccagggcggacgcggcaccctgtgcgtgtcctcccaggcgggctgcgccctggattgcagtttctgctccaccggcaagcagggtttcaacagcgacctcaccgccgccgaggtgatcggccaggtgtggatcgccaacaagtcgttcggtaccgttccggccaagatcgaccgcgccatcaccaatgtcgtgatgatgggcatgggcgagccgctgctgaacttcgacaacgtggtcgccgccatgaacatcatgatggacgacctcggctacggtatttccaagcgcaaggtgaccctgtccacctccggcgtggtgccgatgatcgacaagctcggcgaggtgatcgacgtgtccctggccctgtcgctgcacgcaccgaacgacgagttgcgcaacaagctggtgccgatcaacaagaaatacccgctgggcatgctgctggatgcctgccgccggtatatttcccggctcggcgagaagcgcgtgctgaccgtcgaatacaccctgctcaaggatgtcaacgatcagcccgagcatgctgagcagatgatcgcattgctgaaagacacgccttgcaagatcaacctgattccgtttaatccattcccgcactccggctacgagcgcccgagcaacaatgccatccggcgtttccaggacatgttgcacaagggcggcttcaacgtgaccgtgcgtaccacccgcggcgacgacatcgacgcggcctgtggccaactggttggtcaggtcatggatcgtacccgccggagcgaacgttatattgccgtgcgccaactggccgagtccgagtcggcggcgaatcgaaattga

SEQ ID NO: 319674 - DNA, 432 bp, Pseudomonas aeruginosa
atggcactgcaacgcaccctgtccatcatcaagccggacgccgtttccaagaacgtgatcggcgaaatcctgacccgcttcgagaaagccggcctgcgcgtcgtcgccgctaaaatggttcagctgtccgagcgtgaagccggcggcttctatgccgagcacaaagagcgtccgttcttcaaggacctggtttccttcatgacttccggtccggttgtagtccaggtcctggaaggcgaggacgccatcgccaagaaccgcgagctgatgggcgccaccgatccgaagaaagccgacgccggtaccatccgcgccgacttcgccgtctccatcgacgagaacgccgtccacggttccgattccgaagcttccgccgctcgcgagatcgcctacttcttcgcggctaccgaagtctgcgagcgcattcgctga

SEQ ID NO: 319675 - DNA, 201 bp, Pseudomonas aeruginosa
atgagcctgaaatggaccgatgtgctggaaatcgccatccagctcgacgaaagcaagccggaggtcgatccgcgatacgtcaacttcgtcgatctgcggcgctgggtggtggaacttccagagttctccgacgatcctcagcgtagcggggagaaagtcctggaggccatccaggccgcctggatcgaggaacgggactag

SEQ ID NO: 319676 - DNA, 339 bp, Pseudomonas aeruginosa
atgccgcagatcgtgattctgccccatgccgaccactgccccgagggggcggtattcgaggcgaagcccggcgaaaccatactggatgccgcgttgcgcaatggcatcgagatcgagcatgcctgtgagaaatcctgcgcctgcacgacctgccacgtaatcgtccgcgaaggcctcgactccatggagccgtccgacgaactcgaagacgacatgctggacaaggcctggggtctggagcccgattcgcggctatcctgccaggcagtggtggccgacgaagacctggtggtcgagattcccaagtacaccatcaaccaggtgtcggaaggccactga

SEQ ID NO: 319677 - DNA, 1860 bp, Pseudomonas aeruginosa
atggccctactgcagatcgccgagcccggtcagagtcccaagccccatgagcgtcgcctggcggttgggatcgacctgggtaccaccaattcgctggtcgccgcggtgcgtagcggcgtcgccgagcccttgccggatgcgcagggacgcctgatcctgccttccgcggtgcgttatcacgccgagcgggcggaagtgggcgagagcgcccgcgcggccgccgcggaggatcccttcaataccgtcatttcggtcaagcgcctgatggggcgcggcctggaggacgtcaagcaactgggcgagcaattgccctaccgcttccgccagggcgagtcgcacatgcccttcatcgagaccgtacaggggttgaagagtcctgtggaggtctcggcggacatcctgcgtgagctgcgccagcgcgccgaaaccaccctcggtggcgagctggtgggtgcggtgatcactgtgccggcctatttcgacgacgcccagcgccaggctaccaaggatgccgcgcgcctggccggactgaacgtcctgcgcctgctcaacgagccgaccgccgccgccgtggcctacggcctggacaagggcgcggaaggcctggtggccatctacgacctgggtggcggaaccttcgacatttccatcctgcgcctgacccgcggtgtcttcgaagtcctggccaccggcggcgatacggccctgggcggcgacgacttcgaccatgccatcgctggctgggtgatcgagcaggctggcctttctgccgatctggacccgggcagccagcggcagttgctgcaaatcgcctgtgcggccaaggagcgtcttaccgacgaggcgtcggtccgggtcgcctacggcgactggagcggcgagctgagccgggcgacgctcgacgagttgatcgagccgttcgtcgctcgcagcctgaagtcctgtcgccgagcggtgcgcgactccggtgtcgatctggaagaaatccgctcggtggtgatggtcggtggctcgacccgcgtgccccgtgtgcgcacggcggttggcgagttgttcggctgcgagccgctgaccgatatcgatccggaccaggtggtcgccatcggcgcggccatccaggccgatgctctggccggcaacaagcgcggcgaggaattgctgctgctggacgtcattccgctgtcgctcggcctggaaaccatgggcgggctgatggagaaggtgattccgcgcaataccaccatcccggtggcgcgcgcccaggagttcaccacctacaaggacggccagacggccatgatgatccacgtgctgcagggcgagcgcgagctggtgaaggattgtcgttcgctggcgcgcttcgagctgcgcggcattccgccgatggtggcgggcgcggcgaaaatccgggtgaccttccaggtcgacgccgacggcttgctcggcgtgtccgcacgcgaactgagttccggcgtcgaggccagcatccaggtcaagccgtcctatgggctgaccgacggcgagatcgcgcggatgctcaaggactccttcgactacgccggcgacgacaaggctgcccgcgccctgcgcgaacagcaggtcgaggcgcagcggctgctggaggccgtgcagtcggcgctggacgtcgacggcgagcggctcctggacgaagaggagcgcctggccatcgcggcgcagatggacaccttgcgtgaactggccggtggtagcgacaccgcggccatcgagaaccagatcaagcgcctgtcccaggtgaccgacgctttcgccgcacggcggatggacgcgaccgtcaaggccgcgctctccggccgccggctcaacgaaatcgaggaataa

SEQ ID NO: 319678 - DNA, 522 bp, Pseudomonas aeruginosa
gtgggtaaaccctgtcatttcgcccagttcgacctgcaaccggctttcctggtcgatctcgacgagctcggccagcgctatcgcgagttggtgcgcagcgtccatcccgaccgtttcgccgacgctcccgagcgcgagcagcgtctcgccctggaacgcgcggcgcaactgaacgaggcctaccagaccctgaagagcgctccgcgccgggccctgtacctgttgaccctgagtggtcacgagttgcccttggaggctacggtgcaggatccggagtttctcctgcagcagatgcagctgcgcgaggaactggaggagttgcaggacagcgccgacctggccggcgtggcgaccttcaagcgtcggctcaaggccgcccaggccgagctggagcgtgagttcgccgcgtgctgggacgatgcgcagcgccgcgaagaggccgaacgcctggtccgtcgcatgcagttcctcgacaagctcgcgcaggaagtgcgccagctggaagagcgactcgacgattaa

SEQ ID NO: 319679 - DNA, 324 bp, Pseudomonas aeruginosa
atggccatcagcatgaccgaagccgccgccaaacacgtgcagcgctccctcgaggggcgcggcaagggcgagggtatccgtcttggcgtgcgcaccactggctgttccgggcttgcctatgtcctcgaattcgtcgatgaactggcggccgaggacctggtcttcgagagccatggcgtgaaggtcatcatcgacccgaaaagcctggtctatctcgatggcaccgagctggacttcactcgcgaagggctcaacgaaggcttcaagttcaacaatcccaacgttcgtggcgaatgcggctgcggcgaaagcttcaacgtctga

SEQ ID NO: 319680 - DNA, 387 bp, Pseudomonas aeruginosa
atggcatatagcgaaaaggtcatcgaccactacgaaaacccgcgcaacgtcggcaagctcgacgctgccgatcccaacgtcggcaccggcatggtcggcgcgccggcctgcggcgacgtgatgcgcctgcagatcaaggtcaacgagcagggcgtgatcgaagacgccaagttcaagacctacggttgcggttccgcgatcgcctccagctccctcgccaccgagtggatgaagggcaagaccctggacgaggcggaaaccatcaagaacaccaccatcgccgaagagctggccctgccgccggtgaagatccactgctccgttctcgccgaagacgccatcaaggccgccgttcgcgactacaagcagaagaagggtttgctctaa

SEQ ID NO: 319681 - DNA, 1215 bp, Pseudomonas aeruginosa
atgaaattgccgatctacctcgattactccgcgaccactcccgtcgatccccgcgtcgcccagaaaatgagcgaatgcctgctgatggacggcaacttcggcaacccggcttcgcgttcccacgtgttcggctggaaagccgaagaagccgtggagaacgcccgtcgccaggtggccgaactggtcaacgccgatccccgcgagatcgtctggacctccggcgccaccgagtccgacaacctggcgatcaagggcgtcgcgcacttctactcgggcaagggcaagcacatcatcacctcgaagatcgagcacaaggcggtcctcgacacctgtcgccagctggagcgcgaaggtttcgaagtgacctacctggagccgggcgaagatggcctgatcactccggctctggtcgaggcggcgctgcgtgacgacaccatcctggtctcggtcatgcacgtgaacaacgagatcggcaccgtcaacgacatcgccgccatcggcgagctgacccgctcccgcggcgtgctgttccacgtcgacgccgcacagtcgaccggcaaggtcgagatcgacctggacaagctcaaggtcgacctgatgtccttctccgcgcacaagacctacggcccgaaaggcattggcgcgctctacgtccggcgcaagccgcgcgtccgcatcgagggtcagatgcacggtggcggccatgagcgcggcatgcgttccggcaccctggccacccaccagatcgtcggcatgggcgaggcgttccgcatcgccaaggaagaaatggcccaggagaacgcccgcgtgctggcgctccgcgaccgcttcttcgcgcagatcgacggcctggaagagctctacatcaacggcagcatgacctcccgcgtcccgcacaacctcaacgtcagcttcaactacgtcgagggcgagtcgctgatcatggcgctcaaggacctcgcggtctcctccggttcggcctgtacctcggcgtccctggaaccgtcctacgtattgcgcgccctgggccgcaacgacgaactggcgcatagctccatccgcttcaccttcggtcgcttcaccaccgaggaagagatcgactatgccgcgaagaaggtggtcgaggccgtttccaagctgcgcgaactgtcgccgctgtgggatatgtacaaagagggcgtcgacctgtcccaggtcgaatggcaggcgcactga

SEQ ID NO: 319682 - DNA, 492 bp, Pseudomonas aeruginosa
atgcgtctgaccaccaaaggccgctacgccgtaaccgccatgctcgacctggcgctgcatgctcagcaaggtccggtctcgctggccgatatttccgaacgccaaggcatttccctgtcctatctcgaacagctgttcgccaagttgcgccgtggcaacctggtgaccagcgtgcgcggcccgggcggcggctaccagctgtcccgccatatgtcgggcatccatgtggcgcaggtgatcgacgcggtcaacgaatccgtcgacgcgacccgctgccaggggcagggcgattgccactccggcgatacctgtctgacccaccacctgtggtgcgacctcagtttgcagatccatgagttcctcagcggcatcagcctggccgatctggtcagccgccaggaggtccaggaggtcgcgctgcgccaggacgaacgccgttgctcaggcaagacgcctcgtctcgacaagattgaagcgtccgccatcgactga

SEQ ID NO: 319683 - DNA, 777 bp, Pseudomonas aeruginosa
atgttcgaacgtgtgcgtgaagatatccaaagcgtattccaccgtgatccggcggctcgcaacgcactcgaggtcctcacctgttatccgggcctgcacgccgtctggctgcatcggctggcccacggcttgtggacgtccggctggaagtggctggcgcgcctggtgtccaatttcggccgctggatgaccggcatcgagatccacccgggggccaggatcggccggcgcttcttcatcgaccacggcatgggcatcgtcatcggcgaaaccgccgagatcggcgacgacgtcaccctctatcagggcgttaccctgggcggcaccacctggaacaagggcaagcgccaccccaccctcggcaacaacgtagtggtcggtgccggtgccaaggtgctcggcccgttcaccgtcggcgagggcgccaaggtcggctccaacgccgtggtgaccaaggaagtcccgccgggtgccaccgtggtcggcattcccgggcggatcatcatgcgcgaggactccgagcagcaggccaagcgccaggcgatggcggagaagctcggcttcgatgcctatggggtcagccaggacatgccggacccggtggcgcgtgccattggtcagttgctcgatcacctgcaggccgtcgacggccggctcgagggcatgtgccaggcgctcaccgccctgggtagcgactactgcgcgaaggacctgccggtattgcgcgaggaagatttcgccggagtcaaggacgaggacggcaatccggccgcgtaa

SEQ ID NO: 319684 - DNA, 774 bp, Pseudomonas aeruginosa
ttgctcgaccgtattcgtgtggtgttggtcaacaccagtcatcccggcaacatcggcggggcggcccgtgccatgaagaacatgggcctgtcgcaactggtgctggtgcagccggaaagctttccccacggcgacgcggtggcgcgggcttccggcgccaccgacatcctcgacgccgcaagggtggtggacaccctggaagaggccctgagcggctgcagcgtggtgctcggcaccagcgcccgcgaccggcggattccctggccgctgctggatccgcgcgagtgcgcgacgacctgcctggagcacctggaggcgaatggcgaggtggccctggtattcgggcgcgaatatgcgggtttgaccaacgaagaattgcagcgctgccagttccatgtgcatatcccctccgatcccgagttcggctcgctgaacctggcggccgcggtccaggtgctcacctacgaggtgcgcatggcgtggctggcggcccagggcaagccgaccaagatggaaaagttcgagtccacctcgatgctcaacaccgagctggtgacggccgacgagctggaactctattacgcgcatctggagaggacgctgatcgatatcggcttcctcgatccggagaagccgcgccacctgatgtcgcggttgcggcgcctgtatgggcgcagcgcgatcagcaagctggaaatgaatatcctgcgcgggatcctgaccgaaacccagaaggtggcccgaggcctgtcctacaagcggagtgacgactga

SEQ ID NO: 319685 - DNA, 816 bp, Pseudomonas aeruginosa
atgcagcctatgctgaatatcgccctgcgcgccgctcgcagcgccggtgaactgattttccgctccatcgaacgcctggatgtcatctcggtcaacgagaaggatgccaaggactacgtgaccgaagtcgatcgcgccgccgagcagaccatcgtcgccgcgctgcgcaaggcctatccgactcacgcgatcatgggcgaggaaggcggcttcatcgaaggcagcggcgagggcgccgattacctctgggtgatcgatccgctggacggcaccaccaacttcatccatggcgtaccgcacttcgccgtgagcatcgcctgcaagtacaagggccgcctggagcacgccgtggtcctcgacccggtacgccaggaagaattcaccgccagccgcggtcgcggcgccgccctcaacggtcgccgcctgcgcgtcagcggccgcaagagcctggaaggcgccctgctcggcaccgggttcccgttccgcgacaaccagatcgacaatctcgacaactacctgaacatgttccgcagcctggtcggccagaccgccggcatccgccgcgccggcgccgccagtctggacctggcctacgtcgccgccggacgctacgacgccttctgggaattcggcctgtccgaatgggacatggcggcaggcgccctgctggtacaggaagccggcggcctggtgagcgacttcaccggcagccacgaattcctcgagaagggtcacatcgtcgccggcaacaccaaatgcttcaaggcactgctgaccaccatccagccgcacctgccgccgtcgctgaagcgctga

SEQ ID NO: 319686 - DNA, 549 bp, Pseudomonas aeruginosa
gtgaacaagtcgatgctcgtcggggccgttctgggtgccgtaggcgtgaccgcaggtggcgcggtagccacctatagcctggtggatcgcggtcccgactacgccgaggtcgtcgctgtccagccggtcaaggaaaccatcaagacgccgcgccaggtctgcaaggacgtggccgtgacccgccagcgtccggtcaaggaccagcaccagatcgccggtaccgccatcggtgcggtggtcggcggcttgctgggcaaccagatcggcggcggtaccggcaagaagatcgccaccgtggccggcgccgtcggcggcggctacgccggcaacaaggtgcaggaaggcatgcaggagcgtgacacctacaccaccaccgaaacccgctgcagcaccgtgcacgacagcagcgagaaggtcgtcggctatgacgtgaagtacatgctcgacggcaaggccgggcagatccgcatggagcgcgatccgggcagccagatcccggtcgacaagaatggccggctgatcctcagccagggcgaaacgctgcgctga

SEQ ID NO: 319687 - DNA, 921 bp, Pseudomonas aeruginosa
atgaatatcaagatcggtaccatcaacttcatgggcatccgcaacgtcgcgtttgccgtcaccctgatcctgaccgtcatcgccctgggcagctggttcaccaagggcatcaacttcggcctcgacttcaccggcggtacgctgatcgagctgacctacgaacaaccggccgatctcggcaaggtgcgtggtcaactggtcggcgccggctacgaggacgccgtggtgcagagcttcggcgacgcccgcgacgtgctggtgcggatgcccagcgaggacccggaactgggcaagaaggtcgctaccgccttgcagcaggccgatgccggcaacccggcgaacctgaagcgggtcgagtacgtcggcccgcaggtgggtgaagaactgcgcgaccagggcggcctcggcatgctcctggcgctgggcggcatcctgctgtacgtcggcttccgcttccagtggaagttcgccctcggtgcgatcctctcgctggtgcacgatgcgatcatcgtgatgggcgtgctgtcgttcttccaggtgaccttcgacctgaccgtcctcgccgctgtgctggcggtggtcggttactcgctgaacgacaccatcgtgatcttcgaccgggtgcgcgagaacttccgcgtgctgcgcaaggccgatctggtcgagaacctgaacatctccaccagccagaccctgttgcgtaccatcgccacctcggtttccacgctgctggctatcgccgcgctgctgttcttcggcggcgacaacctgttcggtttctccatcgccctgttcgtcggtgtaatggcgggtacctactcgtcgatctacatcgccaacgtggtattgatctggctgaacctgaccagcgaggacctgatcccgccgcaggccaaggacaccgtcgacgatcgcccctga

SEQ ID NO: 319688 - DNA, 1863 bp, Pseudomonas aeruginosa
atgctcaacaagtatcctctgtggaaatatctgctgatcctggcggtcctcgccgtcgggttcatctattccgcacccaacctctacccggacgacccggcggtgcagatcagcggcgccagcacggcgctgcaggtcacccaggccgatgtcgaccgcgctgccaaggcgctgaccgacgccggtatcgcggtgaaggccgacagcctgtcgaagaagggcggcctgatccgcctggtcaagcaggacgaccagcttcccgccaaggaagtggtgcgccggaccctgggcgacgactacgtggtggcgctgaacctggcccagaccactcccgagtggctgcgcaagctgggcggcagcccgatgaagctcggcctggatctgtccggcggtgtgcacttcctgctggaagtggacatggacaaggcggtcgatgcccgcctgaaggtctatgaaagcgaagtgaagagcctgctgcgcaaggagcgcgtgcgctaccgcagcctgccgatccaggatcgcgcgatccagctcggtttcaccgacagcgaatccctggacaaggcgcgcagcctgatcgccaaggacttccgcgatttcgaggtcgtgcccgaagagcgcaacggcctgcaggtcctgcgcgtcgccctgacccaggccaaactggcggaaatccgcgaatactccatcaagcagaacctcactaccgtccgcaaccgggtcaacgagctgggcgtatccgagccgctggtgcagcgccagggcgccaatcgcatcgtggtcgagctgccgggcgtgcaggacaccgcggaagccaagcggatcctcggcaagaccgccaacctagaattccgcctggccgccgagccggacgccctgaagtccgccaccgagaccttcgagttccgcgagccgcgccggccgccggtgccgctggagcgcggggtgatcatcaccggcgaccaggtcaccgacgccagcgccagtttcgacgagaacggccgcccgcaggtgaacatccgcctggatggccatggcggcgagctgatgaaccgcgccacccgcaacaacgtcggccgcagcatggcggtggtgttcatcgagcagaagccggtgacccgctacaccaagcagatggtcgatggcgtcgagaaggaggtcgcggttccggcgttcaaggaagagaagcagatcatcagcctggcgaccatccagtcgccgctgggcaaccagttccgtatcaccggcctcgatggcccgggcgagtcctccgagctggccctgctgctgcgtgccggcggcctggctgcgccgatgtacttcgccgaagaacgcaccatcggcccgagcctgggggcggacaacatcgccaagggtatcgatgcgtcgctctggggcatgctcttcgtatcgctgttcatcatcgtcatctaccgtttcttcggcgtgatcgccaccgttgcgctggccttcaacatggtcatgctggtggcgctgatgtcgatcctcggcgcgaccctgaccctgccgggcatcgccggtatcgtgctgaccatgggcatggcggtggacgccaacgtgctgatcttctcgcggatacgcgaggaactggccaatggcatgtcggtccagagggcgatccacgaaggcttcaaccgtgccttcaccgcgatcctcgacgccaacctgacctcgctgctggtcggcggcatcctctacgccatgggcaccggcccggtgaaaggatttgccgtgaccatgtcgctcggcatcatcacctcgatgttcacggccatcatggtcacccgcgcaatggtcaacctgatcttcggcgggcgtgacttcaagaagctgtggatctaa

SEQ ID NO: 319689 - DNA, 339 bp, Pseudomonas aeruginosa
atgagctttctaattcccgctgcctacgccgacgcagccgctccggcagccgctggcccggccggcaccggtttcgagtgggtcttcctggttggtttcctggtcatcttctacctgatgatctggcgtccccaggccaagcgcgccaaggaacacaagaacctgctgggcaacctgcaaaaaggtgacgaagtcgtcacttccggcggtatcgccggcaaggtgaccaaggtcgccgacgatttcgtcgtcgtcgaggtttccgacaacgtcgagctgaagttccagaaggccgcgattgccgcgaccctgccgaaaggcaccctgaaagcgatctga

SEQ ID NO: 319690 - DNA, 1128 bp, Pseudomonas aeruginosa
atgagcttcatgaacttcgagctgctggcgaccgacggcaaggcccgtcgcggccgcctgaccttcccccgcggcgtggtcgagaccccggccttcatgccggtgggcacctacggcacggtgaagggcatgttgccgcgcgacatcgaggacatcggcgcgcagatcatcctcggcaacaccttccatctctggttgcgcccgggcaccgaggtgatccagcgccacggcgacctgcacgacttcatgcagtggaaaggcccgatcctcaccgattccggcggtttccaggtgttcagcctgggagccatgcgcaagatcaaggaggagggcgtgaccttcgcctcgccggtggacggcgccaaggtcttcatggggccggaggagtccatggcggtgcaacgcgccctgggctcggacatcgtgatgatcttcgacgaatgcacgccgtacccggccgaccatgacgtcgccaagcgctccatggagctgtcgctgcgctgggccaagcgctcgaagatcgcccatggcgatagcccgtcggcgctgttcggcatcgtccagggcggtatgcacgaggacctgcgcctgcgctcgctggatggcttgcaggagatcggcttcgacggcctggccatcggtggtttgtcggtgggcgagccgaaggaagagatgatccgcgtgctcgatttcctgccgccgcagatgccggccgacaagccgcgctacctgatgggcgtgggcaagccggaagacctggtggaaggcgtgcgccgcggcgtggacatgttcgactgcgtgatgccgacgcgcaatgcgcgcaacggccacctgttcgtcgacagcggggtgatcaagatccgcaactcggtacacaagcacgacgactccacgctcgacccgacctgcgactgttacacctgcaaacatttttcccgcgcctatctgcaccacttggacaagtgcggggaaatgctcggtagcatgctcaataccatccacaacttgcggcattatcagcgggttatggctggtttgcgcgaggcaatccaacagggtacattggccgcctttgtcgatgccttctatgccaagcgcggccttcccacgccgccgctggatgcctga

SEQ ID NO: 319691 - DNA, 1044 bp, Pseudomonas aeruginosa
atgcgtgtcgccgattttcatttcgacttgcccgaggccctgatcgcccgtcatcccctgcctgaacgccgcgcaagccgcctgttggcgctggatggcccgacgggaaccctcgcccacagacaattcgccgatctcctggactacctgcgtccgggcgacctgatggtgttcaacaatacccgggtgatcccggcgcgcctgttcggccagaaggaatccggcggcaagctggaagtcctggtcgagcgcgtgctcgaccagcaccgggtgcttgcccacatacgcgccagcaaggcgcccaagcccggcacgcggatcctcgtcgaaggcggtggcagcgcggagatgctgcaacgccacgacgccctgttcgaactcgcgttcgccgaacccgtgctgcctttgctggagcgggtcgggcacatgccgttgcctccctatatcgaccgaccggacgatgcggccgaccgcgagcgctaccagaccgtctacgcccagcgcgccggtgcggtggcggccccgaccgccggcctgcacttcgatgaggcgctgctcgaggcgatccgcgcgaagggggtggataccgccttcgttaccctgcatgtcggcgccggtaccttccagccggtgcgtgtcgagcgtatcgaggaccatgtgatgcaccgcgaatggctggaggtcggccaggacgtggtggacgcggtttccgtctgccgggcccgcggcggccgggtagtcgccgtcggcaccaccagcgtgcgctcgctggaaagcgcggcacgcgacggtgagctgaagcccttcagcggcgacaccgacatcttcatctacccgggccggccgttccatgtggtcgatgccctggtcaccaacttccacctgcccgaatccaccctgctgatgctggtctcggccttcgccggctacccggagaccatggccgcctacgccgcggcggtggcgcagggctatcgcttcttcagttacggtgatgccatgttcatcacccgcaatcccgcgccccgcggacccgaggactga

SEQ ID NO: 319692 - DNA, 1581 bp, Pseudomonas aeruginosa
atgccgattccggtgaagcgagccaggagaaaggcgctccggctgtcgttgtccgtgctggtcggggtgatgccgatcgtcctggggctgctcatcctctactggcaggccgagcgaagcctccaggagacgtccgagcaggcagccgggaatgcggtgcggcagttcgaacggatgctcgacaacgctgcgttggcggcgcgcaaggtcatgccggtggcggggcgtccttgtcccgaggccgagctggcgctgcgcgagcaagtggcgatcatgccgttcgtgcgctcggtcaatttgacgcgcgacaatacgatctattgcacgtcgttgttcggcggcttcgacgagccggtgcggatcgagaactatgtcgacggacgcctcttgctgatgcccggcaaccaggtcacgccggacgccgcgctgctggtcctgcgggacttcgacggcaagcgcggggtattggcggcgatcgacgggcgctacttgagctacgtgctggacctcgtcgaccgacgtagccgacaggtgctggtggtcggtcccaattggctggatgccgagggccgcactcaccgcgacgcgccgcccacctatgaggtcgccgccgtatcgctcgcttcgcagcgttatccgttgcgggtgctgtcgggcttccccgagggcgaggaatggcgatcgatccgctcgcagaacccggcgatgttcggcctgctactgttcttcggactgctggccggcactctgtgctactggctatccaggcgggtcgcctcgcccagcagcgaactgcgccgggccctggaggccaacgagttcattccctactaccagccgctgagtcccggccagggtggacgctggataggcgtcgaggtgctcatgcgctggcgtcatccgcgcgagggactgatccggcccgacctgttcatacctttcgccgagcgctcgggactgatcgtaccgatgacgcgcgcgctgatgcgccaggtcgcggaagacctcggcgggcatgccgggaagctggagccgggcttccacatcggtttcaacatcagcgccacccattgccacgatctggccttggtggacgactgtcgcgagctgttggcggcgtttccgcccgggcacatcaccctggtcctggagctgaccgagcgcgagctgatcgagtcgagcgaagtcaccgaccgcctgttcgacgaattgcatgccctgggagtgaagatcgccatcgacgatttcggcaccggacattccagcctggcctacctgcgcaagttccaggtggactgcctgaagatcgaccagagcttcgtcgcccgcatcggcatcgatactctttccgggcatattctcgacagcatcgtcgagctgtccgccaagctcgacctggatatcgtcgccgaaggcgtggagacccccgagcagcgtgactacctggccgcccgcggggtggattacctgcagggctacctgatcggccggccgatgccgctggagagtttgctttccagcctgactgtgcaggaggggcaggacgcttccgtcgtcgcacttccggcggaccgaggctag

SEQ ID NO: 319693 - DNA, 498 bp, Pseudomonas aeruginosa
atgccgaaacacatgctttctccccagggcgactatgcccctgccggtctggtccgccgcctggcggcgatgttctatgacttcctgctctgcgtggcgctgatgatggtggtcaccctggtctaccagcaaggcatccttcgactgatctacggcagcgaccatctgcgcgaactggccgaccgcggcgcgctgatcggcgacccgctgctctcgaccctgctggtgttcgccctgttcggcttcttcgccaaattctggacccacaacggccagaccctgggcatgcaggtctggggactgcgcgtgcagaaccgcgacggcagcgccatcagcctgctccaggcgctgctgcgcttcatgatcgccatcgcctcctggctgtgcctcggcctcggcttcctctggatgctctgggacaaggacaagcgtacgtggcacgaccgctattcggagagccaggtggtcaggctgccgaagaacactcacaagaagtga

SEQ ID NO: 319694 - DNA, 1068 bp, Pseudomonas aeruginosa
atggttaagctcgatcgttacatcggtgtcaccgtcttcgtcgcgatcctcgcggtgctcggggtgatccttggcctggcgctgctgttcgccttcatcgacgaactcaacgacatcagcgccagctacggcatcggcgacgccctgcgcttcatcttcctcaccgcgccacggcgcgcctacgacatgctgccgatggcggcgctgatcggctgcctggtcggcctcggcaccctggccagcaacagcgaactgaccatcatgcgcgcggccggggtatccctgtcgcggatcgtctgggcggtgatgaaaccgatgctggtgctgatgctggccggcatcctggttggcgagtacgtcgcgccctggaccgagaacatcgcccagagcggccgcgccctggcccagggcggcggcgattcgcaaagctccaagcgcggtctgtggcatcgccaggggcgcgagtacatccacatcaacgcggtgcagcccaatggtgtgctgtacggcgtgacccgctaccgcttcgacgagcagcgtggcctggaatcggccagtttcgccaagcgcgcgcgcttcgagaccgatcactggcaactggaagaggtcaccaccaccttgctgcatccgagggaaaagcgttccgaggtggtcaagctaccgaccgaacgctgggatgcccagctcagcccgcaactgctgaacactgtggtgatggagcccgaggcgctgtctatcagcggtctctggcagtacatccactatctcgccgaccagggcctgaacaacaaccgctactggctggcgttctggaccaaggtcctgcaaccgctggtgaccgccgcgctggtgctgatggcgatttccttcatcttcggtccgttgcgctcggtgaccctgggccagcggatcttcaccggcgtgctggtgggcttcgtcttccgcatcgcccaggacctgctcggaccctccagcctggtgttcgacttcccgccgctgctggcggtggtgatccccgcctcgatctgcgcactggcgggtgtctggctgctacgccgggcgggctga

SEQ ID NO: 319695 - DNA, 1119 bp, Pseudomonas aeruginosa
ttgatcgttttccgttatttgtcccgtgaagtgctggtcaccatgagcgccgtcagcgccgtgctgctggtgatcatcatgagtggccgtttcatcaagtacctggcgcaagcggcgcaggggttgctcgaccccggttcgctgttcctgatcatggcgttccggattcccggcttcctgcagctgatcctgccgcttggcctgttcctcggcatcctgctggcctacgggcgactctatctggaaagcgagatgaccgtgctctcggcgaccggcatgagccagaagcgcctgctcggctataccatggccccggcgctgctggtggcgatcctggtggcctggctgagcctgttcctggcgccccagggcatcaaccagttcgccctgctgttgaacaagcaggataccctgaccgagttcgacaccctggtcccgggccgtttccaggcaatgcgcgacggtacccgggtgacctataccgaggaactgtcgaaggatcgcggcgaactggccggcatcttcatttcgcagaaggacctcaacagcagcaaccaggaacgcggcatctccatcctggtggcggagaagggcacccagaacatccaggcggatggcagccgttacctgatcctgcacaacggctaccgctacgacggcaatcccgggcaggccaactaccgggcgatccagtacgacacctatggcgtgatgctgcccaagcccgaggccagcagcgaggtgagcgagcgtgacgcggtgcccaccgccgacctgttcggcagcgacaacccacgctaccaggccgaattgcagtggcgcctgtcgacaccgctgctggtattcgtggtgaccctgctggcggtgccgctgtcgcgggtcaacccacgccaggggcgcttcctcaagctgctgccggcgatcctcctttatatgggctacctggccctgctgatcgctgtccgtggccagttggacaaaggcaagatccccatggccatcggcctgtggtgggtccacggactattcctggcgatcggtcttcttctgttctactgggaacccttgcgcctgaagctggcgtcctcccgtgccggtcgcgaggtggcgcatggttaa

SEQ ID NO: 319696 - DNA, 924 bp, Pseudomonas aeruginosa
atgcaacgactgaacgtggaattccgctccgagggtgtcgccctgcgcggctggctgtatttgccggaagcgcgtgccgagcggccggcgatcgtcatgacgcacggtttttccggggtgaaggagcagtacctgggccgttacgccgaggtattcgccgccgccggcttcgtcgtgctcctctacgatcatccgaacttcggcgacagcgacggcgaaccgcgccaggaactcgatccggtgatgcagcgtcgcggctatcgcgacgcgatcacctggttgggcgcccaggcccgggtcgacgccagccgcatcggcatctggggaaccagctacagcggcggacatgtgctggaagtggccgcactggatcggcgggtgaaatgcgtggtggcgcaggtgccgaccgtcagcggccatgcctcggcgttgcgccggacccgcgccgagcagttgccggcattgctggcaagcttcgacgcggaccgccagcggcgcttcgagggcttgccgccggcgctgttgccggcggtcgccgcgagtcccgacgagccttgcgcgatggccggcgcggacgcccaccggttcttcaccgacagcgcggcgctggcaccgaactggtgcaaccgggtgaccctgcgtagcgccgagctggcgcgagagaacgagccgggcattcacattgggcggatcagccccacgccgctgctgatgatcgtcgccgaccgggacctgcttacgcccacggacctttgcctggaggcctaccagcgggcgttgccgcccaagcggctgctgatgctcgccggcggccatttcacgccgtacatcgagcatttcgacgccaccagccaggctgcggcagactggttcgtccgtcatctcggagagggcggcgagcagccagcgacagtcgtcgaataa

SEQ ID NO: 319697 - DNA, 813 bp, Pseudomonas aeruginosa
gtgcccgccagcaaaccagtcgcggatcccgcccggagtaccgacccacgcgattaccagcgagtcggccggccgctcggggtcatggccaagaccttcccggcggggttcgtggtcgccgagcaccggcacgagcgggcgcagttgatccatgccctgtcgggcgtgatcgaactgcatgtcggtcgcacgctatggctggtcccgccgcagcgcgcggtatggatgccggcggggatggcgcacgcgatgctggcgcgcggcgaggtccgcttgcacactgtctatgtccggccgcagtcctgcccgccggaattcccccgggtgccgcgcggagtgatggtcagcccattgttgcgcgagttgatcgtgcgcgccgccggcctgccgttgttgtacgacgagcgcggccgggaggggcggttgatggcggtgctgctggacgaactggagtggtcgcgggaacagcccctggccttgcccgaccccgcagaccgacgcctgggaagaatctgccaggcgctgctggagaacccggccgaccctcgcgggctggaggagtgggcgcgctgcgtgggggcgtcctcgcggaccctggcacggctgtttctctccgaactgggagtgaccttcgtccattggcgccaccaggtgcgcctggccgccgccctgccacgcctggcggctggcgaagcggtggcgcggatcgccgtggatctcggctaccagacgcccagcgcattcagtgccatgttccgacgcctgaccgggagcacgccgagccgctacttcgccttgtccgattcggcgtag

SEQ ID NO: 319698 - DNA, 1488 bp, Pseudomonas aeruginosa
atggaattccttgttaaaagcgtacgcccggaaaccctgaaaaccgccaccctggtactcgccgtaggcgaaggccgcaagctcggcgccagcgccaaggcggtcgacgacgccaccggcggcgccatcagcgcagtgctcaagcgtggcgacctggccggcaaggtcggccagaccctgctcctgcagagcctgcccaatctcaaggccgagcgcgtgctgctggtcggcgccggcaaggagcgcgaactgggcgaccgccagtaccgcaagctggcctccgccgtgctgtcgaccctcaagggcctggccggcgccgatgccgcgctggccctcggcgatctcgcggtgaaaggccgcgatgcccacgcgaaggcgcgtctgctggtggaaaccctggccgatggcctgtacgtgttcgatcgctacaagagccagaaagccgagccgctgaaactgaagaagctgaccctgctcgccgacaaggccgacagcgccgccgtcgagcaaggcagcaaggaagcccaggccatcgccaatggcatggccctgacccgtgatctcggcaacctgccgccgaacgtctgccatccgacgttcctcggcgagcaggccaagggcctggccaaggagttcaagggcctgaaggtcgaggtcctcgacgagaagaaactgcgcgagctgggcatgggctcgttcctcgcagtcgcccagggcagcgaccagccgccgcggctgatcgtcctgcaatacaacggcgcgaagaaggaccaggccccgcacgtgctggtcggcaagggcatcaccttcgacaccggcggcatcagcctcaagccgggccagggcatggacgagatgaagttcgacatgtgcggcgccgccagcgtcttcggcaccttccgcgcggtgctcgaactgcagttgccgatcaacctggtcggcctgctcgcctgcgccgagaacatgcccagcggcggagccacccgtccgggcgacatcgtcgccaccatgagcgggcagaccgtcgagatcctcaacaccgacgccgaagggcgcctggtgctgtgcgacgcactgacctacgccgagcgcttcaagcctcagtcggtgatcgacatcgccaccctcaccggcgcctgcatcgtcgccctgggcagcaacacctcgggccttatgggcaacaacgaagcgctggtcaggcaactgctcaaggccggcgagttcgccgacgaccgcgcctggcaattgccgctgttcgacgaataccaggaacagctggacagcccgttcgccgacatcgccaacatcggggggccgaaggccggcaccatcaccgccggctgcttcctctcgcgcttcgccaagaaataccactgggcgcacctggacatcgccggcaccgcctggatcagcggcggcaaggacaaaggcgccaccggccgcccggttccgttgttgacccagtacctgctggaacgggccaagtga

SEQ ID NO: 319699 - DNA, 429 bp, Pseudomonas aeruginosa
gtgacccgggtcgatttctacgtgatccccagcgccgatccgtcggcgcgcctgcaggtcgcctgccgcctggccgagaaggcctggcggcagggcatgcaggtctacctgcattgcgccgacgaggcgcagcgcagcgagttggacggccgcctgtggagcttccgcggcgaggccttcattcctcacagcctggccgaggaagacgccgaggcgcccgtcgccctgggcctgggcgagcccccggggaaccatcgcgacctgctgatcaacctgaccctcgaggcccccggcttcgtcccgaacttttcgcgggtggccgaactggtggtcgaggagccggcgatccgccaggcggcacgggataaattccgcttctaccgggagcagggctatcctctacaggaccatcgcctgccgcgtatctga

SEQ ID NO: 319700 - DNA, 369 bp, Pseudomonas aeruginosa
atggacagccacaaaccgacacaacccccggagcagttgctcgatgacctggagtcgatccacgacctgctctacgaacggaacgagccgcccttgctgaccgaatccttcgagccggacaacattcccctgctctccgacgtcgtctcccccggtaccgccccgcgcgcgccagagccgcagaccgcggcagccaccacggcagggctggcgcccgccgaacaggagcgcctggacgacgagttgcgagcgtccgccgaactgatcctgcaggaagtcatcgacgacttcgccccgcagatcgaagccgaactgcgccgccgcctgcaagcccgcctgggtcgcctgctcggccaacgcaacggctga

SEQ ID NO: 319701 - DNA, 2853 bp, Pseudomonas aeruginosa
atggacaagacttaccagccgcacgccatcgagacttcctggtacgagacctgggagtccaacgactacttcgctccgagcggcgaaggccagtcctacaccatcatgatcccgccgccgaacgtgaccggcagcctgcacatgggccatggcttcaacaacgcgatcatggacgcgctgatccgctaccgccgcatgcagggccgcaacaccctgtggcagccgggcaccgatcacgccggcatcgccacccagatggtggtcgagcgccagctcggcgcccagggcgtgagccgccacgacctcggccgggagaagttcctggagaaggtctgggaatggaaggaacagtccggcggcaacatcacccggcagattcgtcgcctgggctcctcggtggactggtcgcgcgagcgcttcaccatggacgacggcctctccgaagcggtcaaggaagccttcgtgcgcctgcatgaagacggcctgatctaccgcggcaaacgcctggtgaactgggacaccaagctgcacaccgcgatttccgacctggaagtggaaaaccacgacgagaagggccacctctggcacctgcgctacccgctggtgaacggcgcgaagaccagcgaaggcctggattacctggtggtcgccaccacccgtccggaaaccctgctgggcgacgccgcggtcgcggtgcacccggaagacgagcgctacgccaagctgatcggccagttcgccgaactgccgatcgtcggccggcacatcccgatcatcgccgacgagtacgtcgaccgcgaattcggcaccggctgcgtgaagatcaccccggcccacgacttcaacgactacgaagtgggcaagcgccacgacctgccgctgatcaacatcttcgacaagaacgccgcggtgctggcccaggcccaggtgttccacctcgacggcagcgtcaacccgaacctcgaccccagcctgccgcagagctacgccggcatggaccgcttcgccgcgcgcaaggccatcgtcgccgagttcgaggccatgggcttgctcgagaaggtcgacgaccacgcgctgaaagtaccgaagggcgaccgctccggcaccgtcatcgagccctggctgaccgaccagtggtacgtcagcaccaagccgctggccgaagacgccatcgccgccgtggaagacggccgtatccagttcgtgcccaagcagtacgagaacatgtacttctcctggatgcgcgacatccaggactggtgcatcagccgccagctctggtggggccaccgcatcccggcctggtacgacgaggccggcaacgtctacgtcggccgcgacgaggtcgaggtgcgcaccaagcacaagctcggcaacgaggtcgagttgcgccaggacgaagacgttctcgacacctggttcagctccggcctgtggaccttctccaccctcggctggccgcagcagaccgagttcctcaagaccttccaccccaccgacgtactggtcaccggcttcgacatcatcttcttctgggtcgcgcggatgatcatgctcaccatgcacctggtgaagaaccccgacggcaccccgcagatcccgttcaagaccgtctatgtccacggcctggtgcgcgacggccagggccagaagatgtccaagtccaagggcaacgtgctcgacccgctggacatcgtcgacggcatcgacctcgataccctgctgcaaaagcgcaccagcggcatgatgcagccgaagctggcggagaagatcgccaagcagacccgcgccgaattccccgaaggcatcgccagctacggcaccgatgccctgcgcttcaccttctgctcgctggcctccaccggccgcgacatcaagttcgacatgggccgcgtcgaaggcttccgcaacttctgcaacaagatctggaacgccgccaacttcgtcatcgagaacaccgatggccaggacaccggggtcaacggcgagccggtcgagctgtcctcggtcgaccgctggatcatctcccagttgcagcgcaccgagcaggaagtcacccgccagctcgacgccttccgcttcgacctggccgcccaggccctctatgagttcatctgggacgagtactgcgcctggtacctggagctggtcaagccggtgctgtgggacgagaacgcccctatcgagcgccagcgcggcactcgtcgcaccctgatccgcgtgctggagacggccctgcgcctggcgcacccgttcatgccgttcatcaccgaggaaatctggcagcgcatcaagggccaggccggcaaggaaggcccgaccctgatgctgcaaccctggccggtggccgacgaaggcaggatcgacgccgccgccgaaggcgacatcgaatgggtcaaggcgctgatgctcggcgtgcggcagatccgcggcgagatgaacatctccatggccaagcgcatcgacatcatcctcaggaacgcctcgcccagcgaccaccgccgcctggccgacaacgagccgctgctgatgaaactggccaagctggaaagcatccgcgtgctggaagccggcgaggaagcgccgatgtccgccaccgccctggtcggcgacatggaagtattggtgccgatggccggcctgatcgacaagagcgccgaactggggcgcctggacaaggagatccagcgcctggaaggcgaggtcaagcgcgtcggcggcaagctgtccaacgaaggcttcgtcgccaaggccccggccgacgtgatcgagaaggaacgcgccaagctagccgaggccgaacaggccctggccaagctggccgagcaacggcagaagatcgccgcgctctaa

SEQ ID NO: 319702 - DNA, 351 bp, Pseudomonas aeruginosa
atgggcaagagagtggttgtattgctatggctgctattcacatcaatgtcagcccacgccatcgataaaaaagtcaacaacgttaccatcatgcgcgtgggcttcatggtggacgcgaattctccgggtggaggctggggctgcatcgtcagcaagccgggagcggcggattgcggctttggcctgatgcgcctgccgccgatgaataccgatgccggcaaggccatgctgtcgctgatgctgagcgcccaggccacacagaacaaactgccggagatcgcctattcggccagcgccacggtgaacgcggtatgccagatcacttcggcgcagatagacagcggcgcctga

SEQ ID NO: 319703 - DNA, 978 bp, Pseudomonas aeruginosa
atgatgcaggcctataagaataaatggttgcccctcagtgccctggcccttggcatggccctgtccttcggcgccaacgccgacgagcagaagtcggtggcggtgaccgccatcgtcgagcacccggcgctggacgccgctcgcgacggggtcaaggaggccctccaggaggccggctacgaagacggcaagaacctcaagtggcagtaccagagcgcccagggcaacaccggcaccgccgcgcagatcgcccgcaagttcatcggcgacaagcccgacgtgatcgtcggcatcgccactccgtcggcccaggcgctggtggccgcgaccaagagcatcccgatcgtcttcagcaccgtcaccgacccggtcggcgcgcacctgacgccgagctgggaagcctccggcaccaacgtcaccggggtttccgacatgctcgcgctggacaagcagatcgagctgatcaagaaagtggtgccgggcgccaagcgcatcggcatggtctacaacccgggcgaagccaactccgtggtggtggtcaaggagctgaaggaactgctgccgaagatgggcctgagcctggtcgaagcctcggcaccgcgttcggtggacgtcagctcggcggcgcgcagcctggtcggcaaggtcgacgcgatctacaccaacaccgacaacaacgtggtgtccgcctacgaggcgctggtcaaggtcggcaacgacgcgaagatcccgctgatcgcctccgacaccgacagcgtcaagcgcggcgccatcgccgccctcggcatcaactacaaggagatgggcaagcagaccggccgcatggtggtgcgcatcctcaagggcgagaagccgggcgagatcaagccggagaccagcgacaacctgcagctgttcgtcaatcccggggccgcgcagaagcaaggcgtgaccctgtccgacgaactgctcaagtcggccgcggaagtcatcaagtaa

SEQ ID NO: 319704 - DNA, 891 bp, Pseudomonas aeruginosa
atgtctctgttttccctgttcggtgccctggagatcggcctgatcttcagcctcgtggcactcggcgtgttcatctccttccgcctgctgcgcttccccgacctcacggtggacggcagcttcccgctcggcggcgcggtctgcgcgaccctcatcgcccttggctgggacccgtacagcgcgaccctggcggccaccgccgccggtgcactggccgggctggccaccggcctgctcaacgtcaagctgaagatcatggacctgctcgccagcatcctgatgatgatcgcgctctactcgatcaacctgcgcatcatgggcaagcccaacgtaccgctgatcgccgagccgacattgttcaccctgctgcagccggaatggctcagcgactacgtgttccggccgctgctgctggtgttcatcgtgatcgccgcgaagctgctgctggactggttcttcaccacccagaaaggcctggcgatccgcgccaccggctccaacccgcggatggcccgtgcccagggggtcaacaccggcggcatgatcctgctcggcatggccatctccaacgcgctggtggcgttggccggcgcgctgttcgcgcagacccagggcggcgccgatatctccatgggtatcggcaccatcgtcatcggcctggccgcggtgatcgtcggcgagagcatcctgccctcgcgccggctgatcctggcgaccctcgcggtgatcctcggtgccatcgtctaccgcttcttcatcgccctggcgctgaacagcgatttcatcggcttgcaggcccaggacctgaacctggtcaccgcggtgctggtcaccgtcgccctggtgattccgatgatgaagaaacgcctgctcggcaagaagggagcctga

SEQ ID NO: 319705 - DNA, 795 bp, Pseudomonas aeruginosa
atgctcagcgcgaagaacctgaagatcaccttcaaccccggcacccccatcgagacccgcgccctgcgcggcctgtcgctggacatcccggccggccagttcgtcaccgtgatcggctccaacggcgccggcaagtcgaccttcctcaacgcagtctccggcgacctgccgatcgacagcggacagatcctgatcgacgacgaagacgtcacccgcaagccggtctgggcccgcgccaaccgcgtcgcgcgggtgttccaggaccccatggcgggtacctgcgaggacctcaccatcgaggagaacatggccctggcgcaacgtcgcggtgccgggcgcggcctcggcagggcggtgcaggcatcgatgcgcgacggtttccgggaaagcctggcgaccctcggcctcggcctggagaaccgcctcggcgaccgcatcggcctgctctccggcggccagcgccaggccgtcagcctgctgatggcggcgctgcagccgtcgcgtatcctgttgctcgacgaacacaccgcggcgctcgacccgcgcaccgccgacttcgtcctgcatctcaccgcacggatcgtcgccgagaagaaactcaccaccatgatggtcacccacagcatgcgccaggcgctggacgtgggcgagcgcacggtgatgctgcaccagggccaggtggtgctggacgtctccggcgagcaacgcaagggcctcgacgtaccggacctgctggcgatgttcgagaaggtgcgcggcgagaagctcgccgacgacgccctcctcctcggctga

SEQ ID NO: 319706 - DNA, 1833 bp, Pseudomonas aeruginosa
atgaacctcgaactgctctgggtggtcggcctgctcgccaccaccgtcgccctcttcatccacaaccgcctgcgcctggacgtgatcgccctgctggtgatcatggccttcagcgtcagcggaacccttaccctcaacgaagccctggccggcttcagcgatcccagcgtgatactgatcgccgcgctgttcgtgatcggcgaaggcctggtgcgtaccggggtggcctaccaggtcggcgactggctgatcgcccgcgccggcagcagcgaagcgcgcctgctggtactgctgatgctggcggtggccgggttgggctcggtgatgagttccaccggggtggtggcgatcttcatcccggtggtcctgagcatcgccgccaagctgaagatccctccgggccggctgatgatgccgctggccttcgccggactgatcagcggcatgatgaccctggtcgccacgccaccgaacatggtggtcaacagcgagctggcgcgcgagggtcatgccggcttcggcttcttcgccttcaccccgataggcctcatggtgctcgccatcggcgtggcctacatgctgctcacgcgcaactggctgaacgccgccagcccggcggaagtcggcgcgccgaaggcacggcggaccctgcgcgacctgatccgcgactatcgcctggccggccgcgaacggcgcctgcaggtccagctcggctcgccgttgatcggcagcaccctggaagaactgcaactgcgcacccgcctgggcgccaacgtggtcggcctggagcgggtacgcaagttccacagcgaggtggtcaaggtcggcggcagcaccgagctgaaggcgggcgacgtgttgctgctggacgtcttcgcccctccggaggacatggaccggcgctgcgccgagctgaacctggtgcgactgccgttccgcgccagctacttcatcgaccagtcgcgggaggtcggcatggccgaggtgactctgccgccggactccaccctgctcggcaagagcgtcctggaactgggcttccgttcgcagtacgggctcaacgtggtcggcctgcgtcgcgaccacgaagcgctcaccgacggcatgctggaagagaagctgcgcctaggcgataccctgctggtgatcggcgcctggaaggcgatccgccagttgcagggacgcaaccgcgatttcctggtgctcagcctgccggcggagatcgacgaggtggcgccggccctgagcaaggcgccgcacgccctgctcagcctggccgtgatggtggcgctgatggtcagcggggtggtgcccaacgtggtcgcggcactggtcggctgcctgttgatgggcctgttccgttgcatcgacatggacggcgcctaccgcgccatccattggcaaagcctggtcctgatcgtcggcatgctgcccttcgccctggccctgcagaagaccggcggtatcgacctggtggtctcgctgctggtcgacgccctcggcgacgccggcccgcgcgtgctgctggccagcctgttcctgctcaccgcggccatcggcctgttcatctccaacaccgctaccgcggtgctgatggcgccgatcgccatcgccaccgccaagcagatcggcgcctcgccctaccccttcgccatggtggtggcggtggcggcctcggcagccttcatgacgccgatttcctcgccggtgaacaccctggtgctgggccctggccaataccgcttcggcgacttcgtccggatcggcgtgccatttaccctgctggtgatgttcgtctgcgtgctggtgattccgtggctgtttccattgtga

SEQ ID NO: 319707 - DNA, 1011 bp, Pseudomonas aeruginosa
atgccccgcccgaccagcccgcatcccgacgccgagcgcaagagcgccagcccgctgcacccgcgcaatcgccacctgggacgctacgactttccgcgcctgatcgccggcagcccggaactggagcgcttcgtcatcctcaatccgtacggcaggcagagcatcgacttcgccgatccggcggcggtgaaagccttcaaccgcgcgctgctacaacagttctacgacgtacgcgagtggaatatacccgatggttacctgtgcccgcccattcccggtcgcgccgactacctgcactacctggccgacctgctcggcgccagccacgatggcctgattccacgcggtcccggcctgcgtgcgctggacgtcggaaccggagccaactgcatctacccgctgctcggccaccacgaatacggctggcgcttcgtcggcgccgacatcgacccgcaatcgctggcctcggccgctgcgatcctcgccgccaacccacgcttcgccgctgccatcgagttgcgccggcagcctgatcgcaggcagatattccagggcctgatcggcgtcgatgagcgcttcgacatgaccctctgcaacccgcccttccacgcctcgctggacgaagccacgcgcggcagccggcgcaagtggaagaacctcggcaagctcgacccgacccgtaccctgccgctactgaactttggcggccagggcgccgagctgtactgcgagggcggcgaagcggccttcctggccggcatggccgaggaaagccgggcgttcgccacgcaggtgttctggttcaccaccctggtatccaaggcgagcaacctgccgaacctccaggagcgcctgaagacgttgggcgccagcgatatccgcgtggtggacatggcccagggacagaagcagagccgcttcgtcgcctggacctacctcgacaagaagcagcgccgggcctggcgcaaggagcgttggacagcagccctcctggaaccactgggcgaatag

SEQ ID NO: 319708 - DNA, 1362 bp, Pseudomonas aeruginosa
atgcatattcaatcgcttcagcagagtccgtctttcgccgtcgaattgcaccaggccgccagtgggcgtttgggacagattgaggcccgccaggtcgccacccccagtgaagcgcagcagttggcccagcgccaggacgcgccgaagggtgaggggctgctcgctcgcctgggcgcggcgctcgtgcgtcccttcgtggcgatcatggactggctgggcaaactgttgggctcccacgcccgcaccgggccgcagcccagtcaggacgcgcagcctgcggtcatgtcctcggccgtcgtgttcaagcagatggtgctgcagcaggcattgcccatgaccttgaagggactcgacaaggcgagcgagctggcgaccctgacaccggaaggactggcccgggagcactcccgcctggccagcggagatggggcgctgcgttcgctgagcaccgccttggccggcattcgtgccggcagccaggtcgaggagtcccgtatccaggctggccgcctgctcgaacggagcatcggcgggatcgcgctgcagcagtggggcaccaccggcggtgccgcgagtcaactggtgctcgacgcaagcccggaactgcggcgcgaaatcaccgaccagttgcatcaggtaatgagcgaggtcgcactgttgcgccaagcggtagagagcgaggtcagcagagtatcggccgacaaggcgctggcggatggcctggtgaagcggttcggggcggatgcggaaaagtacctgggcagacagcctggtggcatccacagtgacgccgaagtgatggcgcttggtctctacaccggcattcactacgcggacctgaatcgcgctctgcgtcaggggcaggagctggatgcgggacaaaagctgatcgaccaaggtatgtccgcggccttcgagaagagcggacaggctgaacaggtagtgaagactttccgtggcacccgtggcggggatgccttcaatgcggtggaagagggcaaggttggccacgacgacggctatctctccacctccctgaaccccggtgtcgcgaggagcttcgggcagggcacgatatccaccgtgttcggcaggtccggaatcgatgtcagcgggatatcgaactacaagaatgaaaaagagattctctataacaaagagaccgacatgcgcgtgctgctgagcgccagcgatgagcagggagtgacccgccgggtcctcgaagaggcggccctgggggagcagagtggccatagccagggactgctcgatgctctcgacctggcaagcaaaccggaacgttcaggcgaggtccaggaacaggatgtacgcctgaggatgcgtggccttgatctggcctga

SEQ ID NO: 319709 - DNA, 351 bp, Pseudomonas aeruginosa
atgaatccactctaccgcgccgccatccaccagctttttctcgctctcgatctcccgacgcccaacgacgaggagagcgtactcagcctgcaggtgggcccgcatctctgccatctggcagaacatccgaccgatcacctgttgatgttcacccgcctggaaggacaaggagacgctacggccagcgagcagaacctgttcagccaggacccttgcaagccgatcctgggccgcgaccccgaaagcggcgaacggctgctctggaaccgccagcccttgcagttgctggacagggcccagatccaccatcaactcgaacaactggtcgccgccgccgaagagctgcgctga

SEQ ID NO: 319710 - DNA, 123 bp, Pseudomonas aeruginosa
atgctgctgggcgggctctggttcggctactggatccgccaggagggattgcaactgacccacctgctgctggtggtctgggtgctggcgaacttcttcgtgctcaacgtccgctggaactga

SEQ ID NO: 319711 - DNA, 612 bp, Pseudomonas aeruginosa
atgcaactgatcggtatgctggattcgccttttgtgcgccgggtcgccatcgccctgcgcctgctggacctgccctacgagcaccggccgctgtcggtgttccgcaatttccaggcgttcagcctgttcaacccgatggtcaaggcgcccacgctggtgctggacgatggcaccgtgctgatggactccagcctgatcctcgattacctggagtgcctggccggccgcgaacgcagtctgctgccgcaacggccgcaggcccgtgcacgggcgttgagtctgatcggcgcggcgctggtggcctgcgagaaatccgtgcagatctactacgaactgaacctgcgtcccgaggaacgccgccacggcccctggctggagcgggtggaggggcagttgctggcggcctacgactggctggaggcagcgctgcgccaggagccgctggcacgcgacggtggcatcgagctggtcggggtgaccgtcgcggtggcctggcgcttcagccaactggtggtcgcggagcgggtcgccgccagcgaatacccggaactggcaagctattcggattatgcggaggggttgccggtgttcctcgagacgccgtcggtctga

SEQ ID NO: 319712 - DNA, 897 bp, Pseudomonas aeruginosa
atgagcgacctccctcccctcaccgccctgcgcagcttcgaagcggtcgcccggctcggcagcatcagccaggccgccagcgagctgcacgtcacccactcagcgatcagccagcagatcaagctgctggaaaacctcctcggcctggccctgttcgtccgcgaggggcgcggcctgcgcctgagcgagaacggccggttctacgccctgcaggtacgcgcctctctgggcgagatcgccgacgccacgcgggtggtgcgggcgcgtccacgggagggtgagctggtggtcacggtgatgccgtccttcggcctgaactggctgctgccgcgcctgccgcgctttcgcgagcgccatccgcactgtcgcgtgcggctggtggccagtcttgacgtgcagaacctgcgccagggcctggccgacctcggcgtacgcatcggcaagggcgactgggaaggggtcggtcgggaacgcctgttcgacgacgagttgctgatggtcgccgcgcccgacttcaacggcggccgcctgccgcgcacgccgagcgagatcgtcgcctgccctacactgcgctccaccgaatcctgggcgctctggtgccagcgcgccggcgtggcggaaccgcagcacggactgctgatcaatgactcgaacctgctgctggaagccgtgcgcctgggccaaggcatcgccctggagcgtcgcagcctggtcgccggcgccctcgccgagggccgcctggtgcaactgggcgacatccgcgtgccctacccctatccctactggctggtctggccgcagcgcgagccgccgagcgaccgccaccaggccttcgccgactggctgcgcgaggaggcccggcgctaccaggccgagcaaccgccgctcagcgaatga

SEQ ID NO: 319713 - DNA, 543 bp, Pseudomonas aeruginosa
atgctgatccgcgccgcaacctcgaccctgctggtggtcgatatccaggaacgcctgctgccggccatcgacgacggtccggcgctggtcgagtacagccagtggttgttgcgcgtggcccgcgcactggacgtgccggtgctggccagcgagcagtacagcaagggcctggggccgacggtggcggccctgcgcgatgagctggagcccacgcagatcctcgagaagctggacttctcggccgccgccgacggcgccctgctgcgcgcgcccggcggcgaccgccggcagttcgtggtttgcggcagcgaggcgcacgtctgcgtgctgcagaccgtgctcgacctgcttggccgtggtcgcgaagtgttcgtcgtggaggaggcgatcggctcgcggcggccgagcgacaaggcgctggccgtggagcggatgcgccaggccggggcgatgatcgtgtcgcgggagatggtcgccttcgaatggatggaacgcgccggcagcgaccgcttccgcgagatcagccgcaacttcattcgctga

SEQ ID NO: 319714 - DNA, 471 bp, Pseudomonas aeruginosa
atgaatatcagcctgcatttcgaatcgcgcctgcaggccagccccgaacagctctggcggtggatcacctcggtggacgggatactccgcgagatacgcccgttgctgagcatgagcgtaccgcccggtatccgcagcctcgaagacctggaggtggtgccccggcgcccgctgttccgcagccacatgcgcctgttcggcttgctgccgctgggcacttcgcaactgaccctgctggagttgacgcccggccgcggcttcatcgaacagtcgccgatgaccggcatgcgcctctggcgccacgagcgacgcatcctgccgacaccgggcgaggccggggaatgcctgctggtcaaccagttgaccgtgcgcccgctattcgccgccggactggtacgctggttcctcacccgcatcttccggcatcgccaccgggtgctctgccggcagttccgcacggaccgccggtga

SEQ ID NO: 319715 - DNA, 1356 bp, Pseudomonas aeruginosa
atgaatcgcatcaagcacctgctcaaggacctcgccatcctgatccgcgccaacctctggctgatcccggtgatcgccgccctggtcgccgcggtgttctatttcgtcgccccgccgccgccgatgagcgcgaccatggccaccggcgccgagggcggcggctacgccgtgttcgccggcaagctccgggaaaagctcaaggagcagggcttcgaactgaagctggtgcccagcgccggctcgcgcgacaacctggagcgcctgctcggcaccggcgaggtcgacatcgccctggtccagagcggccaggagcgccagctcgaagccgggcaggcgcgccagttgcagaccctcggcgcggtctaccaggaaccgctctggctgttccaccgcagcaacgtgcacatcgaccagctcagcgacctgctgcacctgcgcctggccatcggcagcgacggcagcggcacccgcgccgccaccgaggcaatcctgcaggccaacgacatcgccccgggacactatccgatcacctgggaagcccgcggcggcaacgcggtggtcgacgacctgctggccggcaagctggacgcggcgttcatcgtcggcccggcggagaacccggcgatccagaaattggccgacaacgaccagcttcgcctggtcaacttccgccgcagcgccgcctacgaggcgcgcctgccgttcctcaagcgggtcgaggtcggcgaaggcctgctcaacctgccgcgcaacgtgccggaacgaaacatcagcaccctgtcgccggtggccaccctggtgatcaacgaacgcttccacccggcgctgatcccgctggtgctggaagccgcgcgcgaggtgatgaaggacggcagcctgctcgacaagcccggcgccttccccagcgccgagccgcgcaccctgcgcctgcacgaggacgccgagcgctactacaagagcggcctgccgctgctgcagcgctacctgccgttccgcatcgcctccctggcggaccgctacatcatcctgctgatcccgttcatcgccatcctcatcccgctgatgaagtccatcggcccgctgtatcgctggcgcatccgcgcgcgcatctaccgctggtaccgctacatccgcgacatcgaccgcaagctcgacagcggtaccgacgccgagcaactgagaagcgagatcgagcggctggagaaactggagagcgagctaaacaccgtggaggtgccgctctcctactaccacgagctgtacgagctgcacctgcacctgaacttcgtgatcaagcgcctgcacggtctgcaggaacgccaggcgacgcaggcagaagccggcaacctcgggtaa

SEQ ID NO: 319716 - DNA, 1005 bp, Pseudomonas aeruginosa
atgccgatccatcacgccatcgtccacctgatcgagaagaagcccgacggcaccccggccgtgctccacgcgcgcgacgccgagctgggcgactcccaggccatcgagaacctgctggccgatctcaacgaaagctacaacgccaagaacaaggcctggggcttcttccagggcgagtccggggcctacccgttcagcggctggctcggtgagtacctggagggcgatcgcgacttcgtcggcttcagccgcgaagcggtcgaacacctgcagaagctgatggaggagtccaatctctccaccggcggccacatcctgttcgcccactaccagcaaggcatgaccgactacctggcgatcgccctgctgcaccacagcgaaggcgtggcggtgaacgagtcgctggaggtcaccccgtcgcgccacctggacctcggccagttgcacctggccgcgcggatcaatatctccgaatggcgcaacaacaagcagtcgaagcagtacatctcgttcatcaagggcaagggcgggaagaaggtctccgactatttccgcgacttcatcggctgccaggaaggggtggattcgccgagcgagacgcgcaccctgctgaaagccttcagcgatttcgtggaaagcgaggacatggccgaggaacaggcccgcgagaagaccgagacgctggtcgactacgccacctcccaggcgcgcatcggcgagccgatgaccctcgacgcgctttcggaactgatggacgaccagcaaccgcgggcgttctacgactacatccgtaacaaggactacggcctgtcgccggaaatcccggcggacaagcgcaccctcaaccagttccgccgcttcaccggccgcgccgaaggcctgtcgatcagcttcgaggcgcacctgctgggctccaaggtggaatacgacgaagagcgcgacatgctgatcatccgccagttgccgacccagttgaaggaccagctcaagcggcgcaaggactga

SEQ ID NO: 319717 - DNA, 912 bp, Pseudomonas aeruginosa
atgaacgcctacgacatcgaaatcgtcaacgacgccgcgcacgccggcgaagccaaccacggctggtgcttcggcctgccgccgggcatccgtccggagcagtggccgctggatccggacaccggctatccgctgatgcacggcttcaccctgctgctgccggaggactaccgggtgcatggcccggagatcgtcgcgctgagcttcttctccctcgccccggaccagaacgacggtggaccgaccagcgtcgacggcattcgcgagatgctcatcgatccgcccgcgcaaccgccggccgaagcggaactgcggccgttctgggaggccgggcgcaatagccatccgcgtttgcatcggatggagggcatcctcggcggcgcctatgcgttgatcctgctcgacgccgctgaattcagcggcgcgccctgccagccgccggcgctgccggcgggcaacccgctgttggcgcagaccgagccgccgcagtggctggaggctggttcggcggccagcttcgtgccggactgggcggaggacgactactacctgctgcgcgccctcggtggccgcccggcggccggccaccagcagcgctacccgctgcgctggacggcgcgggcgcaagaccccaacgccggggtggtgcccagcgaatacggcgacggcggctaccagctgccgcactactggctggacggcaagatcgagcgcgacaactaccgcgagcatccctgggtggaagggcacctgccgaaccatatcggcggcaccatgcgtccggtgcagggcgtgccggagatgagtcccttctacgtagagttcgaggaatacctgggcggctacaacttcggcggcggcaacgcccagctcgatttccgcgacatgcgcttcgactgggcctgcggctga

SEQ ID NO: 319718 - DNA, 753 bp, Pseudomonas aeruginosa
atgccggcggagaccccgccgctgcggccggacgccgatccgccgcagtgcgcgttgcccgaggcgaggccggaccgcgacgccggcaccaagctgcgcgccgcggtgctcggtgccaacgatggcctggtgtcgaacctgtgcctggtgatgggcgtggcgggtgcgagcatggcgcattcgtccatcgtcctcaccgggatggccggactggtgtccggggcctgttcgatggccctcggcgagtggctgtcggtgaccaacgcccgcgagatggcgagcaagcgcatcgccgaggaagaacgcctgctcaggctctgcccgaacaccgagacccaggaactgatcgatatcttcactgccaaggggctgagcgaggtgtccgcccggcgcgtggccctgcaactgatgaacgacggtcgtggcgcgctggacaccttgtcccgcgaggccctcggcatcgatccgacggagttgggcggcaacccgtggaacgcggcgggcacgtcgttcctgctgttttcccttggcgccctggtgccggtggcgccgttcctgttcctcgacggtgccgcggcgctggtcgcaagcctgctgtccagcctgcttgcgctgctgttcagcggcgcggtcaccgcccgtttcaccgggcggccgctggcgttctcggcgttgcgccaggtgctggtcggtacccttgccgcggccttcacctttgggttgggcaccgcgctcggcgtgggcctgggctga

SEQ ID NO: 319719 - DNA, 936 bp, Pseudomonas aeruginosa
atgtcagagctgatcctgcatcactatcccacttcgcccttcgccgagaaggcgcgcctgctgctcggtttcaagcaactgtcctggtgttcggtgatgattccgccggtgatgcccaagccggacctggtggcgctgaccggcggctatcggaagaccccggtgttgcaggtcggcgccgatgtgtattgcgataccgcgttgatcgcccgtcgcctggagcaggaaaaggcggttccggcgctgtttcccgaaggccaggagatggtcgccgcgagcttcgcccagtgggccgatgcggtgctgttccagcacgcggtaagcctggcgttcgccccggagtccatcgccgtgcgtttcggcaagctgccgccggaattcctcaaggccttcatggccgatcgcagccagctattcagcggcggcagcgccggccgcctgccgctggaacaggcgcgccaccagtggccggcattcatggcgcgactggagcgccagttgtcgcgcgaggacggcgatttcctgttcggcgaagcgtccgtcgccgacttcgccgtggcgcactgcctgtggttcctcaagggcacgccggtcaccgcgccgctggtcgacgattacccgcaggtgcaggcctggttgggacgggtgctcggcttcggccatggcgcgccagccgagatgagtgcggaggaagccctggaggtggctcgcggcagccagcccgcggcattgccggacgaatccttcagcgaccccaacggtttcctgcccggccaggcggtcgccatcgccgccaccgactacggtgtcgacgcggtacagggcgaactgctcttcgccggcagcgaggaactcatcctgcgccgcgaagacccgcgggcgggtaccgtgcatgtgcatttcccgcgcctgggctttcgcatcgaggcgcgttga

SEQ ID NO: 319720 - DNA, 690 bp, Pseudomonas aeruginosa
gtgggttacctgaagaatcattggtggaaacgctggatccgccgccgcggctgcaagctggccggcggcccggccagtgtcggcaagctcaccacgctggtgctcgaggagcaggtcgaactcggccacctgcgcatcgtcccgccgaggctggagatcggcgcctacagctatgtgcgcagcggcaccgacctgtccctggtggcgtccatcggacgtttctgctcgatcggctcggactgcttcatcggccaggaaaaacatacccatcccagcgactgggtgagcagccaccccttccagcacaccggcaccgcgctgcgctacgagccggcgctgagctacgcggaaatcggccacgacgtctggatcgggcacagcgcgatggtgatggaaggtgtcaaggtcgggactggggcgatcatcgccacgcgcgccgtggtcactcgcgacgtgccgccctatgccatcgtcgccgggactccggcgcaggtgatccgctaccggcatccgccggagatcatcgagggcctgctcgcctcacgctggtgggagctggatagcgccttcctcaccggcctgccgctggaccgaccccgggagttcctcgccgccctggaggcgcgcgaggcgccgcgtgcggcgtaccggcggatgaccatcacccgccaggggtgccggctggattga

SEQ ID NO: 319721 - DNA, 315 bp, Pseudomonas aeruginosa
gtgagtgaggcgacggccgccacggcggcgatcgggaagtgttggtcggtctacctggtgagggcggaaaacggcgcgttgtactgcggcatcagcgacgatccgctgcgccgcttcgacactcattgcagcggcaagggcgcgcggttcttccattccagccccgcccgcgcgctggtctacgtcgaggcctgcgccagcaagggcgacgccctgcgccgcgagcgggcgatcaaggccctgagcaagcgcgccaaggagtgcctgttggtcggcgtaccggtgttgcgcgaggtcggcgagccggcaatctag

SEQ ID NO: 319722 - DNA, 702 bp, Pseudomonas aeruginosa
atgatcacgctcttccagttccccgccgcattcaacgtacccaatgccagtccctactgcctgaaactggaaacctggttgcgcctggccggcctggagtatcaggtgaaggtcgtcagcgacccgcgcaaggcgcccaagggcaagctgccctacgtgcgtatcgagggcgaggcgatcggcgacagcgagatcgtcatccgtaccctcggcgagcgctacggggtcactctcgacgctggcctggacgcccggggcaagggctgggcacgggcgatcacgcgcctgtgcgacgaacacctgtactacctgatgctgtatttccgctggttcgacgaggacagctggcgcgtgcttaagccggtgttcttcggctcgctgccattcggcgtgcgcgacgcggtggcctgggccatgcgccgcaaggtccgcgctaccctcagggcgcagggactcggggtccacggcagggacgaactgctggccttcgcccgcgacgacctcgatgccctcgacggcctgctcggccaggtcccgtactacggcggcgaacatccgtgcagcgccgatgccgccgcttacggtatcctcgccaacctcatcgaggcgaccctggataccccgctcagccatgtggcgcgaggctatccgcgcctggtggcgtattgcgagcggatgcgggagcgggtctggagtgagtga

SEQ ID NO: 319723 - DNA, 483 bp, Pseudomonas aeruginosa
atggcccaccccaacgccgaactgatcgagcgcttctaccaggccttccagcgcctcgacggcgaggccatggcggcctgctacgctccccaggcgaccttccacgacccggccttcggcgaactgcgcgggcgcgaggtgggcgacatgtggcgcctgctgaccagccgggcgcgggacttccgcctggactacgcgaacgtccgcgccgaccagaacgaggggcgtgcgcaatgggtggcccactacctgttcacccagaccgggcgcagggtggagaatcgcatcgaggcccgtttccgcttcgccgacggtttgatcgtcgagcatcgcgaccagttcgacctgtggcgctggagccgccaggcgcttggcgccaagggcctgctgctgggctgggcgccgccggtgcagcgggcgatccgcgggcaggcgcgcaagggcctggccgcctaccaggctgcccatccggcggccggctga

SEQ ID NO: 319724 - DNA, 699 bp, Pseudomonas aeruginosa
atgactcccatcaacaaagccaaggcctggggcgtccacgccgtcaccgccagtggcgtgatcctggccttgctggccctgctcgcgctggtcgacaacaaaccccaggcctgcctgctctggctcggcctggccctgctggtggacggcctcgacggcaccctggcgcgcaagtacgaagtcaaggaaatgctgccgcatttcgacggctcggtgctcgacctggtgatcgactacctgacctacgtgttcatcccggccatcttcatctaccgctacatccccctgccggagcatttcgagctgctggcggtgggcgtgatcctggtttcatcgctgttctgcttctgcaacgtcaacatgaagagcaccgataactacttcgtcggcttcccggccgcctggaacgtggtggcggtgtacttctacgtgctcgacctgcacccctgggtcaacctcgccacggtgctggtgctggctgccctgaccctgacccggatgaagttcctccacccgttccgcgtgcgccagttcatgccgctgaacatcgccgtgactttcgtctggctgatcagcagcggtctgctgatcgtccagcagccggccgacctgccgatcctgctcggcctgtggttcgccgcctcggcctatttcgtcggtatctgcctctggcgcagcgcccgcgagtggttcggctga

SEQ ID NO: 319725 - DNA, 1026 bp, Pseudomonas aeruginosa
atgacaataatgaaaggtacctggctgctgctggccgctgtctgcctcggcgccagcgccacggccgaggccggtgcgacgctggatgcggtgaagcgcaagggctacgtgcagtgcggcgtcagcgacggcctgccggggttctcctacgccgacgccaagggccgtttcaaggggctcgacgtcgacatctgccgggcgctggccgccgcgctgttcggcgatgccgagaaggtgcgcttcaccccgctgtccgccaccgagcggttttcggcgttgcagtccggcacggtcgatctgctgtcgcgcaacacctcatggaccagctcgcgggataccgcgctgggcatccacttcaccggcgtcacctatttcgacggccagggcttcctggtcaatcgcaagctcggcgtgtccagcgcccgcgaactgaaggacgcgacggtgtgcatccagtccggcaccaccaacgagctgaacgtggcggactacttccgggcccacggcatccgctacaaggcggtgctcgacgacagctacgagaagagcgcccgtgccctggaggcggggcagtgcgacgtgctcagctccgaccagtcgcagctctatgcccagcgcctgaagctggccaagccggagcagtacgtggtgctgccggaagtgatctccaaggagccgctcggcccggccgtgcggcagggcgacgaagcctggttcaacatcgtccgctggaccctgtacggcctgctcaacgcggaggagctgggggtcacctcgagcaacgtcgagcgccaggccagggacagccgcaacccggacgtcgcccgcctgctcggcagcgagggcgacgccggcaaggacttgcaactgccgcgcgactgggtggtgcagatggtgcgccaggtcggcaactatggcgagatcttcgcccgcaacgtcggcgacggcagcccgctgaagatgccgcgcggcctcaacgcgcaatggaatctcggcggcctgcactatgcgccgccgattcgctga

SEQ ID NO: 319726 - DNA, 648 bp, Pseudomonas aeruginosa
atgagcgaacccctgatcctcgatgccccgaatgccgacgcctgtatcatctggctgcacggcctgggcgccgaccgtaccgacttcaaaccggtggccgaagccctgcagatggtcctgccgagcacccgcttcatcctcccccaggcgccgagccaggcggtgacggtcaatggcggctgggtcatgccgagctggtacgacatccttgccttcagtccggcgcgggccatcgacgaagaccagttgaacgcctccgccgaccaggtcatcgctctcatcgatgaacagcgcgccaagggcatcgccgccgagcggatcatcctcgccggtttctcgcagggcggcgcggtggtcctgcataccgccttccgccgctacgcccagccgctcggcggggtgctggcgctatccacctacgcgccgaccttcgacgacctggcgctggacgagcgccacaagcggattccggtcctgcacctgcacggcagccaggacgacgtggtcgacccggcgcttggccgcgcggcccatgacgccttgcaggcgcagggcgtggaggtgggctggcacgactacccgatgggccacgaggtgtccctggaggaaatccacgacatcggcgcctggctgcgcaagcgcctctga

SEQ ID NO: 319727 - DNA, 1899 bp, Pseudomonas aeruginosa
atgaatccgtccccatcgatcgtcgggctgagcgatatcgaagccctggaacgcgtgccgctggaacagcgcgacctgccgtccagcacctacgaactgttgcaacgctcggcccagcgccacggccagcgtatcgccctgagctgcctgctgcatggcagcgccgccgaagaaccgttgcggatcagctatgccgggctgttcgcccgcgtcacccagaccgcgaacgccttgcaccggctgggcctggaaagccaccaggcggtgtccttcctgctgcccaacctgccgcagacccactacgtgatctggggcggcgaggctgccgggatcgtcaatgcgatcaacccgctgctggagccggagcacatcgccgagctgatccgcgcctccaacacccgggtgctggtgaccctggcgccgttccccggcaccgacctgtggcagaaggtcgccggcctgcgcgcgcagttgccggagctgtacgcgatcgtcgtggtcgatccggccaacctgttgccggcgccgcagcgcgaggcgctcaaggcccagcgcgggccgctgccggagggcgtgctggacttcgatacgctgatcgccgactgcccggcagaccgcctggagagcggacgggcgatccatccggacgacgtcgcttcctatttccacaccggcggcaccaccggcacgccgaagctggcgccgcacagccacttcaacgaggtggcgatggccgagatcatgggcctgaacgccgactacggggtggacgacgtgctgctctgcggcctgccgctgttccacgtcaacggcgtgatggttaccggcctggcgcccttccatcgcggcgcccaggtgctcctggccgggccccagggctaccgcaatccgaccctgatccaggacttctggaagctggtggaacgctaccgggtcaccagcttcagtggcgtgccgaccatctacgcggcgttgctgcaggtccccagcgatggccgcgacctgtccagcctgcgtttcgccctgtgcggcgcggcgccgatgccggtggagctgatccgccagttcgaggcgcgtaccgggctcaaggtgatcgagggctacggcctcaccgaaggtacctgcggcaccagttgcaacccgcgtggcggcgagcgccggccgggttcgatcggcctgcgcctgccgtactgccaggtgaaggtcgcggtgctcgacggcgagggcaattacctgcgcgatgccgcgccgaacgaggtgggcaacctctgcctgaagggcccgacggtgttcaagggctacctgcaacaggaccggaaccgcgatatctggatcggcgatggctggttcaataccggcgacctcggtcgtatcgacgaggacggctacatctggctcaccgggcgcagcaaggacctgatcattcgcggtggccacaacatcgacccacagatgatcgaagaagcgctgcaccggcatccggccgtggccctggcggcggcggtgggcaagccggacgccaaggccggcgagctgccggtggcgtatatccagctcaagcccggcgccagcgccagcgaggaagagctgctggagcacgccagccgccacgtaccggagcgcgcggcggtgcccaaggatatctggctgatcgagagcatgccggtcaccgcggtgggcaagaccttcaagccggcgctgcgcctggacgcgatccgccgggtgctggaggaggaaagccggaggatcgccgaggatatccgcgtggaagtggtcgccgacgagcgccacggccagctcgcccacctgcacgttcccgcgcttgacgaaagacgccaggcggcgctggaagagctgctcggcggctacgcgctgaactaccggctgcacgccgtctga

SEQ ID NO: 319728 - DNA, 1572 bp, Pseudomonas aeruginosa
atgctttacactggcgcccgttcattccttaaccactacgagatcgccgtgctcaaagcactcaagaaaatcttcggcaaggccgacggaacccagccgcagagcggttcctccccggtcccgcaaggccctgccggcgctaccgcgaaaggtaccgcccccaccggcgaaaagccgaccgagaaacgcccacgcaaaccgcgccccccgcgcgccgacaacgagtccggcgccccgcgcgccgctgaaaaggccgagaaaggcgaaaagcccgccaaacccgccgccaaagaaggccgggacgccaagccgcgcagcgacaagccgcgccgcgaacgcaagccgaagccggtggacaactggaagctggaagacttcgtggtcgaaccgcaggaaggcaagacccgcttccacgacttcaacctcgccccgagcctgatgcacgccatccatgacctcggcttcccctactgcaccccgatccaggcgcaggtactgggcttcaccctgcgcggccaggacgccatcggccgcgcccagaccggcaccggcaagaccgccgcgttcctcatctcgatcatcacccaattgctgcagaccccgccgccgaaagagcgctacatgggcgagccgcgcgcgctgatcatcgccccgacccgcgaactggtggtacagatcgccaaggacgccgcggcgctgaccaaatacaccgggctgaacgtgatgaccttcgtcggcggcatggacttcgacaagcaactcaagcagctggaagcgcgcttctgcgacatcctggtagccaccccaggccgtctgctggacttcaaccagcgcggcgaggtgcacctggacatggtcgaggtgatggtcctcgacgaagccgaccgcatgctcgacatgggcttcatcccgcaggtccggcagatcatccggcagaccccgcacaagggcgaacgccagaccctgctgttctcggcgaccttcaccgacgacgtgatgaacctcgccaagcagtggaccgtcgatccggcgatcgtcgagatcgagccggagaacgtcgccagcgacaccgtcgagcagcatgtctacgccgtggccggcagcgacaagtacaagctgctgtacaacctggtggcacagaacaactgggaacgggtgatggtcttcgccaaccgcaaggacgaagtccgccgcatcgaggaacgcctgaccaaggacggcatcagcgccgcccagatgtccggcgacgtaccgcagcacaagcgcatccgcaccctggaaggcttccgcgaaggcaaaatccgcgtcctggtggcaaccgacgtggccggccgcggcatccacatcgacggcatcagccatgtgatcaacttcaccctgccggaagacccggacgactacgtgcaccgtatcggtcgtaccggccgcgccggcgcctcgggcacctcgatcagcttcgccggcgaggacgatgccttcgccctgccgccgatcgaagaactgctgggccgcaagatcacctgcgagatgccgccggccgaactgctcaagccggtaccgcgcaagcactga

SEQ ID NO: 319729 - DNA, 948 bp, Pseudomonas aeruginosa
atgagcgccgccactcccctgatcgtccagcaggccgaagccgagcaactgctcgcccgtatcgacgtcctccaggccatgcgccagctgttcctcgacctggccgccggccaggcgctccagccggcccagcaactggtggagttccccgccggtcgcggcgacttcatcaactacctcggcgtgctcgcccaggaacaggtctacggagtcaagacttcgccctacatcgttcgcgaacagggcccgttggtcaccgcctggaccctgctgatgtcgatgcagaccggccagcccttgctgctctgcgatgccgcccggctgaccaccgcgcgcaccgccgccaccaccgccgtggcggtggatgccctggctccggccgaggcctgccgcctggcgctgatcggcagcggaccggtggcccatgcccacctgcaatacgtgaagggcctgcgtgactggcagggcgtgcgagtccactcgccgtgcctggacgagcgccgcctgcaaagcctgcgcgccatcgacccgcgcgccgaagccgccggcagcctggaggaagcgctggacgaagccgatgtgatcctgctctgcacctcctcggcccgagcagtgatcgacccgcgccaactcaagcgcccggcgctggtcacctcgatcagcaccaacgcgccccgcgcccatgaggtaccggcggaaagcctggcggccatggacgtctattgcgactaccggcacaccaccccaggctccgccggcgagatgctgatcgccgccgaacagcatggctggagccccgaggcgatccgcggcgacctcgccgaactgctcagcgcccaggcgccacgtccggaataccggcgcccggcgttcttccgctcgatcggcctgggcctggaagacgtagccctggccaacgccctctaccgcctgcgccaggcaggctga

SEQ ID NO: 319730 - DNA, 1128 bp, Pseudomonas aeruginosa
atgatcgaagcggattacctcgtcatcggtgccggcatcgccggcgcatccaccggctactggctgtcggcccacggccgggtcgtggtgctggagcgcgaggcgcagcccggctaccactccaccggccgctccgccgcgcactacacggtggcctacggcacaccccaggtgcgcgcgctcaccgccgccagccgggccttcttcgacaacccgccggccggcttctgcgagcatccgctgctcagcccgcgtccggaaatggtggtcgacttcagcgacgatccggaagaactccgccgtcaatacgaaagcggcaaggcgctggtgccgcagatgcgcctgctggacgcggaacaggcctgctcgatcgtgccggtgctgcgtcgcgacaaggtcttcggcgccacctacgaccccaccggcgccgacatcgataccgacgccctgcaccagggctacctgcgcggcatccgccgcaaccaggggcaggtcctgtgcaaccacgaagcgctggagatccgccgggtcgacggcgcctgggaagtccgctgcgacgccggcagctaccgcgcggcggtgctggtcaacgccgcaggcgcctggtgcgacgccatcgccgggctggccggcgtccgcccactgggcctgcagcccaagcgccgctcggccttcatcttcgccccgccgccgggcatcgactgccacgactggccgatgctggtcagcctcgacgaatccttctacctgaagccggacgccggcatgctgctcggctcgccggccaacgccgatccggtcgaggcccacgacgtgcagcccgagcaactggacatcgccaccggcatgtacctgatcgaagaagccaccaccctcaccattcgccgtccggaacacacctgggcggggctgcgctcgttcgttgccgacggcgacctggtggccggctacgccgccgatgcggaaggcttcttctgggtcgccgcccagggcggctacggtatccagacctcggcggcgatgggcgaggccagcgccgcgctgatccgccaccagccgctgccggcgcacctgcgcgagcacggcctggacgaggcgatgctgtcgccgcgccgcctgtccccctga

SEQ ID NO: 319731 - DNA, 633 bp, Pseudomonas aeruginosa
atgagcccgagccaagaccccagcctggagaactaccgggcgatcgccgacggcatcgccaccctgttcttcccccacgccgaagtggtcctgcacgacctgcgcagccagcgggtcgactacatcgccaacaacctgtccaagcgcgaggtcggcgacgactcggcgctggaagacatgctcgaaggcgatagcgacgagcgcaacatcggtccctacgagaagctcaactgggacgggcagaagatccgctcggtcagcaccgtgctgcgcgactccgccggccagccgctggcggtgctgtgcatcaacctgaacatcagcctgttcgagagcgccaaggcggcactcgacctgttcctctcgccgagcaagctgatcccgcaaccggacgcgctgttccgcgacgactggcaggagcgcatcaacaccttcctgcacggctggctgcggcagcgccagctcggcttgaacctgctgacccgcgagcacaagcgcgaactggtcctggccctgcacgccgagggcgcgttcaagggcaagagcgcggccaactatgtggccaacgtgctgaacatgggccgggcgacggtctacaagcacctcaaggagctgaaggaaggcggcgactga

SEQ ID NO: 319732 - DNA, 792 bp, Pseudomonas aeruginosa
atgatcaagtcgctgaacaccaagaacctgctgggaggcctgctgctcggcgtgctcgccagcggatccgccgtcgccgccgatggcaacctgcggatcggcatcgaggccgcctacccgccgttttccttcaagaccgccgaaggcgaactggccggcttcgactacgacatcggcaacgcgctgtgcgcgcagatgcaggtgaagtgccagtggatcgagcaggagtacgatggcctgattccctcgctgaaagttcgcaagatagacgccgcgctgtcctccatcaccatcaccgaggaacgccggcgctcggtggacttcacccacaagtactacttcacgccgggccgcctggtgatgaaggaaggcgcccagctcgacgacagcttcagccagttggccggcaagcgcatcggcgtgcagcgcggcgctaccgccgaccgcttcgccagtgcggtgctggccaaggccggtgccgaagtggtgcgctacaccagccaggacgagatctacctggacctggtggccggccgcctcgacgccaccttcgccgactccatcccgctgcagaccggcttcctcgataccccgcgcggcaagggctacgccttcgtcgggccggagttcaaggacccgaaatacttcggcgagggcgccgggatcgcggtgcgcaagggggacgccgagctggtcggcaagctcaacgcggcgatcgacgcgattcgtgccgacgggacctacaagcgcatcgagggcaagtacttcaagagcgacatctacggcgactga

SEQ ID NO: 319733 - DNA, 990 bp, Pseudomonas aeruginosa
atgaccgactggatcgatggccaaggccgacagatcgactacctgcgcctgtcggtcaccgaccgttgcgacttccgctgtgtctactgcatggccgaggacatgcgcttcctgccgcgccagcaggtgctgaccctggaggagatcgagcgggtcgcccggctgttcgtcgccggcggtgtgcgcaagctgcgcctgaccggcggcgagccgctggtgcggcccggcatcgtcggcctgtgcgagcgcctggcggcactgccggggttgcgcgaactgtgcatgaccagcaacggctcgcaactggtgcgctacgcccggccgttgtacgacgccggcctgtcgcgtctcaacatcagcctcgataccctcgatccgctgcgcttccgggcgatcacccgcaacggcgagctggacaaggtgctggccggcatcgacgccgcccaggccgccggtttccgccggatcaagctgaacgcggtggtgatgaaggggcgcaacgccgatgaggtgccggcgctggtggacttcgccatcgcccgcagcctggatatcagcttcatcgaggagatgccgcttggccaggtcggccgcgaacgtggcgagagcttctgctccagcgacgaagtacgcgcgctgatcgcccagcgccacgccttgctcgacagcgccgagcagagcggcgggccggcgcgctacgtgcgcctggtcgagcatccgcagacacgcatcggcttcatctcgccgcactcgcacaacttctgcgccacctgcaaccgcctgcgcctgaccgtcgagggccgcctgctgctgtgcctcggccacgagcattcgctcgacctgcgcgcgctgctgcgccgccacccgctgcacgacgggccgttgctggaagcgatcggcgaggcgctccagcgcaagccggcgcgccatgaattcagcgccgccggcgaggtgcaggtgctgcgcttcatgaacatgagcggcggctga

SEQ ID NO: 319734 - DNA, 819 bp, Pseudomonas aeruginosa
atgagttgctcccactacgaagaacgcgtcgagaaggtcgaactgccgcaactgaaggtcaacggcgtggccatcggcgaagacctgctggcccgcgagctgcaataccacccggcggacagctacgcgctggcgctggaggccgcttgccgtgcgctgatcgtccgccagttgctcctgcaacgggccgacgcgctgggcatcgaggcccgctgcgaagacggcgagacgccggaggaagcgcgcatccgccaattgctggaggaagaggtgcaggtcccggaagccgacgaagacgcctgccggacctggtacgcggccaatccgggacgcctgctcggcccctggcgcctgcaattgcgccatgtgctgctggcctgcgcgccggacgacctggagggccgcgagacggcgcgcaagcaggccgcggagctgctcgacgagttgcgcgggcatcccgagcgcttcgtcgacctggcccggcgtttttccgcctgcccgtcgaaggagtcgggtggcgaccttggctggatcgagccggggcagaccgtccccgaattcgagaagcgcctgctgcgccgcgcgcccgggctgctcgagcatccgctggaaagccgctatggcctgcatgtggtggaactgctggcgcgcgaaggcggcgagccgctcgacttcgacgcggcccgcgcgcaaatcgccgcgcacctgcaagcgcaggtgttgcagcgggccgtggggcagtacatcggcgtgctggcgggagacgcctgcatcgagggcttcgccttcgagggcgcggatggggcgctggtgcaatag

SEQ ID NO: 319735 - DNA, 684 bp, Pseudomonas aeruginosa
atgtcgaccaatcttctgttcttcgggatctatccctatgtcgcgctgctgatctgcctggtcggcagctgggcgcgcttcgacctctcgcagtacacctggaaggccggttccagccagatgctcagcaagaagggcatgcgggtatacagcaacctgttccacgtcggcgtgctgttcatcctcgccggccacttcgtcggcctgctgaccccggcctcggtctaccaccacctgatcagcaccgagaacaagcaactgctggcgatggtctccggcggcttcttcggcgtgctctgcttcatcggcctgagcggactgatcctgcgccgcctgaccgacgcacgggtgcgcgccaccggcaacgcctccgacctgatgatcctgctggtgctctacgcccagctgatcctcggcctctccaccatcgtcgcctcgacccatcacatggatggttcggtgatggtgatgctcgccgactgggcccaggccatcgtcaccctgcgtccgctggcggcggccgaggccatcgcgccggtgggcctggtctacaagctgcacgtcggcctgggccttaccctgttcgtgctgttccccttcacccgcctggtgcacatcgtcagcgcgccggtgtggtacctgggccggcgctaccagatcgtgcgtcagaaacgtcctgcctga

SEQ ID NO: 319736 - DNA, 741 bp, Pseudomonas aeruginosa
atgaacgatcacagccaactgttccgcctgctcgccctgctactggactacccgcgcgccgagctgcgcgaggagagcctcggcctgcatgcgctgatccgcacctgcgaactgccggaagcgctgcgcgacggcctcgcggcgctgctcaacgagctctgccagggcgacctgctggacgtccaggcgcgctacgacggtctcttcgagcgcggccgctcggtctcgctgctgctcttcgagcacgtccacggcgagagccgcgaccgtggccaggcgatggtcgacctgctcgaccgctataccggggccggcctgcagatcgacgtaccggagctgccggactacctgccgctgtacctcgaatacctgtcgctgctgccgttcgcggcggccagcgaagggctcgccgaagtggcgcacatcctcggcctgctggcgctgcgcctggaggaacgcggcagcgcctatgcggcgattttcgaggcgttgctggaactcggcggcgagcgcccggacctcggcgcgttgcgtcgcgaccaggcccaggaacagcgcgacgacagcctggaggccatcgaccgggcctgggaggaaaccccggtgagcttcaccgaccccgccggcggttgcccgtcgagcagcggccgccgtccaacggcgtccaccgaacaaccattgcaatgggtcgcccaaccggtaccgcagatgcagtaccgcgcggcccgcgaaggagtctga

SEQ ID NO: 319737 - DNA, 1542 bp, Pseudomonas aeruginosa
atgaaaattcgttcgcaagtcggcatggtgctgaacctcgacaaatgcatcggttgccacacctgctcgatcacctgcaagaacgtctggaccagccgcgaaggcatggagtacgcctggttcaacaacgtcgagaccaagcccgggatcggctacccgaaggaatgggaaaaccaggagaagtggaagggcggctgggtgcgcgcggcagacggttcgatccgcccgcgcatcggcggcaagttccgcgtgctggcgaacatcttcgccaacccggacctgcccgagatcgacgactactacgaaccgttcgacttcgactaccagcacctgcataccgcgcccaaggccgagcaccagccggtggcgcgcccgcgctcgctggtctccgggcagcgcatggagaagatcgagtggggcccgaactgggaggagatcctcggcaccgagttcgccaagcggcgcaaggacaagaacttcgaccaggtccaggcggacatctacggtgagtacgagaacaccttcatgatgtacctgccgcgcctctgcgagcactgcctgaacccggcgtgcgtggcgtcctgcccgagcggggcgatctacaagcgcgaggaggacggcatcgtcctgatcgaccaggacaagtgccgcggctggcggatgtgcatctccggctgcccgtacaagaagatctacttcaactggaagagcggcaagtccgagaagtgcatcttctgctacccgcgcatcgaggccggccagcccaccgtctgctcggagacctgcgtcgggcgcatccgctacctcggcgtgctgctctacgacgccgaccgtatccacgaagtggccagttgcgagaacgagcgcgagctgtacgagaagcaactggagatcttcctcgatccgttcgacccggcggtgatcgcccaggcgcgcaaggatggggtggccgacagcgtcatcgaggcggcgcagaagtcgccggtgtacaagctggcgatggactggaagctggccctgccgctgcacccggaataccgcacgctgccgatggtctggtacgtgccgccgctgtcgccgatccagaacgccgccgccgaggggcacatcggcagcgacggggtgatcccggacgtcgagtcgctgcgcatccccgtgcagtacctggccaacctgctcaccgccggcgacaccgcgccggtgctgctggcgctcaagcgcctgctggcgatgcgcgcctacaagcgcgccgagcacgtcgaaggccgccaggacctggaggtgctggccaaggtcgggttgagcgtggagcaggtggaggagatgtaccgctacctggccatcgccaactacgaggatcgcttcgtgatccccagcgcgcaccgcgaggaagcgctttccgatgccttcgccgagcgttctggctgtggcttcagcttcggcaacggctgttccggcggcagcaactccgccgtcaacctgttcggcggcaagccgaccaaccgccgcgacgtgatccaggtcgtgcagatccaggagtga

SEQ ID NO: 319738 - DNA, 3786 bp, Pseudomonas aeruginosa
atgagtcacctgctcgaccgcctgcagttcttcaagaagaagcagggcgaattcgccgatggccacggcgagaccagcaacgagagccgcgcctgggaaggtgcctaccggcagcgctggcagcacgacaagatcgtgcgctccacccacggggtgaactgcaccggctcctgctcctggaagatctacgtgaagaacggcctgatcacctgggaaacccagcagaccgactacccgcgcacccgtccggacctgcccaaccacgagccgcgcggctgcccgcgcggggccagctattcctggtacatctacagcgccaaccgcctgaagtacccgaaggtgcgcaagccgttgctcaagctctggcgcgaggcgcgggcgcagcacggcgacccggtgaacgcctgggccagcatcgtcgaggacgccgccaaggcgaagagctacaagagccagcgcggcctgggcggcttcgtccgttccagctgggacgaggtcaccgagatcatcgccgcggccaacgtctacaccgccaagacctacggtccggaccgggtgatcggcttctcgccgatcccggccatgtcgatggtcagctacgccgccggcgcccgctacctgtcgctgatcggcggggtctgcctgagcttctacgactggtactgcgacctgccgccggccagcccgcagatctggggcgagcagaccgacgtgccggagtcggccgactggtacaactccagctacatcatcgcctggggctccaacgtgccgcagacgcggaccccggacgcgcacttcttcaccgaggtgcgctacaagggcaccaagaccgtctccatcaccccggactattccgaggtggccaagctcaccgacctctggctcaaccccaagcagggcaccgacgccgcgctgggcatggccttcggtcacgtgatcctgaaggagttccacctcgaccggccgagcgcctacttcgtcgactactgccgccagtacaccgacatgccgatgctggtgttgctggaagaacacgccggcggcgcgttcaagccgacccgctacctgcgcgccgccgacctggcggacaacctcggccaggacaacaaccccgagtggaagaccatcgcctacgacgagcgcagcggcgggctggtctcgcccaccggcgccatcggctaccgctggggcgagtctggcaagtggaacatcgccgagctggacggcaggagcggtgaccagacccgcctgcaactgtcgctgctcgatggcccggaacatgcctgcgaggtggccttcccgtacttcgccgggcaggagcacccgcacttcaagggcgtcgccaacgacgaggtactgctgcgccgggtgccgttccgcgagatcgtcgcggcggacggcaagcgcctgcgggtggccaccgtctatgacttgcagatggccaactacagcatcgaccgcggcctgggcggcgacaacgtggcgacctcctacgaggacgccgacacgccctataccccggcctggcaggagcgcatcaccggcgtcccggcggcgcgcgcgacgcaggtcgcccgcgagttcgccgacagcgccgacaagacccgcggcaaggcgatggtgatcatcggcgcggcgatgaaccactggtaccacatggacatgaactaccgcgcggtcatcaacatgctgatgatgtgcggctgcatcggccagagcggcggcggctgggcgcactatgtcggccaggagaagctgcgtccgcagaccggctgggcgccgctggccttcggcctggactggagccggccgccgcggcagatgaacggcaccagcttcttctacctgcacagctcgcaatggcgccacgagaagctgtcgatgcacgaggtgctgtcgccgctggccgacgccagccgcttcgccgaacacgccctggactacaacatccaggccgaacgcctcggctggctgccgtcggcgccgcaactgaaccgcaacccgctgcgcatcgccgccgaggccgaggccgccggcctgccggtcgccgactatgtggtgcgcgaactgaagagcggcggcctgcgcttcgccagcgaatcgccggacgatccgcagaacttcccgcgcaacatgttcatctggcgctccaacctgctgggctcctccggcaaggggcacgagtacatgctcaagtacctgctcggggcgaagaacggggtgatgaacgatgacctcggcaaggccggcggtccgcgtcccaccgaggtcgactgggtcgacgacggtgccgagggcaagctcgacctggtcaccaccctggacttccgcatgtcctccacctgcatgtactcggacatcgtcctgccgaccgctacctggtacgagaaggacgacctcaacacctccgacatgcaccccttcatccatccgctgtcggcggccaccgatccggcctgggaagccaagagcgactgggagatctacaaggccatcgccaagaagttctccgctgtcgccgaaggccacctcggcgtggagcaggacctggtcacggtgccgctgctgcatgacacccccaccgagctggcgcagccgttcggcggcgacggccatgactggaagaagggcgagtgcgagccgatgccgggacgcaacctgccgacgctgcacttggtcgagcgcgactacccgaacgtctaccgcaagttcacctcgctcggtccgctgctggacaagctgggcaacggcggcaagggcatcggctggaacaccgagaaggaagtgaagctggtcggcgacctcaaccatcgcgtggtcgagagcggcgtcagccagggccggccgcgtatcgacagcgccatcgacgccgccgaggtggtcctcgccctggctccggaaaccaacggccaggtcgcggtcaaggcctgggaagcgctgtcgaagatcaccggccgcgagcacgcccacctggcgctgcccaaggaggacgagaagatccgcttccgcgacatccaggtgcagccgcgcaagatcatctccagcccgacctggtccggcctcgaggacgagcacgtcagctacaacgccggctacaccaacgtccacgagctgatcccgtggcgcaccatcaccggtcgccagcagttctaccaggaccacccgtggatgcaggcgttcggcgaaggcttcgtcagctaccggccgccggtcaacacccggaccaccgagaagctgttgaacaggaagcccaacggcaacccggagatcaccctgaactggatcaccccgcaccagaaatggggcatccactccacctacagcgacaacctgctgatgctcaccctgtcgcgcggcggtccgatcatctggctcagcgagcacgacgcggccaaggccgggatcgtcgataacgactgggtcgaggtgttcaacgccaacggcgcggcgacctgccgcgcggtggtcagccagcgggtcaaggacggcatggtgatgatgtaccacgcccaggaacgcatcgtgaacgtacccggcagcgagaccaccggcacccgtggcggccaccacaactcggtgacccgcgtggtgctcaagccgacccacatgatcggcggctacgcccagcaggcctggggcttcaactactacggcacggtcggctgcaaccgcgacgagttcgtcgtggtgcgcaagatgagcaaggtcgactggctggacgaaccccgccacggcggactcggcggcgacgccctgccgcaaccgctgccccaggacatttga

SEQ ID NO: 319739 - DNA, 1407 bp, Pseudomonas aeruginosa
atgggcatgatcgccaatacccaactgaaagccgcacggggaccgctgctgctcgactggcgccccgaggaccccgagttctgggcgcgcaacggcaagcgcatcgccagccgcaacctgtggatctcgatccccgcgctgctgctcgccttcgccgtgtggatgatctggagcacggtgactgtgcgcctgaacagcgccggcttcgccttcagcaacgaccagctgttcctgctcgcggcgctgccgtcgatctccggcgccaccctgcgggtgttctattcgttcatggtgccgatcttcggcggtcgtcgctggaccgccctgagcaccgcctcgatgctgatcccgtgcatctggctgggcttcgccgtgcaggacccgagcaccccgtactgggtgttcgccctgatcgcgctgctctgcggcttcggcggcggcaacttcgcctcgagcatgtccaatatcagcttcttctatccgaagagccagcagggcaccgccctcggcctgaatgccgggctcggcaacctcggcgtctcggtgatgcagttcgccgtgccgctggcggtggccggcggcctgttcggcgccttcggcggcgagccgcagcagctcggcgacggcggtcgcctgtggctgcagaacgccggctggatctgggtgccgttcatcgccgtggtatcggtcgcggcctggttcgggatgaacgacatcgccgacgccaaggcctcgttccgcgaccaggcggtgatcttcaagcgcaagcacaactggctgatgtgctggctgtacgtggccaccttcggctcgttcatcggcttctcggccggcttcgcgatgctcagcaagacccagttccccgacgtcaacccgctgcaatacgccttcctcggtccgctggtgggcgccctcagccggcccctgggcggctggctggcggacaagttcggcggcgcgcggatcaccctgtggaactacgcgctgatgatcggcggggtgttcgcggtgatcgccttcctgccgggcgacggcggccagggcaacttcttcggcttccttggcgccttcatcctgctgttcttcttcgccggcatcggcaacggctcaaccttccgcatgatcccggtgatcttccgcaacgagtgggcccggcgggtgcgcgacggccaggccgacgaagccggcgcggcgcgcaacgcgagcatggagtcggccgcggtgatcggcttctccgccgccatcggcgccttcggcgggttcttcatcccgaaggcgttcggcacctcgctgcacatgaccggcagcgccgagggcgccctctacgtgttcatcgcctactacctgagctgcatcgtcgccacctggtggtggtacgcgcgcaagggtgcggagagtccctgttga

SEQ ID NO: 319740 - DNA, 126 bp, Pseudomonas aeruginosa
atgccgttgacccacatcgaggcgatgtacagcacggtgccgatggtggccagccagaagtgcgcgttgatcaggccgatgctgtgcatctgcgggcgaccgaagactttcgggatcaggtggtag

SEQ ID NO: 319741 - DNA, 771 bp, Pseudomonas aeruginosa
gtgcacgtggccgatggtccagtcggtgtagtgggagagggcgttgacggtcttgatcgccatcatcgggccttcgaaggtggacatgccgtagaaggccagggacaccaccaggaagcgcaggatcgggtcggtgcgcagcttatgccaggcgccggagagggtcatcatgccgttgatcatgccgccccagctcggtaccaggaggatcagcgacatcaccatgcccagcgactgcgcccagtccggcagcgcggtgtagtgcaggtggtgcgggccggcccagatgtacagggagatcagcgcccagaagtggacgatggacaggcgataggaatagaccggacgctcggcctgcttgggcacgaagtagtacatcatgccgaggaagccggtggtcaggaagaagcccacggcgttgtggccgtaccaccactggaccatcgcatcggtggcgccggagtaggcggagtaggacttgaaccagctcaccggcagcgacatgtggttgacgatgtgcagcatcgccgtcaccaggatgaaggcaccgtagaaccagttgcccacatagatgtgcttgaccttgcgcttgacgatggtgccgaagaacacgatcgcgtaggtgatccagacgatcgccaggaggatggccagcggccattccagttcggcgtattccttggaggtggtgaaaccctgcggcagggtcagcacggcgcccacgatcacggcctgccaaccccagaaggtgaaggccgccagcgtgtctga

SEQ ID NO: 319742 - DNA, 927 bp, Pseudomonas aeruginosa
atgaccaccttctggagtctgtacatcacagctcttaccgtcggtaccttgatcgccctgctctggctggtcttcgccacccgcaagggcgaggccaagggtactaccgaaaagaccatgggccactcctacgacggcatcgaggagtacgacaacccgctgccgaagtggtggttcatgctgtacatcggcaccatcgtcttctccgtcggctacctggtcctgtacccgggcctgggtaactggaaaggcgtgctgccgggctacgagggcggctggacccaggacaagcagtgggaacgcgagatgaacatcgcccaggagaagtacgggccgatcttcgccaagtacgccgccatgcccatcgaggaagtggccaaggacgagcacgccatgaagatgggcagccgcatgttcgccacctactgctcgatctgccacggttccgacgccaagggcgccctcggcttccccaacctggccgacaacgagtggcgctggggcggtgacccgcagagcatcgagaccaccatcctcggcggtcgccacgcgatcatggcggcctggggcgacatcctcggcgaagacggggtgaagaacgtcgccgcctacgtccgcaccgaactcgccgggctgaagctgccggaaggcaccaaggccgacgtcgaggccggcaagcagatcttctcggtcaactgcgtcgcctgccacggcccggaaggcaagggtaccgccctggtcggcgcgccgaacctgaccaaccccggcgcgttcatctacggctccagctacgcccagctccaacaaaccatccgccatggccgccagggccagatgccggcccaggagccctacctgggcaaggaaaaggtgcacatcctggccgcctacatctacaacctgtcgcacaaccagggcagcaactga

SEQ ID NO: 319743 - DNA, 186 bp, Pseudomonas aeruginosa
atggatatcgggacgctgcgaggactcggcacgctgctgatcatggtcgccttcatcggtctggtgatctgggcctacagcggcaaacgcaagaagagctttgacgaagcgacgatgctgcccttcgcagacgatcccgaagccaaaaagcacgtcgagcaagcttctaggagtaacaaagaatga

SEQ ID NO: 319744 - DNA, 609 bp, Pseudomonas aeruginosa
atgaaacacgaaatactcgagaagaacgtcggcctgctggcgctatgcatggccgtggccgtgagcatcggcggcctgacccagatcgtgccgctgttcttccaggacgtgaccaacaccccggtcgaaggcatgaagccctataccgcgctgcaactggaaggccgcgacatctatatccgcgaaggctgcgtcggctgccactcgcagatgatccgtccgttccgcgccgaaaccgaacgctacggccactactcggtggccggcgagagcgtctgggaccaccccttcctgtggggttccaagcgtaccggtccggacctggcccgcgtcggtagccgctactccgacgactggcaccgcgcacacctgttcaacccgcgcaacgtggtgcccgagtcgaagatgccggcctacccgtggctggtggagaacaagctcgacggcaaggacatcgagaagaagctcgaagtgatgcgcaccctcggcgtgccctataccgacgaagacatcaagggcgccaaggactcgctgaaaggcaagaccgaaatggatgccgtggtcgcctacctgcaggtgctcggcacctcgatcaagaacaaacggtga

SEQ ID NO: 319745 - DNA, 1428 bp, Pseudomonas aeruginosa
atgagcaccactaacccagagtccgcctataactacaaggtggtccgccaattcgccatcatgaccgtggtctggggcatcgtcggcatgaccgtcggtgtcctgatcgccgcccagctggtatggcccgacctgaacttcggcttgccgtggacgagcttcggccgcctgcgcccgctgcacaccaacgcggtgatcttcgccttcggcggttgcgcactgttcgccaccagctactacgcggtgcagcgcacctgccaggtgcgactgttctccgacaccctcgcctccttcaccttctggggctggcaactggtgatcctgctggccgccatcagcctgccgctgggctacacctcgtccaaggagtacgccgagctggaatggccgatcgacatcctgatcacggtggtctgggtcgcctacgcggtggtgttcttcggcaccctggtcaagcgcaaggtcaagcacatctatgtgggcaactggttcttcggcgggttcatcctcaccgtcgccatgctccacgtggtgaacaacctcgagctgccggtgaccttcaccaagtcctactcgctgtacgccggcgccaccgacgccatggtccagtggtggtacgggcataacgccgtgggcttcttcctcaccgccggcttcctcggcatgatgtactacttcgtgcccaagcaggccgagcgtccggtctactcctaccgcctgtccatcgtccacttctgggcgctgatcgcggtgtacatctgggccggcccgcaccacctgcactacaccgcgctgccggactgggcgcagtcgctgggcatggtgatgtcgctgatcctcctggcgccgagctggggcggcatgatcaacggcatgatgaccctctcgggcgcctggcataagctgcgcagcgacccgatcctgcgcttcctggtggtgtccctggcgttctacggcatgtccaccttcgaaggcccgatgatggcgatcaagaccgtcaacgccctctcccactacaccgactggaccatcggccacgtacacgccggcgccctcggctgggtcgcgatggtttccatcggctcgctctaccacctgatcccgaaggtcttcggccgcgagaagatgtacagcctgggcctgatcaacgcgcacttctggctggccaccatcggtaccgtgctttacatcgcctcgatgtgggtcaacggcatcacccagggcctgatgtggcgcgcggtcaacgaggacggcaccctgacctactccttcgtcgaagcgctggccgccggccaccccggcttcatcgtgcgcatgctcggcggtttcatcttcctgctcggcatgttcctgatggcctacaacacctggcgcaccgtcagtgctgccaagccggccgaatacgaagccgccgcacagatcgcctga

SEQ ID NO: 319746 - DNA, 633 bp, Pseudomonas aeruginosa
ttgtcgctgaaatggaaccgcccggccggctcgctgtcggccaccctgattctcgcccatggcgccggggcgccgatggacagcccgttcatggagcgcatcgccgaactgctcgccgcccagggcatcgccgtcgcgcgcttcgagtttccctacatggcccagcgccgcgaggacggccgcaagcgtccgccgaatccgcaggcgcagttgctcgactgctggcggcgagtccatgcgcaggtccgcgagaccctggacgggcccttggccctgggcggcaagtcgatgggcgggcgcatggccagcctgctggccgacgagctgggcgcggatgccctggtctgcctcggctacccgttctacgccgccggcaagccggagaagccgcgggtcgcgcacctcgccgggctgcgcacgccgaccctgatcgtccagggcgagcgcgacgccctgggcaaccgcgaggcggtggcgggctatgcgctggcgccgacgatccgcctgcactggctggccgcggcggaccacgacctcaagccgctgaaggcctccggcctgacccacgagcagcacctggcggcaacggcgcgggaggtggccggcttccttcgcgggctccagggccattaa

SEQ ID NO: 319747 - DNA, 1158 bp, Pseudomonas aeruginosa
atgaacatgcatgccgacggtgagcagatcaccgctatcgatacccgcgaacgcatcctgctgacgggggccaccggctttctcggcggttcggtcgccgcccagctgatcgccgccgggcacggcgccaacctgtccttcctggtccgcgccgaatcccgccagcaggggctcgaacgcctgcgcggcaacctgctgatgcatggcgtcgacgaagccgactgcctggcactgcgggcggagcagatcctctgcggcgatttcctcgacacctcctggctggcccgcgagacgccgcgcctgatgcaggtggagcgggtgatcaattgcgccgccgtggcgtcgttctcgaagaacccgaccatctggccggtcaacgtcgacggcactttcgccttcgccgacgtgctgagccgttcgaagcgactgaagcgtttcctccacgtcggtaccgcgatgtgctgcggaccgcagcgagagtcgccgatcagcgagtcctgggaattcccggcggcggagcagcaactggtggactacaccgcgtccaaggcggaaatcgagcggcgcatgcgcgaggaactgccgggcctgcccctggtggtggcgcggccatccatcgtggtgggccaccgtacccttggctgccaggcctccggcagcatcttctgggtcttccgcatgggcttcgccctggaaagcttcacctgcggcctggacgagcagatcgacgtgattccggtcgactactgcgccgaggcgctgatcggcctggcgctgaagccgtgcctggggcacagcctctatcatatctccgccggccatcgcgcggcctgcaccttcggcgagatcgacgaggccttcgcccgcgccaacggggcggcgccggtaggcgagcgctaccgcaaggtggaggtggacgacctcaaggaactggcgaagagcttcgagtcgcgcatcggcccggccaatccgcgtctggtcctgcgcgcgttgcgcttgtacagcggctttgccgacctcaactacctgttcgacaacagccgtctgctggaggaggggatctccgcgccgccgcgcttcaccgactacctcgacgtctgcgtgcagtcgtcaagcgcggtaagcatcccggcgcagatgcaatgggacttcaagtga

SEQ ID NO: 319748 - DNA, 1566 bp, Pseudomonas aeruginosa
atgcgcaacaatcagcccatcacccagcacgagcgcgtctatccggcggaacaacgcctgatcaccaccaccaatctcaaaggcatcatcacctactgcaacgaagccttcatcgacatcagcggcttcagccgcgaggagctgatgtccgcgccgcacaacctgatccgtcaccccgacgtcccgccggcggtgttcgcccacatgtggaccaccctcaaagccggccgcccgtggatggggatcgtcaagaaccgctgcaagaacggcgaccactactgggtcagcgcctatgtcacgccgatctacgaccagggcgcggtggtcggctacgagtcggtgcgggtcaagccgaccgccgaacagatccagcgcgccgaggccctctaccgtcgcctcggcgccggcaagccggcgatcccccggcgcgaccgctggctgccggtactgctcgactggctgccgttcatcctgatcagccagatcggcttcctcatcggtatctggctgaactcctggtggggcttcatcctcgccggcctgctcgccgttccgctcggcctggccggactgcgctggcagaagcgcgggctgaagcgcctgatgcggctcgccgaacagaccacctccgacccgctgatcgcgcagatgtacaccgacagccgcggcgaccaggcgcgcctggaaatggccatcctcagccaggacgcgcgcctgaagacctgcctgacgcgcctgcaggacaccgccgaatacctcaccgaacaggcgcgccaggccgacaccctggcccaccacagctccgccggtctggaacagcagcgcgcagagaccgaacaggtggccaccgcggtcaacgagatggccgccaccacccaggaagtggcgaacaatgtccagttgaccgccgacgccacacagaaggccaacgaactgacctcgcgcggccgcgacatcgccgcggagacgcgcaacgccatccagcgcctgtcggagtcggtgggcgagaccggggccgcggtgagtcgcctggcccaggacagcaacgagatcggcggcgtggtcgatgtgatcaagggcatcgccgaccagaccaacctgctcgccctcaacgccgccatcgaggcggcgcgggccggcgaccagggacgcggcttcgccgtggtggccgacgaagtgcgctcgctggcgcaacgcaccgcggcctccaccgagcagatccaccacctgatcgccaagttgcagaacaccgccaacgatgcggtacataccatggagagcggcctgcagcaggccgaagccggggtccagcgggtgctggaagccgacagcgcgctggtcggcatcagcgaggcggtcagcaacatcaccgagatgaccacccagatcgccgccgccgcggaggaacagagcgcggtggccgaggaaatcaaccgcaacatcagcaccatcgccgccctggccgagcagacctccgacgaggcgctgcgcacggcgaaactgagcgaggaactgaccaccaccgcgcagagccagtattccctggtcgagcgcttcaaccgctga

SEQ ID NO: 319749 - DNA, 2733 bp, Pseudomonas aeruginosa
atgcctgctttggacagcctgaaaacccttcgcagtctcgctgtggacggcaagacctaccactactacagcctcccggaagccgcccggaccctgggcgatctcggcaagctgccgatgtcgctgaaggtcctgctggaaaacctcctgcgctgggaggacggcagcaccgtcaccggcgacgacctcaaggccctcgccggctggctcagggagcgccgttccgaccgcgagatccagtaccgcccggcgcgggtcctgatgcaggacttcaccggggtgcccgcggtggtcgacctggccgccatgcgcgcggccatggccaaggccggcggcgacccgcagaagatcaacccgctgtcgccggtggacctggtcatcgaccactcggtgatggtcgacaagttcgccagcgaatcggccttcgaacagaacgtcgagatcgagatgcagcgcaacggcgaacgctacgccttcctgcgctggggccagaacgccttcgacaacttcagcgtggtaccgccgggcaccggcatctgccaccaggtcaacctggagtacctgggccgcacggtctggaccaaggacgaggatggcaggacctacgccttccccgacaccctggtcggcaccgactcccacaccaccatgatcaacggcctcggcgtgctcggctggggcgtcggcggcatcgaggcggaagccgccatgctcggccagccggtatcgatgctgatccccgaggtcatcggcttcaagctcaccggcaagctgcgcgagggcatcaccgccaccgacctggtgctgaccgtcacgcagatgctgcgcaagaagggcgtggtggggaaattcgtcgagttctacggcgacggcctggccgacctgcccctggcggaccgcgccaccatcgccaacatggccccggaatacggcgccacctgcggcttcttcccggtggacgagatcaccctcggctacctgcgcctgtccggacgtccggaaagcacggtcaagctggtcgaggcctacagcaaggaacagggcctgtggcgcgagaagggccacgagccggtgttcaccgacaccctgcacctggacatgggcgaagtcgaggccagcctggccggaccgaagcgcccgcaggaccgcgtggccctgcagaacgtcgccagcgccttcaacgagttcctcggcctgcagttgcatccctccagcaccgaagaaggccgcctgctcagcgagggcggcggcggcaccgcggtcggcgccaacgccgccttcggcgagatcgactaccagcacgacggccagacccaccgcctgaagaacggcgcggtggtgatcgccgccatcacctcctgcaccaacacctccaaccccagcgtgatgatggccgccggcctgctggcgaagaaggcggtggaaaaaggcctgcaacgcaagccctgggtgaagagttcgctggcgccgggctccaaggtggtcaccgactacttcaaggccgccggcctgacccgctacctcgacgaactcggcttcgacctggtcggctacggctgcaccacctgcatcggcaactccggcccgctgctggagccgatcgagaaagccatccagcaggccgacctgaccgtcgcctcggtactctccggcaaccgcaacttcgaaggccgcgtgcacccgttggtgaagaccaactggctggcctcgccgccgctggtggtggcctacgccctggccggcagcgtgcggatcaacctcagcgaggaaccgctgggcaccggcaaggacggccagccggtctacctgaaggacatctggccgagccagaaggaaatcgccgaggcgatccagaaggtcgacaccgagatgttccacaaggagtacgccgaggtcttcgccggcgacgagaaatggcaggcgatccaggtgccgcagtcggacacctacgagtggcaggccgactccacctacatccagcatccacccttcttcgaacacatcgccgaggcgccgccggccatcgccgacgtcgagcaggcgcgggtgctggcggtgctgggcgactcggtgaccaccgaccacatctcccctgccggcaacatcaaggccgacagcccggccggccgctacctgcgcgagcacggcgtggaaccgaaggacttcaactcctacggctcccgtcgcggcaaccatgaggtgatgatgcgcggcaccttcgccaacatccgcatcaagaacgagatgctcggcggcgaggaaggcggcaataccctgtacgtgcccagcggcgagaaactggcgatctacgacgcggccatgcgttaccaggaggacggcaccccgctggtgatcgtcgccggcaaggaatacggcaccggctcgtcgcgcgactgggcggccaagggtaccaacctgctgggcgtgaaggcggtgatcgcggagagcttcgagcgcatccaccgctccaacctggtcggcatgggcgtgctgccgttgcagttcgagaacggccaggaccgcaagagcctgaagctgaccggcaaggaggtgctgaacatccgcggcctcggcggcgaactcaagccgcacatgccgctcagcgtggaagtgacccgcgaggacggcagccaggacagcttcaaggtcctctgccgcatcgacaccctcaacgaggtcgagtacttcaaggccggcggcatcctccactacgtgctgcgcagcatgctctga

SEQ ID NO: 319750 - DNA, 1059 bp, Pseudomonas aeruginosa
atgaataccctgttgatgcactgccggccaggcttcgaaggtgaagtctgcgccgaaatcgccgagcatgcagccactctcgagattcccggctatgccaagagcaagccggccagcgcccacgtcgagttcgtctgccaggacgccgacggcgccgagcgcctgatgcgccgcctgcgtttcgccgacttgatcttcccgcgccagtgggcgcgcgggcccggcttcatcgaattgccggaaagccagcgcatcgaggtactgctggcggaactggcgagttatccggtttgcggcagcctctggctggaggtgctggacaccaatgccggcaaggaggtgtcgaccttctgccgcaagttcgagaaaccgctgcgcgcggcgctggtgaaggccgggcggttgcaggaggacccggcgctgccgcgcctgctgctgaccttccgctccggccgggaagtcttcgtcggcctcgccgagccgcgcaacagcgcgctctggccgatgggcatcccgcgcctgaagtttccccgcgaggcgccgagccgttcgacgctgaagctggaggaagcctggcaccagttcatcccgcgcagcgaatgggacaagcgcctggcgccggacatgctcgccgtagacctcggtgcggcgccgggcggctggacctggcaactggttaaccgggagatgcgggtgaccgccgtggacaacgggccgatggcggagaacctgatgtattccgggctggtcgaccaccagaaggtcgacggctaccagtaccgcccgcgccagcgggtcgactggatggtctgcgacatcgtcgagaagccggcacgcaccggtgcgttgatcgagacctggatcggcgaagggctttgccgcgaggcggtggtcaacctcaagctgccgatgaagcagcgctatgccgaggtgcgcaagatcctccagcgcctgcgcgagagctttgacgcgcgcggcctgaaggtagcgatcggctgcaagcagctgtatcacgaccgcgaggaagtgacctgccatctacgccgcctcgaacgctga

SEQ ID NO: 319751 - DNA, 240 bp, Pseudomonas aeruginosa
atgacccattctgtcgacgccattctcgacgccaccggcctgaactgtcccgagccggtgatgatgctgcacaacaaggtccgcgacctggcgcccggcggcctgctcaaggtgatcgccaccgatccctcgacccgccgcgacatccccaagttctgcgtgtttctcggccacgagctggtcgagcagcaggaagaggcgggcacctatctctactggatccgcaagaaggccgactag

SEQ ID NO: 319752 - DNA, 1311 bp, Pseudomonas aeruginosa
atgaacgcagcaatccatccccgtccggccgcggaacgcgcgccgtcctactacgccgccacgctcaacgaggaaaccgactatccgaccctgctgggcgcggtgacggtcgacatcgccatcatcggcggcggcttcaccggcgtcgccacggcggtcgaactggccgagcgtggctacaaggtagccctggtcgagacccatcgcatcggctggggcgccagcgggcgcaacggcggccaggtcaccggcagcctgtccggcgacgcggcgatgcacaagcagatgcgccaatggctgggcgccgaggtcgaggacttcatctggcacctgcgctggcgcggccacgagatcatccgccagcgggtggagaagtacggcatcgcctgcgaccttcgccatggccacctgcacgcggcgatgaaggccagccacatgggcgagctgcaggcctcctacgaggaggcggtgcgccgcggcatgggcgaccaggtggtcctgctggacaaggccggcgtccaggcccacctggagaccgagctgtactgcggcgcgctgaagaacacccgcaacatgcacctgcacccgctcaacctgtgcatcggcgaggccagggcggcggccggcctcggcgcgctgatcttcgaacattccgaggtgctggatatcgtccatggcccgcggccggcggtgattacccgcgagggaaggatcgaggcgcagcagatcctgcttgccggcgatgtctaccacaagctcgaacgcaggcagctcaaggggatgatcttcccggccatgggcggaatcgttaccacccggccgctgggcgagctggcacgggagatcaacccgcaggggctggcggtctacgattgccgcttcgtcctcgattactaccgccccaccgccgacggccgcctgctgttcggtggcggcgccaactactcgggccgcgactcgcgggacatcaccgccgagctgcggccatgcatcgagcgcaccttcccgcgcctgaagggcgtggagatcgagttccagtggagttgcgccatgggcatcgtaatgaaccggatcccccagctcggcaagctctccgacaacgtctggtactgccagggctactcggggcatggcgtagccaccagccacatcatgggcgagatcatggccaaggcgatgagcgggagcctggagcagttcgacaccttcgcccgttgcaagcacctcagggtgccgctgggcgacctcttcggcaatccgatgctggccgccgggatgtggtactaccagctcatggagaagctgcgctga

SEQ ID NO: 319753 - DNA, 1365 bp, Pseudomonas aeruginosa
atgaacttcgcctgcgaacaagaagcccaggatttcctggccgccaaccccgacatcgaactcttcgaactgttcattctcgacgccaacggcgtgccgcgcggcaagctgctgcaccgcgacgagctgctggccgtctaccgcagcggccggccgctgccgagcaccatcctcgggctgacgatgaacggcgaggacgtcgaggactccggcctggtctgggacgtcggcgacatcgactgccgcgcctaccccctgtccggcagcctggtgcgcctgccctggcgacagatcccgacggcggcggtgcaggtcagcatgcacccgagcgagggcctgcccgccagcgtcgccgatccgcggcacctcctggtgcgaaccatcgacgcgctgaagagcgagggctatcacccggtgatggccgccgagctggagttctacctgctcgaccgtgagcgcgacgccaacggccgcccgcaaccggcccgcgacgccgatggcggccgcccacgggcgacccaggtctacggcctgcgcgaactggagcagatcgagccgttcctcgccgacctctatgccgcctgcaaggcgcagggcctgccggcacgcacggcgatctcggaatatgccccgggccaggtggaaatcaccctcgaccacggcgacgccctcgccgccatggaccaggcgatccgctacaagcgcctggtcaagggcatcgcgcacaagcacgggatgctcgcctgcttcatggccaagccgttcgacgacctggccggcactggcatgcacctgcacgtcagcctggccgacgaacaaggccacaacctgttcgccagcgacgaccccgccggcacgccgttgctgcgccaggcggtcggcggcatgctcgccagcctgctcgactcgctcctgctgttctgtcccaacgccaactcctaccggcgcttccaggccaacagctacgcgccgctggcgcagacctggggcgtcgacaaccgcaccgtgagcctgcgcgtgccgggcggcccggcctccagtcggcatatcgagcaccgcatctgcggcgccgacgccaacccctacctggccgccgcggcgctcctcgccggggtccaccgcggcatccgcgaaggcatcgatccgggtgcgccggtggagggcaacggctacgcccaggccggcaagcgcctgcccaccgactggctgaccgccctcgataccctgcaaggctccgagtgggcgcgggaagccttcggcgagccgttcctcggcgtctacctggcggtgaagcgcgcggaataccggcaattcatgggcgaggtcggcgagcaggactggcgctggtacctgacccaggcctga

SEQ ID NO: 319754 - DNA, 1398 bp, Pseudomonas aeruginosa
atgaccttccgacccttctggctggaccaggccctacgctccgaacatgcggcaccctgcccgccgctggccggggatacccgcgccgacgtgtgcatcgtcggcggcggctacaccggcctgtggaccgccatcatgctcaaggagcacgatcccgggctcgatgtggtgctggtcgaggccgacctctgcggcgccggcgccagcggccgcaacggcggctgcgcgctgtcctggtcggccaagttcttcaccctggaacggctgttcggactcaccgaggcgatccgcctggtcaaggcctccgaagacagcatccgggccatcggcgccttctgccagcgctacgacgtcgaggccgactaccggctggacggcaccctctataccgccaccaacccggcccaggtcggcagcaccgacagcgtgatcgccgctctggagcgccacggcatcaactccttcgccaagcgcccgctggccgacgtgcagcgcctggccggctcgcgcaggcacctggagggttggttctcgccggctgccgcgacggtgcaaccaggcaagctggttcgcggcctgcgccgggtcgccctgcaactgggggtacgcctgtacgaaggcacgccgatgcgaggactggagcacggccgcccggcggaagtggtcaccccccacgggcgggtcgtcgccggccgcgtggtgctggcgctgaacgcctggatggcgagggccttcccgcagttcgaacgcagcgtggcgatcgtctccagcgacatgctcatcaccgagccacgaccggacctgttgcaggagatcggcctgaccagcggggtcagcgtgctcgactcacggatcttcgtgcattactaccacaacaccccggacggccggctgatgctcggcaagggcggcaacaccttcgcctacggcggacgcatgctgccggtgttcgaccgcccctcgccgtatctcggacaactgcgtggcagcttgcgggagttcttccccgagttcgccgaggtcgccatcgaggccagctggaacggtccgtcggatcgctcggtgaccggcctgccgttcttcggccggctcgacggccgtgacaatgtgttctacggcttcggctactccggcagcggcgtcggtccatgccacatgggcgggcagatcctttcttcgctggcgctcggcctggacaatccctggacccgttcgccgctgacccaggggccgctcggccgcttcccgccggagccgatccgctatgtcggttcgctgatggtgcgcaacgcgatccgtcgcaaggagcacgccgaagacgccggccggcgcccgcgtcatctcgacgtacgcctggccaggttcgccgccgccgcgggcaaggccgacaagggttga

SEQ ID NO: 319755 - DNA, 354 bp, Pseudomonas aeruginosa
atgcatatcgaacgtttcgaagtcgtcaagcgtcgggccgagatggccctgcacggcaacacggtctacatcggcggccaggtcgcagacgaccccagcggtgacatccaggaccagacccgccagatcctggagaacatcgaccggctgctccagagcgtcggcagcgaccgcggccaggtgctctcggtacgcatactgctagcccaccgggaggactacgccggtctcaaccaggtctgggaccagtggtttcccgaaggccgggcgccgacccgcgcctgtagcctggccgagttgatcgacccgcgctggcgggtggaaatgatcgtcgtcgccgcccgcccgcagtga

SEQ ID NO: 319756 - DNA, 1362 bp, Pseudomonas aeruginosa
atgaatcaacgtcccgggacggcgctgccgtcctctcccgtgtccagcttccagcgctggcgcctgcagatattcgcgatcacctggctggcctacgccgccttctatttcacccgcaaggccttttccgtcgccaagctcggcatcgccgaagatccggacttccagttggacaagatggcgatggccgatctcgacgccatctatctcgccgcctatgccgtcggccagttcacctggggcgtgctggccgaccgcttcggcccgcgcatcgtggtgttcggcggcctgctgatctccgcactggccgcgctggtcatgggcaccttcgccaccctgccgatcttcgccacctgcatggtggtccagggactggcgcagtccaccggctggtcggggctgtgcaagaacatcggcagtttcttcgccacccacgaacgcggtcgggtgctcggcctgtggagcacctgctacgccttcggcggcctggtcgcctcgccgttcgccggctggtgggcgtacagcgtgttcggtacctggcacgcggcgttctactccagcgccgcggtggtcggcggcgtggccctgctgttcctgctgttgcagcgcaaccgcccggaagacgtcggccatcctcccgtcgaaccgcaggccgcgagcgaagccgtgcgctatgccggcttcaggccggaaggcggcaacggcggcagcctgcaggtgctcgccaaggtggtgcgcaaccgcacggtgctctgcctcggcctggcctacttcctgctcaagccggcgcgctacgcgatcctcctgtggggaccggtgatcgtctacgaacgcatgccggcgctcggcaaggtcggcgcggcgatcgttcccaccgccttcgaggtagccggcctgctcggcccgatcctgatcggcttcgcctcggacaagctgttcggcgcacggcgcatgccggcctgcgtgatcagcctgctggcgctgaccgtctgcctggcgctgttcgtcccggcgatgaccaccggcagcattccgatagtggtcggcctgctgttcatgatgggactgaccctgtacggcccggactcgatgatctgcggctccgccgccatcgacttcggcaccagcgaggccgccggcaccgcctccggcttcgtcaatggctgcggttcggtgggcgcgatcctcggcggtctgttgcccggctatttcgacacctacacggtgttcatcggcttcaccatcgcagccctgatcgccaccgcggtgctcctcccgcactggaacagccggcccggcggcgcacgggaaagcctgcggaatatccccagcctggcggacttccgtcccatccgctcctga

SEQ ID NO: 319757 - DNA, 882 bp, Pseudomonas aeruginosa
atgtcggtatcccatgcacagttgaaggctttccatgcggtcgccgtgtacggcagcttcacgcgcgccgccgagcgcctgtttctcacccagccggcggtttccgaccaggtgcgcaagctggaggagcgttacggcgtgctgctgttccaccgtaacaagcgctcggtgcgcctgagcgaactgggcgagcgcctgctcgcggtgacccagcggctgttcgcgatcgaggccgaggcggaggagctgttgtccgcctccagcgccctgcagaccggcaccctgaccctggcggtggatgcgccggtgcacgtattgccgcagatcgcgcgtttctgcgagcgctatccgggcatcgcggtgcgggtggagaccggcaataccgacgagtctctgcagcgactgttcagctaccaggccgacctggctctgttgggccgggacgtcagcgacgagcggttgctttcgctgaccctgcgcaacgacccgatcgtcgctttcgtttcgctcagccatccgtgggccgggcgcgagtcgatccggctcgccgatctcgacgacatgccgctggtgctgcgcgagcagggctcggtgacccgccagaccctggaggaggagatgagccgcgccggcctgcggatccgtccggcgatccaggtcgagggccgcgaggcctcgcgcgaggcggtggtggcggggatcggcgtgggggtggtgtcggccgcggagttcggcgccgacacgcgggtccatgcgctacccatcgtcgattgccagcgacgcctgaccgagaccctggtgtgcctgcgcgaacagcgttcgcggcggatcgtcgagaccttcctcgacctggtcggcgaggacctgccggcgccgagctag

SEQ ID NO: 319758 - DNA, 180 bp, Pseudomonas aeruginosa
atgaattcgcaacacaccgataccgccaagcgccgcgtgatccccttcaatacgcagcagcacaccggtggcgccatcatcgacgcccagggccgggagatcccgatcaccgaggtgatgatccagcgcgcctgccgcgaactggacaggtccctggagcaggaacaaaagcaggcctga

SEQ ID NO: 319759 - DNA, 1146 bp, Pseudomonas aeruginosa
atggacatgtttcgcctggggttggtggtcaatcccctggccgggcttggtggcccggtcgccttgaagggtagcgacggggtggccgccgaggccctggccagaggcgccgaaccacgtgcgctggagcgcacccgggtagccctggagtgcctgttgccgctggtcgagaagatcgagttcctgacctttcccggggccatgggtggcgagttgctcgagcgcatgggcttccgccatcgcctgctcggcgagtggcagggagtggtcagcagcgcggcggatacccggttggcgatcgagcgcctgcaggaggccggtgtcgccctgatcctgttcgccggtggtgatggcacagcacgggatgttgccggggtggtgcgcgagcaacagccggtgctcggcattccggccggggtgaagatccactccggggtctatgccatcagtccgcgcgcggccggcgaattggccaggcgcctggtcgagggcggcctggtgcgcctggccagcggcgaggtgcgcgacctcgacgaagaggcgctgcgcgccggccgcgtcgccgcgcgttggtacggcgagatgacagtgccggaggagggccacttcatgcagcacgtgaagcaggcagggatggagtccgaggagctggtgctggtggacctcgccgactggctggcggaaaactgggaagacggcgtgcgctatgtgctcggaccgggctcgaccttgcatggcctggcgcgcaatctcggcctggaaaccactctgctgggcgtcgacgtgctggagaatggcgcggtgattgcccgcgacgtcgacgaggcgcggctgttcgaactggtggacggtcatccggcgtacctgctggtcaccgccatcggcggccagggccacgtgatcggtcgcggcaaccagcagatcagtccccgggtgttgcgcgccatcggcctggagcgcatgcgggtggtcgccaccaagcgcaagctggggaccctcgggggccggccgttgctggtcgacagcggcgacccggtgctggacgacagcttcccggacgccatccgggtctgggccggctacaaggaagaactgctgtatccgctgggatacgcgaaggaccaggacgcgcccgcgggtgcttag

SEQ ID NO: 319760 - DNA, 597 bp, Pseudomonas aeruginosa
atggacaaggacgtatccggcgcgctgcgccgcctgttgctgctcgccatgctcggactgccgctggtggcggccgctgcggtcgaaccgcagcgactggtggatgcggcgcgtgcccaggtgggcgttaccctgggctacgacccggcctaccggcaactggactatccgggcggcgacgtgccgctgcagaccggggtctgtaccgacgtggtggtccgtgcgctgcgcggacaggggctggatctacagaaggcggtgcacgaggacatgcgtcgccacttcgcggcctacccgcagcaatggggaatgaaaggtaccgaccgcaacatcgatcaccgccgcgtaccgaacctgatgacctggttcagccgccagggcctggccctggcgcctagccgcgacgcttccgcctaccgggccggagacatagtcgcctggcgcctggacaacggcctgctgcatatcggcgtgctttccgatcgcaggctggagggcaggccgctggtgttgcacaacatcggtgccggcgtgcgggaagaggacctgctgttccgctaccaggtcatcggccactaccgcttcccgcagggctga

SEQ ID NO: 319761 - DNA, 282 bp, Pseudomonas aeruginosa
atgttcaaggtcaacgaatacttcgacggcaccgtcaaatccatcgccttcgacatgaccgccggcccggccaccatcggcgtgatggcggcaggcgaatacgagttcggcaccagccagctggagatcatgcatgtggtcgccggcgcgctgacggtcaagctgccgggcagtgacgagtggcaggaatacgccagcggcagccagttcaccgtcccggcgaacagcaagttccagctcaaggtcgcccaggacaccgcctacctctgcgaatatcgctga

SEQ ID NO: 319762 - DNA, 552 bp, Pseudomonas aeruginosa
atgcctcactggctggtaatcgatctggaggccaccaccgcggaaggcggctggcccctggaggaaatggaaatcatcgagatcggcgccaccctggtcgccgccgcggacgcccgcgaactggaccacttccagcgtttcgtacggccggtcaggcggccgctgctgacccacttctgccgcgacctcacgcatatcagccaggccaacgtcgatggcgcagcccatctcaatacggtctgggaagccttcgagcgctggctcgcccagcatcgtccgcgactggccggctgggccagttggggcgactacgaccgccgccagttggagcaggaatggcgccagcacgggctgaccagccagctcaacgaagtgccgcacgtcaatctcaagcaacgcttcggcgaagtccgccagttgccccgcccagtcggcctgaacgcggccctgcaactggccgggatgagtttccagggccagcagcaccgcgccctggaggatgcccgcaataccgcacggctgctgccgctggtattgccggtggagcattga

SEQ ID NO: 319763 - DNA, 867 bp, Pseudomonas aeruginosa
atgactgcggtcgcatttctcggcctgggcacgatgggctacccgatggccgggcacctgcaacgagagggctacgacgtctgtgtctacaatcgctcgtcggccaaggcgctgcgctgggtcgaggagtacgccggacggcgcgccgatacgccgcgcgaggcctgtgctggcgccgagctggtgttctgttgcgtcggtaacgacgacgacctgcgtgccgtggcgctgggcgagcagggcgccttcgccggaatggcgccgggcagcctgttcgtcgaccacaccaccgcttcggcggaagtcgcccgcgagctgtcgctgctggctgccgagcgtgagctgggctttctcgacgcgccggtctccggcggccaggcaggcgcggtcaacggcgccctgacggtgatggtcggtggcgaggaggccttctatcgacgcgccgaaccgctgttgcgcagctatgcgcggatggtccggcgaatgggcgacgtgggtagcgggcaattgaccaagatggtcaaccagatctgcgtcgcggggctgctccagggcctggccgaggcgctgcacttcgcccggtgcgccggtctcgatggcgaggcggcgatgcaggtgatcggcaagggcgcggcccagtcctggcaactggaaaaccgccaccagagcatgctggccggagagttcgacttcggcttcgccgtggactggatgcgcaaggacctgtcgatcctgctcgccgaggcgcggcgcaacggcgcgcagttgccggtcacggcgctggtcgaccagttctacgccgaagtgcaggcgatgggcggcggtcgttgggatacctccagcctgatcgcccggctgcgttcgtga

SEQ ID NO: 319764 - DNA, 342 bp, Pseudomonas aeruginosa
atgcccgtctggctgcaaaccgccttgttgctagcctgttccaacctgttcatgaccttcgcctggtatggtcatctgaagactctcaacagcaagccctggatcatcgccgccctgatcagttggggtatcgcgctgttcgaatacctgctgcaggtaccggccaaccgcatcggctacaccgaactctcggtcggccaactgaagatcatgcaggaagtcatcaccttggcgatcttcgtcccgttcagcgtctacttcatgcagcagccgctgaaactggactacctctgggccggcctgtgcctgctcggcgcggtgtacttcatcttccgcgcctga

SEQ ID NO: 319765 - DNA, 756 bp, Pseudomonas aeruginosa
atgcggttgcacaaacgctcgctggtctgggggctcgccttgagcgggctggccgtcgtgctggcggccgcctggtgggcgagccaggcgtcgcgggagccggctctgtggagcgagctgcgggtgccgccggcgtttgccatcccgcgcgatttcgacctgggcgaataccgcttgagctggggcggcaagagcctcgccctgtcagtggcgggtagcgctcggccgccgttgtgggagagcgagggcggttttctcggggccgggcgggaaagcgccggtcgcctgcagttgcgctgccaggagcagagcctggagagcttcgaactggtcggtcgacgcttgtccctgaaggggcacctgcgctgcgccgatggccggctcagcgcctacgagctgtcgttcgagccgcgccagggcggcgtggaggtgcgcgtcgcgctggcggacagcgagctgaaccgggtcgccctgtcctggcggcgtggagcgggggagcgcttgtccggtatcgtcgatgacgaggcggaaggtcgctcctgggtcttgccggccggggtcgccggctactggagttccgctggcaacgccttcctcggccactcgacggcggcgcaatccctcgacctgcgcgagccgggccgcgtgcaatggcgggcagcgacggagtcggccagggcctggctgttcgctgccggcaaccgcgagcagtggcagcttcgcagcgcgcgtctcgaggcggaaacgcgccgctga

SEQ ID NO: 319766 - DNA, 255 bp, Pseudomonas aeruginosa
atgcaatgtagagccggctgcggcgcctgctgcatagcaccgtcgatttcctctccgctgccgggcatgccggccggcaagcccgcgggcgtacgctgcctgcacctggacgaaaaccatctctgcgggctgttcggccgaccggagcgaccggccgtatgcggccagttcggcgccgatccggaaatctgcggcgacagccgtgagcaggcgctggccctgatcgcggagtgggaagtcatcactgccgcgtga

SEQ ID NO: 319767 - DNA, 609 bp, Pseudomonas aeruginosa
atgcgtggcattttgcgtatgaccgtgctggctgccgcagtgttcggggtggccggcaatgcgctggccgaagactggaagctggccaaggacgaggatggcgtgaaggtctacctcagcagtgtccagggctccaagtacaaggcttatcgcggcgttaccgacatcaaggccgacgtggcgaccatcgaggcgctgcaggaggacgtcaagggttcctgcaagtggatccatgcctgcgctgagatgaaactcctgaagcaggaaggcgccgacgcctggacctactcgaagatcgacatgccctggccagttaccggtcgcgacgtggtcatccatgtcaccaccgagaagactgcggatggcaccgtgatccgtcaccttaaggccgatccgacctatatccccgaggaaaagggccagatccgcgtgcccaagctggtcggcgagtggaagttgcagccgaaggggcagggcgtgacggaagtgacctaccaggtggaaaccgagccgggtggcagcattccttcctggttggccaacagcttcgtggtcgacgcgccgctgaacaccctcaagggcctgcgtagcgctgccgagaagcgctga

SEQ ID NO: 319768 - DNA, 1287 bp, Pseudomonas aeruginosa
atggctgacaaaaaagcgcagttgatcatcgagggctcagcccccgtcgaactgcccgtcctatccggtaccatgggtcccgatgtagtggatgtacggggcctcaccgccacgggccacttcaccttcgatcctggcttcatgtcgaccgcctcctgcgagtcgaagatcacctatatcgacggcgacaaaggcgtcctcctccatcgcggctaccccatcgagcaactggcagagaaatccgactacctggaaacctgctacctgctgctgaacggcgagctgcccaccgccgcgcagaaggaacagttcgtcggcaccatcaagaaccacaccatggttcacgagcagttgaagaccttcttcaacggcttccgccgcgacgcccatccgatggccgtgatgtgcggcgtgatcggcgccctctcggccttctaccacgactccctggacatcaataacccgaagcatcgcgaagtctccgcgcatcgcctgatcgccaagatgccgaccatcgccgccatggtgtacaagtactccaagggcgagccgatgatgtatccgcgtaacgacctgaactacgcggaaaacttcctccacatgatgttcaacaccccctgcgagaccaagccgatcagccccgtgctggccaaggccatggaccgcatcttcattctccacgccgaccacgagcagaacgcctccacctccacggtgcgtctggccggctcctccggcgccaatccgttcgcctgcatcgcctccggcatcgccgccctgtggggaccggcccatggcggcgcgaacgaagcggtgctgcgcatgctcgacgagatcggcgacgtgtccaacatcgacaagttcgtcgagaaggccaaggacaagaacgatccgttcaagctgatgggcttcggccatcgtgtctacaagaacttcgacccgcgcgccaaggtcatgaagcagacctgcgacgaggtcctccaggagctgggcatcaacgacccgcaactggaactggcgatgaagctggaagaaatcgcccgccacgacccctacttcgtggaacgcaacctgtacccgaacgtcgacttctactcggggatcatcctcaaggcgatcggcattccgaccagcatgttcaccgtgatcttcgccctggcgcgtaccgtcggctggatctcgcactggcaggagatgctctccggcccctacaagatcggccgcccgcgccagatctataccggccacacccagcgcgacttcaccgccctcaaggatcgcggctga

SEQ ID NO: 319769 - DNA, 387 bp, Pseudomonas aeruginosa
gtgaaaaaagccgtgaatagcaaacgacctgtaaacctagacctaaggaccatcaaactccctgtcaccgcttacacgtccattctccaccgtatctctggcgtcatcctgttcctcggtattgccgtgctgctgttcgcgctcgacaagtcgctgagttcggaagaaggcttcgagcaggtgaaggcgtgcctgaccagtcccctggccaagctggtgatctggggcctgctgtctgcgctgctgtaccacctggtggccggtgttcgccacctggtcatggacgctggcgtcggcgagacgctggaaggcggtaagcgtggctccaaaatcgtcatcgccatcgcggtggtgctgatcgttctggcgggggtatgggtatggtaa

SEQ ID NO: 319770 - DNA, 375 bp, Pseudomonas aeruginosa
atgggtatggtaactaacgtcacaaacttctcgcgctccggcctctacgactggatggcccagcgcgtttccgcggtcgttctcgcggcttatgtcattttcctgctgggctacctcattgctcaccccaacatttcctacgcggactggcacggcctgttctcgcagggttggatgcgcatcttcagcctgttgaccctggttgccctgagcgtccatgcgtgggtcggtatgtggaccatctccaccgactacctgacttcgatggctctcggcaaggcggcgacagtcgtgcgtttcctcttccaggcggtttgcggcatggcgatgttcgcattcttcgtctggggtgtgcagattctttggggtatgtga

SEQ ID NO: 319771 - DNA, 1773 bp, Pseudomonas aeruginosa
atggctagcattcgtacactttcctttgacgccatcatcgtcggtggcggtggcgccggcatgcgtgccgcgctgcaactggcccagggcggccacaagaccgccgtggtgaccaaggtcttcccgacccgttcccacaccgtatccgcacagggtggcatcacctgcgcgatcgcttcggccgacccgaacgacgattggcgttggcacatgtacgacaccgtcaagggctccgactacatcggtgaccaggacgcgatcgaatacatgtgttccgtcggccccgaggccgtgttcgagctcgagcacatgggcctgccgttctcccgtaccgaaaccggccgcatctaccagcgtccgttcggcggccagtccaaggacttcggcaagggtggccaggccgcccgtacctgcgccgccgccgaccgtaccggccacgcgctgctgcacaccctgtaccaggccaacctgaagaatggcacctcgttcctcaacgagtggtacgcggtcgacctggtgaagaaccaggacggcgcggtggtcggcatcatcgccatctgcatcgagaccggcgagaccgtctacatccgttccaaggccgtggtcctggccactggcggtgccggccgtatctacgcctccaccaccaacgcgctgatcaacaccggtgacggcgtgggcatggccctgcgtgccggcgtgccggtgcaggacatcgagatgtggcagttccacccgaccggcatcgccggcgccggtgtactggtcaccgaaggttgccgcggcgaaggcggttacctgatcaacgcccacggcgagcgcttcatggagcgttatgcgccgaacgcgaaggacctggccggccgcgacgtggtcgcccgttccatggtcaaggaagtcctggccggcaacggcgtgggcccgaacaaggaccacgtgctgctgaagctcgaccacctcggcgaggaagtcctgcacagccgcctgcccggcatctgcgaactgtccaagaccttcgcccacgtcgacccggtcgtcgcgccgatcccggtgatcccgacctgccactacatgatgggtggcgttgccaccaacatccatggccaggccatcacccaggacgccaacggcaacgaccagatcgtcgaaggcctgttcgccgtgggcgaagtggcctgcgtatcggtacacggcgccaaccgcctgggcggcaactcgctgctcgacctggtggtattcggccgtgccgccggtctgcacctggaaaaagcgctgaaagagggcatcgacgcccgcggcgcttccgagagcgacctggaagcctccttcaagcgcctgaacggcgtgaacgagcgcaccagcggcgaagaagtcgctccgctcaagcgcgagctgcaaagctgcatgcagaactacttcggtgtgttccgcaccggcgagtacatgcagaagggcatcgcccagctggccgacctgcgcgagcgtatcgccaacgtcaagatcaacgacaagagccaggcattcaacaccgcgcgcatcgaagcgctggaactgcaaaacctcctcgaggtggccgaggccaccgcgatcgcggccgagcaccgcaaggagtcccgtggcgcccacgcccgtgaagacttcgaggagcgcgacgacgagaactggctgtgccacaccctgtacttcccgggtgagaagcgcgtatccaagcgttccgtcaacttcgcgccgaagaccgttccggcattcgaacccaaggttcggacttactaa

SEQ ID NO: 319772 - DNA, 708 bp, Pseudomonas aeruginosa
atgttgcaagtgagtgtttatcgttacaaccccgacaaagatgctgcgccgtacatgcaggatttccaggtcgacaccaacggcaaggacgtgatggtcctcgacgtgctggcgctgatcaaggaacaggacgagggcttctcctaccgtcgttcctgccgtgaaggcgtctgcggctccgatggcatgaacatcaacggcaagaacggcctggcctgcatcaccccgctgtcggccgccggcctgaagggcggcaagctggtgatccgtccgctgccgggcctgccggtcattcgtgacctggtcgtggacatgagcatcttctacaagcaatacgagaaggtgaagccgttcctgcagaacgatacgccggccccggccatcgagcgtctgcagaccccggaagagcgcgagaagctggacggtctgtacgagtgcatcctgtgcgcctgctgctcgacctcctgcccgtccttctggtggaaccccgacaagttcctcggtccggccgcactgctgcaagcctatcgtttcctggccgacagtcgtgacaccaagaccgaagagcgcctggcttcgctggacgacccgttcagtgtgttccgctgccgcggaatcatgaactgcgtgaacgtttgcccgaagggtctgaacccgaccaaggcgatcggccacgtgcgtaatatgctgctgcagagcggaacctga

SEQ ID NO: 319773 - DNA, 2832 bp, Pseudomonas aeruginosa
atgcacgaaagcgtaatgcagcggatgtggaacagtgcccatctatccggtggtaacgctgcctacgtcgaagagctctacgagctctacctgcacgaccctaacgctgtgccagaagagtggcgcacgtatttccagaagcttcccgccgatggcaatcccgcccccgacgtctcgcactccacagtgcgcgatcatttcgtcctgctggccaagaaccagcgccgtgcccagccggtttccgccggtagcgtgagcagcgagcacgagaagaagcaggtcgaagtccttcgtctcattcacgcttaccgtctccgcggccaccaggcttccaccctcgacccgctcggcctgtggcagcgtcccgcgcctgccgacctgtcgatcgaccactacggtctgacgggtgccgacctggacaccactttccgcaccggtgagctttacatcggcaaggaagaggcgaccctgcgtgaaatcgtcgacagcctgaagagcacctactgcggtaccttcggcgccgagttcatgcacatcgtcgattccgagcagcgcaagtggttcctccagcgtctggaaagcgtgcgtggccgtcccggcttctccgccgaggcgcgtgcgcacctgctcgagcgcctgaccgcggccgaaggcctggagaagtacctgggcaccaagtacccgggcaccaagcgtttcggcctggaaggcggcgaaagcctgatcccgatggtcgacgagatcatccagcgctgcggttcctacggcgccaaggaaatcgtcatcggcatggctcaccgcggtcgcctgaacgtcctggtcaacaccctgggcaagaacccgcgcgacctgttcgacgagttcgaaggcaagaagatcgtcgagctgggctccggtgacgtgaagtaccaccagggcttctcctcgaacgtgatgaccagcggtggcgaagtccacctggcgctggcgttcaacccgtcgcacctggaaatcgtttccccggtggtcgagggttccgttcgtgctcgccaggaccgccgcaaggacagctccggcgacaaggtggtaccgatttccatccacggcgatgccgccttcgcggggcagggcgtggtcatggaaaccttccagatgtcgcagacccgcgcctacaagaccggtggcaccatccacctggtgatcaacaaccaggtcggtttcaccaccagccgccaggacgatgcgcgttccaccgagtacgccaccgacgtggcgaagatgattcaggcgccgatcttccacgtcaacggcgacgatcccgaagccgtgctgttcgtcacccagctggccgtcgactaccgcatgcagttcaagcgtgacgtggtcatcgacctggtctgctaccgtcgccgcggccacaacgaggcggacgagccgagcggcacccagccgctgatgtaccagcagatcgccaagcagcgtactacccgcgagctgtacgccgatgccctggtgaatgccggcgtgctcagcgccgagcaggttcagtcgaagatcgacgactaccgcgacgccctggacaacggcctgcacgtggtgaagagcctggtcaaggaacctaacaaggaactgttcgtcgactggcgtccgtacctgggtcatgcctggaccgcgcgtcacgacacccgcttcgacctgaagaccctgcaggaactgtccagcaagatgctggaagtgccggaaggcttcgtggttcagcgccaggtttcgaagatctacgaagatcgccagaagatggcggccggtggcctgccgatcaactggggcttcgccgagaccctggcctacgcgaccctgctgttcgaaggccatccggtacggatgaccggccaggacgtcggccgtggcaccttctcgcaccgtcacgcggtgctgcacaaccagaaggacgactcggtctacgtaccgctggccaatctgttcgacggccagccgcgcctggatatctacgattccttcctttcggaagaggccgtgctggcgttcgaatacggtttcgccaccaccacgccgaactcgctggtgatctgggaagcccagttcggcgacttcgccaacggcgcccaggtggtcatcgaccagttcatcaccagtggcgaaagcaaatggggccgactctgcggcctgaccatgctgctgccgcacggctatgaggggcagggcccggagcactcctccgcgcgcctggagcgctacctgcagctctgtgccgagcagaacatccaggtctgcgtgccgaccaccccggctcaggtctaccacatgctccgccgtcaggtgatccgcccgctgcgcaagccgctggtggtgatgacgccgaagtccctgctgcgtcacaagctcgccatctcgaccctggaagatctggccaacggttccttccagaccgtgatcccggaaatcgacagcctggatccgaagaaggtcgaccgcgtcgtgctgtgcagcggcaaggtgtactacgacctgctggagaagcgtcgcgcggaaggccgcgaagataccgcgatcgtccgtatcgagcagctgtatccgttcccggaagacgacctggcggaagttctggctccgtacaagaacctcaagcacatcgtctggtgccaggaagagccgatgaaccagggcgcctggttctgcagccagcatcacatgcgtcgtgtcatcgccgcgcacaagaagggcctcaatctcgagtacgccggccgcgaaggctccgctgctccggcttgcggctacgcctcgatgcacgccgagcagcaggaaaaactgctgcaagacgcctttactgtttaa

SEQ ID NO: 319774 - DNA, 1230 bp, Pseudomonas aeruginosa
atggctatcgaaatcaaagccccaaccttcccggaatcggtcgccgacggcaccgtcgccacctggcacaagaagccgggcgaagcagtcaagcgcgacgaactgatcgtcgacatcgagaccgacaaggtggtcatcgaggttctcgccgaggctgacggcgtgctggccgagatcatcaagaacgaaggcgacaccgttctgagcaacgagctgctcggcaagctgaacgaaggcggtgccgccgctccggccgctccggctgccgctgcgcccgccgccgctccggctgcacaggccgccgctccggccgccgctggcggcgacgacgccatcctgtccccggccgcgcgcaagctggccgaggaagccggcatcgatccgaacagcatcgccggcaccggcaagggcggtcgcgtgaccaaggaagacgtggtcgctgcggtcgaagcgaagaagaacgccccggccgccccggccaagcctgccgccccggctgccgaggcgccgatcttcgccgccggcgaccgtgtcgagaagcgcgtgccgatgacccgcctgcgggccaaggtcgccgagcgcctggtcgaggcgcagtccgccatggccatgctgaccaccttcaacgaggtcaacatgaagccgatcatggacctgcgttcgaagtacaaggacctgttcgagaagaagcacaacggtgtgcgcctgggcttcatgtccttcttcgtcaaggccgccaccgaggcgctgaagcgcttcccgggggtcaacgcttccatcgacggcaacgacatcgtctaccacggctaccaggacatcggtgttgccgtttccagcgaccgcggcctggtggttccggtactgcgtaacgccgagttcatgagcctggccgagatcgagggcggcatcgccaacttcggcaagaaggcgaaggaaggcaagctgaccatcgaagacatgaccggcggcaccttcaccatctccaacggtggcgtgttcggttccctgctgtcgaccccgatcgtcaacccgccgcagaccgccatcctcggcatgcacaagatccaggagcgcccgatggccgtgaacggccaggtggtgatcctgccgatgatgtacctggcgctgtcctacgaccaccgtctgatcgacggcaaggaagcggtgagcttcctggtggcgatcaaggacctgctggaagatccggctcgcctgctgctggacgtctga

SEQ ID NO: 319775 - DNA, 1437 bp, Pseudomonas aeruginosa
atgagccagaaattcgacgtggtagtgattggtgccggccccggcggttacgttgccgccatccgcgctgcccagctgggcctgaagaccgcctgcatcgagaagtacatcggcaaggaaggcaaggtggcgctcggcggtacctgcctgaacgttggctgcatcccgtccaaggcgctgctggacagctcctacaagtaccatgaggccaaagaggccttcaaagtccatggtatcgaagccaagggcgtcaccatcgacgttccggcgatggttgcgcgcaaggccagcatcgtcaagaacctgaccggcggcatcgctaccctgttcaaggccaacggcgtgacctccttcgaaggccacggcaagctgctggccaacaagcaggtggaagtgaccggtctggacggcaagacccaggtcctggaagccgagaacgtgatcatcgcttccggctcccgcccggtggagatcccgccggccccgctgaccgacgacatcatcgtcgactccaccggcgccctggaattccaggccgtgccgaagaagctgggtgtgatcggcgccggcgtcatcggcctggagctgggttcggtatgggcccgcctgggtgccgaggtgaccgtgctggaagccctggacaagttcctcccggctgccgacgagcagatcgccaaggaagccctgaaggtcctgaccaagcaaggcctgaacattcgcctgggtgcccgcgtgaccgcttcggaagtgaagaagaagcaggtcaccgtgaccttcaccgacgccaacggcgagcagaaggaaaccttcgacaagctgatcgtcgcggtcggccgtcgcccggtgaccaccgacctgctggccgccgacagcggcgtgaccctggacgagcgtggcttcatctacgtcgacgaccactgcaagaccagcgttccgggcgtcttcgccatcggtgacgtggttcgcggcgcgatgctcgcgcacaaggcctcggaagagggcgtgatggtcgccgagcgcatcgccggccacaaggcgcagatgaactacgacctgattccgtcggtcatctacacccacccggaaatcgcctgggtcggcaagaccgagcagaccctcaaggccgagggcgtcgaagtcaacgtcggcaccttcccgttcgccgccagcggtcgcgcgatggctgccaatgacaccaccggcctggtcaaggtcatcgccgatgcgaagaccgaccgcgtcctgggcgtccacgtgatcggcccgagcgccgccgagctggtacagcaaggcgcgatcggcatggaattcggcaccagcgccgaagacctgggcatgatggtcttctctcacccgacgctgtccgaagccctgcacgaagctgccctggcagtgaatggccatgccatccacatcgccaaccgcaagaagcgctga

SEQ ID NO: 319776 - DNA, 1167 bp, Pseudomonas aeruginosa
atgaatctccacgaatatcagggtaagcagctgttcgctgaatacggcctgcctgtatccaagggctttgccgtagacacccccgaagaggccgcagaagcctgcgacaagatcggcggcagcgagtgggtcgtcaaagctcaggtgcacgccggcggccgcggtaaagcgggcggtgtgaagctggtgaagagcaaagaggacgccaaggcgttcgcccagcagtggctgggcaagaacctggtgacctaccagaccgacgccaacggccagccggtcagcaagatcctggtggagtcctgcaccgacatcgacaaggagctgtacctcggcgccgtcgtcgatcgttccagccgccgcatcgtgttcatggcttccaccgaaggtggcgtggacatcgagaaggtcgcccacgacactcccgagaagatcctcaaggctaccatcgacccgctggtcggcgcgcagccgtaccagggccgcgagctggccttccagctgggcctgaagggcgaccagatcaagcagttcacccatatcttcgtcggcctggcgaagctgttccaggactacgacctggccctgctggaagtgaacccgctggtgatcaagaaagacggcaacctgcactgcctggatgccaagatcaacatcgacagcaacgccctgtaccgtcagccgaagctgcgcgccatgcacgacccgtcccaggacgacgcccgtgaagcccatgcgcagaagtgggagctgaactacgtcgcgctggaaggcaacatcggctgcatggtcaacggcgccggcctggccatgggtaccatggacatcgtcaacctgcacggcggcaagccggccaacttcctcgacgttggcggcggtgcgaccaaggagcgcgtgaccgaagcgttcaagatcatcctgtccgacagcaacgtgaaggctgtcctggtgaacatcttcggcggcatcgtgcgttgcgacatgatcgccgaaggcatcatcggcgccgtcaaagaagtcggcgtgaaggttccggttgtcgtccgcctggaaggcaacaacgctgaactgggtgccaaggtcctggccgaaagcggcctgaacatcatcgcggcaaccagcctgaccgacgctgcccagcaagtcgtcaaggccgcggagggtaagtaa

SEQ ID NO: 319777 - DNA, 888 bp, Pseudomonas aeruginosa
atgagcgtcctgatcaacaaagacaccaaagtcatctgccaaggcttcaccggtagccagggcaccttccactccgaacaggccatcgcctatggcaccaagatggtcggcggcgtgacccccggcaagggcggcaccacccacctcggcctgccggtgttcaacaccgtcaaggaagccgtggaagccaccggcgccgaagcctcggtcatctacgttccggctccgttctgcaaggactcgatcctggaagcggcattcggcggcatcaagctgatcgtctgcatcaccgaaggcatcccgaccctcgacatgctggacgccaaggtcaagtgcgacgagctgggcgtacgcctgatcggcccgaactgcccgggcgtgatcactcccggcgagtgcaagatcggcatcatgccgggtcacatccacctgccgggcaaggtaggcatcgtgtcgcgttccggcaccctgacctacgaagccgtgaagcagaccaccgacgccggcttcggccagtccacctgcgtgggcatcggcggcgacccgatcccgggctccaacttcatcgacatcctgaagctgttccaggaagatccgcagaccgaagccatcgtcatgatcggcgagatcggcggttccgccgaagaagaagccgcggccttcatcaaggccaacgtgaccaagccggtggtgtcctacatcgctggtgtgactgcccctccgggcaagcgcatgggccacgccggcgccatcatctccggcggcaagggcaccgcggacgagaagttcgccgccctgcaggacgccggtgtgaagaccgtgcgttccctggccgacatcggcaaggccctggccgagctgaccggttgggaagtgaagaaggcctga

SEQ ID NO: 319778 - DNA, 1314 bp, Pseudomonas aeruginosa
atgactcatttgaaagggttcgacctgctcgcccttggcttcatgacgttcgcgctttttctcggcgcgggtaacatcatctttcctcccagtgccggcatggcggcgggcgaacacgtatggagcgcggctttcggcttcctccttaccggtgtcggcctgccgttgctgacggtggtcgccctggcccgggtcggaggcggtattggccgcctgacccagccgatcgggcggcgcgcgggagtggcgttcgccatcgccgtctatcttgccatcggcccgctgttcgccaccccgcgtacagccgtggtgtccttcgagatgggcgtcgcacccttcaccggggacggcggcgtgccgttgctcgtctataccgtcgcttacttctccgtggttctgttcctggtgctgaacccgggtcgccttgtcgaccgggtcggaaaggtcatcacgccggtgctgctgtcggccctgctggtccttggcggcgcggcgatcttcgcgccggcgggagagatcggcagcagttccggtgagtaccagagcgcgcccctggtgcagggcttcctgcagggctacctgaccatggataccctcggtgcgctggtcttcggtatcgtcatcgccaccgccattcgcgaccgcggcatcagcgacagccggctggtcacgcgctattccatgatcgccggggtcatcgccgccaccggcctgtccctggtctacctggcgctgttctatctgggcgccaccagccagggcatcgccggcgacgcccagaatggcgtacagatcctcaccgcctatgtgcagcagacctttggcgtttccggcagcctgttgctggcggtggtcatcaccctggcctgcctgaccacggcggtagggctgatcacggcgtgcggcgagttcttcagcgacctgctgccggtttcgtacaagacggtggtgatcgtgttctcgctgttcagcctgctggtcgccaaccagggactgacccagttgatcagcctttcggtaccggttctggtgggactctatccgctcgccatcgtgctgatcgccctgagcctgttcgaccggctctgggtgtcggccccgcgggtgttcgtgccggtgatgatcgtcgcgctgctcttcggcatcgtcgacgggctgggggcggccaagctgaacgggtgggtgccggacgtcttcgccaagcttccgctcgccgatcagagccttggctggctgctgccggtatccattgcgctggtcctggcagtcgtttgcgatcggctgctgggcaagccgcgcgaagcggtcgcctga

SEQ ID NO: 319779 - DNA, 765 bp, Pseudomonas aeruginosa
atgaccgccgaactcggcattttcaacgggcacctgctgcaacacctgctggcggcgctctggttcctgttctgctgggtgggctacacccgctacgccacctggaagggtcgcgacaccgcctgcctggccagcgtcctgcacctctaccgggaggactggatgcgccggttgctgctgcgcgacaaccgtatcgccgacgccagcgtgatcggtaacctggagcgtaatgcgtcgttcttcgcctccagcacgctgatcatcctcgccggcatcctcaccctgctgggctccaccgatcgcgccgtctcggtactggccgacctgccgttcgtggaggaggccagccggggactgtcggaactgaagctgctgtgcctggcagtggtcttcgtctatgccttcttcaccttcagctggtgcatgcgccaatacaacttcgcggcgatcctggtcggctcggcaccgatgatcggcgagcgcaacgtcggcgagctggagcgcaaatcctttgccgagcgtgccgcccgggtcatctcgctggcggccaaccagttcaacttcggcttgcgctcgtactatttcggcctggccatgctcgcctggttcatcaattcctggttcttcatgctggtgacggccggcgtggtgctggtcctgtatcgccgcgaattccattcggacgtactggaggtgatggtctacaccgagaccgcaatcgccgaaagcccgcgggaaggcgagggcggggtgcccaggggctga

SEQ ID NO: 319780 - DNA, 237 bp, Pseudomonas aeruginosa
atgaaaaagaccgtaactcttgccctgctgctcgctgccagccttggcctggccgcttgcgacaagaaagaggaagacaaggcagcggccccggcagctccggctaccgagacccagccgagcgctccggctactccccctgccgagcccagcgccccggcgccgtcgagcgacactccggcaaccccgcagactccggcaccgactccggagcaaccgcaacagaaccagcaataa

SEQ ID NO: 319781 - DNA, 474 bp, Pseudomonas aeruginosa
atgtcggaaaatcctctcctcgagcgcgcccggcgctttctctcggccttgcgtcattgccaggtgctggggttgacggtcgaggccgccgacgagaaaggactgaccctgcgcctgccctacagccaggcgatcatcggcaacccggaaagcggggtcgtccacggcggcgcgatcaccaccctgatggacaccacctgtggtatttccacggtctgcgtgctgccggacttcgagatctgcccgacgctcgacctgcgcatcgactacatgcatcccgccgaaccgcacaaggatgtctatggcttcgccgagtgctaccgggtcacgccgaacgtgatcttcacccgcggcttcgcctaccaggacgatccgggccagcccatcgcccatgtcgtcggcgctttcatgcgcatgggcggttcggcccgcgccggggcggccaggccggccgcgcagggaggtgcggcatga

SEQ ID NO: 319782 - DNA, 447 bp, Pseudomonas aeruginosa
atgagcccgaccagcctcgagcaactggtccgcgacgcgcgtcggaacaacgactacagcccgctggtggagctgatcccgtacgccaagctgctcggcatcgaatgcctgcgcctgggcgacgacatggtcttccgcctgccggcgaacaaggacaacattggcaacccgaccctgccggccatccatggcggcgtgatcgccggcttcatggagcatgcggcgatgttgcacctgctgaccttcatgagcattccgcacctgccgaagatcatcgatttctccatcgactacctgcgtgccgggcacttccgcgatacctacgtgcaatgccaggtctggcgccaggggcgacgggtggcgaacgtcgcgatcaacgcctggcagaccacccagggcgagcccatcgccactgcgcgggcgcatttcaaggtggacgagccgtga

SEQ ID NO: 319783 - DNA, 1233 bp, Pseudomonas aeruginosa
atggatgccttgctgattctgggcggcctgctgctgatggtcgccggctatatctgggtcatcgtcctggccttcggtaccggtctgctgtggggttacggcagccttttcccgccggtggcgctggcctatatcggcgtgcactggcgtacggcgcgcaagggcgtcgggctggccgcgctgggttgcatcccgctggtggtcggcctggcgctgctggccagtcacgacgctgcgcgactggaggcgatcctcagcctgcgctggctgaagccggaggccaggccgccggcggaactggccatcgcgctcagcggggagttcaacggcaagcctttcgcgccgcagagcggcgagttgatcggcggcgtgctgagcctgcgccaggggcacgatttctacgcccagcgcgagctgcagatccgccttccggcacagccgctcggggcgctgcgcctggacgtgctgcccgaggacggcggcgcgttgccagaagtcgagctgagctggctgcaaccggatcaggacctgcccgaggcgcgtcgtctcctgcgtggctataccttgcacctggacctgcggcccaaggcgccgaaccgcctggagggcgagttccacctgagcctgccgagcgactaccggaccaccctcagcggccacgtcgagctgtataccgaccggctgcgctatcggcacggcaaggtcgacctgggctacgactccgacgataccctggccctggtcttgcgcgactatctgcagcgacgtttcgccagccgcgacgtcagcctcgtgcgggcgccgtcctggcgcgcggccagccatgcgcggccgctgcgtatcgaggccctggtggccggccaggctcaggtgctggagctgacgctggagaagaacgcccggcgggagtggacggtgcgcggcgacgcgttccccgccttgccggcggagcctgcgaccgtggccgcggcggcggcgccgcccgagccgcaggcgctgccggcgccgggtaacgccaccctcgacctggagctggtccaggtcgaaccgcagcgctacagccagcgcctggtcaaggccactacggtacgcgggcgtatcgccgagggccgtttcaccggcctcgacagcgaggggcgcctggtgatccgccgggaaatgcccggtgcgggggaggcgagctacctgttgcgcccggcggagatcgcccgtctcgaactgctcgaacgctag

SEQ ID NO: 319784 - DNA, 1905 bp, Pseudomonas aeruginosa
atgagcgtggaaacccaaaaagagacactgggctttcagactgaagtgaagcaactgcttcacctgatgattcattctctctattcgaacaaggaaatcttcctccgcgaactgatttccaacgcctcggacgccgccgacaagctgcgtttcgaagccctggccaatcccgagctgctcgagggcggcgccgagctgaagatccgcgtcagcttcgacaaggaagccaacaccgtcaccctggaagacaacggcatcggcatgagccgcgaggatgtggtgactcacctgggcaccatcgccaagtccgggaccgccgacttcctgaagaacttgtctggcgaccagaagaaggattcgcacctgatcggccagttcggcgtcggtttctacagcgccttcatcgtcgccgacaaggtcgatgtctactcccgtcgcgccggccagccggccagcgaaggggtgcactggtcgtcgaagggcgagggcgagttcgacgtcgctaccatcgacaagcccgagcgcggtacccgcatcgtcctccacctgaaaaagggcgaggaggagttcgccgatggctggcgcctgcgcaacgtgatcaagaaatactccgatcacatcgctttgccgatcgagctgcccaaggaattccacggcgaagaggccgacaagccggccgagccggaatgggaaacggtcaaccgcgccagcgcgctgtggacccgtccgcgcgccgaggtaaaggacgaggaataccaggagttctacaagcacgtcgcccatgacttcgagaacccgctgagctggagccacaacaaggtcgaaggcaagctggaatacacctcgctgctctacgtgccgggccgcgcgccgttcgacctgtaccatcgcgaagcgccgcggggcctgaagctgtacgtacagcgcgtgttcatcatggaccaggccgacgagttcctgccgctgtacctgcgcttcatcaagggtgtggtcgactccaacgacctgtcgctgaacgtctcccgggaaatcctgcagaaggatccggtgatcgactcgatgaagtcggcgttgaccaagcgcgtgctggacatgctggagaagctggcgaagaacgagccggagcagtacaagaccttctggaagaacttcggccaggtcctcaaggaaggcccggcggaagacttcggcaacaaggagaagatcgccggcctgctgcgcttcgcctccaccggcgacgattcgggcgagcagagcgtagcgctggccgactacatcggtcggatgaaggaaggccaggacaagatctactacctcaccggcgagagctactcgcaggtgaagaacagcccgcacctggaagtcttccgcaagaagggcatcgaggtgctgctgctcaccgatcgcatcgacgagtggctgatgagctacctgccggagttcgacggcaagcagttcgtcgatgtcgcccgcggcgacctggacctgggcagcctggactcggaagaggacaagaaggcccaggaagaagtcgccaagagcaaggaaggcctgatcgagcgcctgaagaaggtgctcgacgagcaggtcagcgaagtccgcgtttcccaccgcctgaccgattcgccggcgatcctcgccatcggcgaacaggaccttggcctgcagatgcgccagatcctcgaggccagcgggcagaaagtgccggactcgaagccgatcttcgagatcaacccgcagcatccgctgatcgagaagctggatgcggagccggacgaggaccgcttcggcgagctgtcgcatattctcttcgaccaggccgccctggccgcgggggacagcctcaaggatccgggcgcctacgtacgccgactgaacaagctgctggtggagctgtccgcttaa

SEQ ID NO: 319785 - DNA, 726 bp, Pseudomonas aeruginosa
atgagtgagattcgtgtagagccggtcgcctacgacatcgatgggcagccgtacgaaggtcaactggtgtacgacgccagccacgcggggccgcgcccgggcctgctgatggcgccgaactggatgggcgtgagcgccgccgcgctggacatcgcccggcaggtcgccggccgtgggcacgtggtgctggtggcggacctctacggcagggacgtgcgtccgcagaacggcgacgaggcgggcgcggcgatgatgccgctgaagaacgaccgggccctgctgcgcaagcgcatgcaggcagcgctggcggccttgcgcggacaggcgctcgcggctgtcgatacgacccgccaggctgccttcggtttctgcttcggcggttgctgcgcgctggagctggctcgcgacggcgccgagctgaaggccttcgtgtccttccatggcaccctggatacgccggacccggcgcatgccaggaacatcaagggcgcggtactggtcctcgacggtgcctccgatccgctggtgccgcgcgagcagttgccggccttcgccagggagatgaccgatgccggcgtcgactggcagctcaccagctacggcggcgcggtgcattccttcaccgatccgaacgccaagctgccgggcaagatgcactatgacgccaggacctcccggcgtgccttccaggcgatggacgacctgctggcggaagtcttcgcctga

SEQ ID NO: 319786 - DNA, 822 bp, Pseudomonas aeruginosa
atgagcagtcatcgcccgcaacatcgcctgtccgttcccgatatccagcgccgcaagggtgccggcagcctggtggcgctgaccgcctacagcacgcccatggcccgcctcctcgatccgcatgccgacctgctgctggtcggcgattcgctgggcatggtgctctatggcatgcccagcaccctgggagtgagcctggagatgatggtcgcccacaccctggcggtgatgcgcggcagtcggcgcgcctgcgtggtggccgacttgccgttcgccagctaccaggaatcgccccgacaggcattccgcaacgccgcacgcctgctggccgacagcggcgcccaggcggtgaagctggaaggcggtgaggaaatggaagaaaccgtggacttcctggtacgccgtggcataccggtgctcgcccatatcggcctgatgccgcagcaggtcaacgccatgggcggcttcaaggcccaggggcgtgacccggaaagcgcagaacgggtacgccgcgacggcctcgccatgcagcgcggcggcgccttcgcggtggtcatcgaaggcgtaggcgagccgctggcccgtcgccttagcgaagaactggcgatcccctgcatcggtatcggcgcctcgccggcctgcgacggccaggtactggtcagcgaggacctgctcgggctaagcggcgaacaggtaccgcgcttcgtcgaacgctacgcgcgcctcgaccgggaaatcgacgaggcggcccggcgcttcgccgaggacgtgcgcgaacggcgcttccccgaggccaggcattgcttcgccatgcgcgagtga

SEQ ID NO: 319787 - DNA, 783 bp, Pseudomonas aeruginosa
atgccgcaaacgggacaagaacgcgacctgccgcgattccgcagcctgccctgcgcggtgtacctgcgcgccttcgagatgcccgccgggtaccgggtggagatgcacgagcacccctggggccaactgatgtacgccgccagcggcaccttgcgcgccagcaccgagcggcacagctatctggtgccggcgcagcgggcgctgtggattccgccgggcgtccggcacgccgcggaggcttgcaaccctgtgctgttccgcagtctctacctggatcgttcgctgcccggcggttgccgggtactggaggtgtccggcctgctgcgcgaactgttgctgcgggcggcggagtttccccgtgaatatccgccgggtggcgaggccgagcgtctcatgcaggtggtcgccgatgaggtcgggcgccttcgcgaggcgccgctgaacctgccgttgcctggcgacccgcgcttgcgccggatcaccgacgcgctacaggcggatcccgccgatccgcgcggcatctcggattgggcgggactggtgggggcgtcccgacggaccctggcgcggttgttccgcgagcagacccagttgtcgtttcgcgagtggcgccagcgcctgcgtctgctcaacgcggtcgccgcgctggaggagggcgccagcgtgacgcgggtggccagcgaccttggctacgactccacctctgcgttcatcagcctgttccagcgtcatttcggccagacccccggttgcttcgcccgctccctgcgcttgcccaactga

SEQ ID NO: 319788 - DNA, 1302 bp, Pseudomonas aeruginosa
atgaagaaggcaacacgcatcggcctctgggcctccggcagcctcgtcgcgctcgccgccatcgccctcggctacgcctggcaaccggccatcgggccactggaaggcacacccggtcccttcagcgccgagcagatcgcccgcggcgaacgcctcgccgccctcggcgactgcgcggtctgccacactcgcgaaggcggcccgcgcaacgccggcggacgggccttgccgacgccgttcgggacgatctacagcagcaacctcacgccggatcgcgcgagcggcatcggtggctggtcctaccccgccttcgagcgggccatgcggcatggcgtggcccgcgacggcagctacctgtatccggcgttcccttacaccgccttcaccaggactcgcgacgaagacctgaaggccctgtacgcctacctgatgagccagccggcggtgcacagcgaaacgcctgccaaccagctgccgttccccttcgaccaacgccagctgatggccggctggaacctgctgttcctggagcccggcgcctaccgcgacgagccgacgcgcaaccagcaatggaaccgcggcgcctatctcgccgaaggcctcggccattgcagcgcctgccactcgccgcgcaatgcgctcggcgcggaaaagtccggcagcgcgcacttcgccggcggcgaggcggagggctggaccgcgccagccttgaacgccagttcgccggcgcccatcgcctggagcgaggaggccctctacgcctacctccgccacggctattcggcctaccacggggtcgccagcgggccgatggcgccagtggtcggcgaaggcctggccaagcagtcggacgaggacctgcgggccctggcccattaccttgcgtcctacgccgctgccccggccggggaaaccgatcagcaacaggcgcaacgcctcgaccggcagggctacggccgcgtgcaaccgcccagcggcagcggcgcgcgcctgttcgccggggcctgcctggcctgccaccatgacggcgacggaccgcgcttcttcggcgtgcgtccatccctggcgctgaacagcaatgtgcatgcggacagcccggacaacctgctgcggatcatcctcgacggcatccacagcccggccaccggcgacctcggctatatgcccggcttccgccacagcctcgacgaccggcaagtcgccgccctggccaactacctgcgcgagcgtttcgccggcaagcccgcctggccggacctcgcggccaaggcggcaagcctgcgccgacaggcggcgccctga

SEQ ID NO: 319789 - DNA, 2247 bp, Pseudomonas aeruginosa
atgagcctggccaatccctcgcgacgcggcttcctcaaggccggcggcctgctgctggtcaccgtcaacctgcccgccccgctgctcgcccttgccgagcagggcgccaccgacctgccgctggaccaggtcgactcgttcatcgccattgccgcggacggcaaggtcaccgccttctgcggccacgtcgaccttggtaccggcatccgcacggcactggcgcagatcgtcgccgaagagttggacgtcgcgttcgagcaggtcgagatgatcctcggcgacacccgtcgcacaccggaccaggggccgaccatcgccagcgccagcatccaggtcagcgccgtgccgctgcgccaggccgccgccgaagcccggcgcttcctcctgcgtcaggccggaagccatttcccggtgcatccggacagcctgcgcagcgaaaacggccaggtcttcgccgccgccaatccgcagcgacggatcggctacggcgagttgctgcgaggccagcgcttcaacctgaacatcgacggcaaggcgccgctcaagccgcgcagcgagtaccgtctggtcggcaagccggtgcgtcgggtggacatcccggcgaagctgaccggtcaactgacctatgtccacgacatgcgcttgcccggcatgctgcatggacgagtggtacgcccgccctataccggcgcggatgtcagcgccccgctcggcagcggcctgctggcggtggacgaaagctcggtcgccgggctgccggggctggtcaaggtggtcgtgatcggcgacttcgtcggcgtggtctgcgaacgcgaggagcaggcgatccgcgccgcgcgccagctcaaggtgcgctggaaggactggcagggcctgccgccgctggaacccgaccggctcgaggacacgcttcgccggcatccgaagaagccacgcacgctgcacgactcacccggtctcgagcagcacctcgcgggcatcgcccggccgctgtcggccacctatgtctggccctaccagttgcacgcctccatcggcccttcctgcgccctcgccgaggtcgatgcgcagcgcgctcgcgtctggtccggcacgcagaacccgcacgacctgcgcaacgacctggccaggctgctgcagcgcgagaccggggacatcgaggtgattcgcatggaagccgccggctgctacggacgcaacggcgccgacgacgtcagcgccgacgccgtgctcctggcgcaggcagtgggccggccggtgcgggtacaactgatgcgcgaacaggaacatggctgggaaccgaaaggcaccgcgcaactgatcgaggtccgcggcggtctcgacgagcaaggccgggtggcggcctacgacttcgccacctgctacccctccaacggcgcgccgaccctggccctgctcctcaccgggcggatcccggccaccccgcaggtggccgacatgggcgaccgcaccgcgatcccgcaataccgctacccgcggatgcgggtggtggccaacgacgccgcccctatcgtccgcgcgtcctggatgcgcggcgtctcggcgctgccgaacgtgttcgcccatgagtcctacgtcgacgaactggcgcacctggccggcatcgaccccatcgccttccgccgccgctacctggacgaccagcgcgccctggcgctgatcgacgccctggtcgcccgcgccggctggcagccacgcacctcccccaacccagaggcgcgccgggacggcttgctgaagggacgcggcttcgcctatgcgcgctacttccacagcaagtttcccggtttcggcgccgcctgggccgcctggatcgtcgacgtcgaggtgaacccggagaacggcgcggtgcgcgtcgccaaggtctgggtcgcccatgactgcgggcagatggtcaatcccgatggggtcaggcaccaggtccacggcaacgtcatccagtccaccagccgggtactcaaggagttcgccaccttcgaccgccgtggcgtcaccagcctggaatggggcggctacccgatcctcggcttccccgaactgccggagatcgacgtactgctgctcgaccgccccgagcagccaccgatgggcgctggcgagtcagcctcggtgcccagcgccgcggccatcgccaatgcgatcttcgacgctaccggggcgcgcctgcgacaggtgccgttcactccggaacgcgtactcgcggcgctgcgcagcgcgcaggcctga

SEQ ID NO: 319790 - DNA, 492 bp, Pseudomonas aeruginosa
atgagcgatgcccttgccctgaccgtcaacggtcagtccctgcgcctcgatgtcgcccccgatacccccctgctctatgtcctgcgcaacgacctgcaactgaacggtcccaagttcggctgcggcctcggcgagtgcggcgcctgcaccgtgctgatggatggcgtcgccacccgctcctgcatcaccccggtggaggccgccgtaggccgccgggtggttaccctcgaaggactcggcgatgccgcccatccccatccgctgcaacaggccttcatcgacgaacaggccgcccaatgcggctactgcatcaacggcatggtgatgaccgccaaggcgttgctggatcgcaacccgaaccccagcgacggcgagatccgccaggaattggcctacaacctgtgtcgctgcggcacccatgtggagattctcaaggccgtgcggcgtgccgccgagagcctgaaggagcatcaggaggagcacccggcatga

SEQ ID NO: 319791 - DNA, 423 bp, Pseudomonas aeruginosa
atgtcccgtaacgccccgtaccgcctcgacgaccagatcggcttcatcctgcgccaagccaaccagcgctatgcggcgttgttcgccaatggcatcggcaacggcctgacccccacccagtgggccgccctggtccgcctcggcgagaccggaccctgcccgcagaaccagctcggccgactcaccgccatggacgccgcgaccatcaagggcgtcgtcgagcgcctggacaaacggggactgatccagcgcagcgccgatccggacgacggccggcgcctgctggtcagcctcagtcctgccggacgcgccgaactcgaggccggcctggcggccgcccgcgagatcaaccggcaggccttggcccccctctccccgcaagaacaggaaaccctgcgcgggttgctcgctcgcctgacctga

SEQ ID NO: 319792 - DNA, 906 bp, Pseudomonas aeruginosa
atggcattcctcctgataggcctgagtgaacatagaccgctgccgctcggccagggttcgccgctccgctggctggccctgctgttcggcctgctggcctggcatgccggggctggcgaacgggtgatctatccgcgccactccgaagggcgcaaccccgaaccctacgtcgtcgagctgctgcaactggcgctggccaggagcggcggcgactaccgcctggagcccagcgcgcagcccatgccgcagtcccgtgcgcaactgcgcctggagcaggacgatccgggcctgcaggtgatgtgggcgcagtcccgcgacgacctggaagagaccctgctgccgatccgcattccgatctatcgcggcctgatcggctggcgcattcccctggtcagcgccgccaacaaggatatcctggcctcggcgcggaccctcgacgatctccgccgcctgcgcttcggccagcgccaggactgggccgacacaccgatcctgcgcgccaacggcctggaggtgaagaccagccagaactacgagagcctgttccgcatgctcgatgccggtcgcttcgaggtcttcccccgcgaggtcgtagtgatcgacggagaactggaggacgcctcccgcgccgggctgcacctggcgatcgaccagcacgtggccctgcactaccccgcggccttctatttcttcgtttcgcgtcaacgcccggaactggccgaggccattcgccagggcctggagaaggcgattgccgacggtagcttcgaacggctgttcgagcgacatttcaagacgcggctgggcaagcttgcccttcggcagcggagaataatcgagctgaaaaacccctatcttccaggaaaaactccttttcagcgcgaggcgctctggtaccggccgtga

SEQ ID NO: 319793 - DNA, 999 bp, Pseudomonas aeruginosa
ttgttcgccctgtccctggtgacatccttgacccatgccagggattatcgctacagcgacgctcatgtgcactatgtggatttcttccaggaaagcgaaggcatgccgcggctgctggaggcgatggacaaaggccgggtcgaccatgtgatgctcagcggcgtcgcggtcgccaagaaatggcacgaggacgagccgaagcggccgcgctactacgctggtgacgatgccggagcctattggtacagcgccaccgacgtgatcgtggcggcggcggtgaaatccctgccagccgagcagcggcggcgcgtgcatccgttcctgaccggtttcaacccgaccgacaagaacgccgacgcgcacatccgtcgcatgctggagctggacccgggactctggcagggcatcggcgagatctttacccgtcacgacgacctcaccgcgctgacctacggcgacgtgccgagggccaacaacgaggcgctggcgcgggtctatcacctggccgccgaattcgacctgccggtgttgctgcacgccaacgtcacttccaagcgcgaacgcaacccgctgtacctggcggaaatcgaggagcccctgcgcaatcacccgcatgtgcggttcatctgggcccatgccgggaccagcatggagatccatcgccaccagaagaaactggacttcctcctgccgacccttcggcgtctgctacagcgctacccgaacctctacatcgacctgtcctggtcggtgttgcgcccgtacctgctggacgagcagggcaagcccgatccgcagtggctggcactggtcgagcggtttccgcaacgcttcatgctcggttccgatgtggtcggccagttcgacagcctgcccgagttgatggcgagcttcgatccgttcctcgacgccttgcccgagcaggtcgctcgccaggtggcgcgggacaacttcctggcggtgctgccgcgccagcccgccgatccgcgaggcgaataa

SEQ ID NO: 319794 - DNA, 477 bp, Pseudomonas aeruginosa
atgtccttcatccgttcttgcatcagtcgttccgtcttcctgctcggcgccggcgtcgccgtggcggcgcaggccgaggtgcgtatcgacggccccatcgaatatggcgtgttcgaaagccgctaccaggacttccagcccggcgaacgggtattgacccgtagcgagcagaacatccagcagaccaccgaagtcccggccaagctcggcaccaagttcggcatgcgttatcaactcagcggcaagcaggaaggcgatacgcctttgacgctgctctacctcaccccgggcgtggtcactccggatggtcagcggcatgacaagttcgaagtggtgcagaagctggtgccgggcgcgccgaccgatgtcatggcctacgaattcaccgagccgcacgaagtggtgaagggcgaatggcggttgatggtgttccagggcgatcgcctgctggcggagaaatccttcgacgtgcgctga

SEQ ID NO: 319795 - DNA, 441 bp, Pseudomonas aeruginosa
atggtcaagcgcaccagccacaagcaagccagttgtccagtcgcccgcccgctggacgtgatcggcgacggctggtcgatgctcatcgtgcgcgatgccttcgaaggactgacgcgcttcggcgaattccagaagagcctcggcctggccaagaacatcctggcggcgcgcctgcgcaacctggtggagcacggcgtgatggtggcggtcccggccgaaagcggcagtcaccaggaataccgcctgactgacaagggacgcgcgctcttccccctgctggtggcgattcggcagtggggcgaggactatttcttcgccccggacgaatcccatgtccgcctggtcgagcgcgacagcggccagccggtgccgcgcctgcaggtacgcgccggcgacggcagtccgctcgccgcggaagatacccgggtcagcagggactga

SEQ ID NO: 319796 - DNA, 1626 bp, Pseudomonas aeruginosa
atgtctttgcgcagtatgcccatcgcgacccgtgccgccctgagtttcgccctgatcaccgctctgctggtcatcaccggcatcttttccctgaaccggatgggttcgctcaacgaagcctcttcggacatcagcgacaactggctgcctagcgtccgcgaaagcgccgagttgaacgttctgctcgccgaactgcggcaggtgcaactggcccatgtgctggcggcggacgatagcagcaagcgcttcctggaaagccgcatgacggaaatcggcaaggaactgaccgatcgcgagggcgcctaccaacggctgatcagtggtgccgacgagcgctcgatctacgagcgctacctggctacccggcagacgctcctgcaaagccagcagaccctggtgcagatgtcgcgcagcaagccgctggaagagacccgccagtacaccgaaagcaccttgctcgaccagtaccgcgccacccagcagcaactgcaggcgctgatcgacttcaacgtcaagggcgccagccaggccagccacacggccgatgaggtctatgacagcgccttcgccgcagtgatcggcgtactgctggtcgccggcctcgctaccgtggtactggcctggctgttcacccgcagcatcacccaaccgatcggcgaggcgctgcgagtggccgaggtgatcgcttccggcgacctcaccagccgcatcgacacctctggccgcgacgaaccggccaagctgctggtcgccctccagggcatgcaggcacaactgcgccagaccatccagcagatcggcagctcggcgacccaactggcctccgccgcggaggaactcagcgccgtcaccgagcagggcaaccgctcgctgacccagcagaacgacgaaatccagatggccgccaccgcggtcaacgagatgaccgccgccgtcgaggaagtggcgcgcaacgccagctccacctcggacgcctcgtccgcctccgagcaatcggcgcagaacggacgccagcgggtactggagacggtccaggcgatccgcctgatgagcgaagaagtggacaatacctcggcgctggtcggcggcctggcggaaaaggcccaggacatttccaaggtcctcgacgtgatccgcggtatcgccgaacagaccaatctcctggcgctcaacgcggccatcgaggcggctcgcgccggcgagcagggccgcggtttcgccgtggtcgccgacgaggttcgcgccctcgcccatcgcacccaggaatccacccgcgagatcgagcagatgatcgccaacatccaggaaggcaccggcgccgcggtcggcgccatggacagcagcagcgtacgcgcccgcaacatgctggagatcgccgaagccgccggcctggcgctgaacgagatcgcggagcgggtcggccagatcaacgagcgtaccctggtgatcgccagcgcctccgagcagcaggcccaggtggcccgcgaggtcgaccgcaacctggtgaacatccgcgacatctcgctgcagacgtccgccggctccaaccagaccgccgccgccagccaggaactgtcgcaactggccatcgacctgaacaacatggtcacccgcttcgtcgtctga

SEQ ID NO: 319797 - DNA, 1218 bp, Pseudomonas aeruginosa
atgcgtcgcgtcgttatcaccggtctgggcatcgtttcctgcctcggcaatgacaaagacaccgtttccgccaacctccgtgcgggtcggcccggcattcgcttcaatccgtcctacgccgagatgggcctgcgcagccacgtttccggttcggtcgacctgaacctcgaagagctgatcgatcgcaaggtcttccgcttcatgggcgatgccgccgcctacgcctacctggcgatggagcaggcgatcaaggactccggcctgactccggaacagatttccaacccccgcaccggcctgatcgccggctccggcggcgcttccaccctgaaccagatggaagccatcgacaccctgcgcgagaaaggcgtcaagcgcatcggcccataccgcgtgacccgcaccatgggcagcaccgtatcggcctgcctggccacaccgttccagatcaagggcgtcaactactcgatctcctccgcctgcgccaccagcgcccattgcatcggccaggccatggaacagatccagttgggcaagcaggacgtggtcttcgccggcggcggcgaagaggaacactggagccagagctgcctgttcgacgccatgggcgccctctccacccagtacaacgacactccggaaaaggcctcccgcgcctacgacgccaagcgtgacggcttcgtcatcgccggcggcggcggcatggtggtggtcgaggagctggagcatgcgctcaagcgcggcgccaagatctacgccgagatcgtcggctacggcgccacctccgacggctacgacatggtcgccccgagcggcgaaggcgcgatccgctgcatgcagcaggcgctggccaccgtcgacgcgccgatcgactacctgaacacccacggcacctccaccccggtcggcgacgtcgccgagatccgaggcgtgcgcgaagtgttcggtgacaaggcgccggccatcagctcgacgaagagcctgtccggccactcgctgggcgccgccggcgtgcacgaggcgatctattgcctgctgatgatggagggcggcttcatcgccggctccgccaacatcgacgaactcgacccggaagtggccgacctgccgattctccgcgagacccgcgagaacgccaagctcgataccgtcatgagcaacagcttcggcttcggcggcaccaacgccaccctggtcctcaagcgctggcagggttga

SEQ ID NO: 319798 - DNA, 516 bp, Pseudomonas aeruginosa
atgaccaaacaacacgccttcacccgagaagacctgctgcgctgcagtcgcggcgagctgttcggcccgggtaacgcgcaacttcccgcccccaacatgctgatgatcgatcgcatcgttcacatcagcgatgtcggcggcaagtatggcaagggcgagctggtcgccgagctggatatcaacccggacctgtggttcttcgcctgtcacttcgaaggagatccggtcatgcccggttgcctgggcctggatgccatgtggcagctggtcggtttctacctcggctggcagggcaaccccggccgcggccgcgccctgggttcgggcgaagtgaagttcttcggtcaggttctgccgacagcgaagaaggtcacgtataacattcatatcaagcgcacgatcaatcgttcgctggtcctggccatcgccgacggcaccgtcagcgtcgatggccgcgaaatctacagtgccgaaggcctccgcgtcggcctgttcacctccactgacagcttctaa

SEQ ID NO: 319799 - DNA, 1956 bp, Pseudomonas aeruginosa
atgagccagcgccacggctgggacatccgtacccgcatgctggcgatcagcctgggcccggcgctgctgctgaccctgttgctcaccgcctacttcacctactcgcgcctgcaggacctgcgccaggaactgacccataccggccagttgatcgccgaccagttggcgccggccgccgaatacggcgtgatcgccggcaacacgcccgtgctgcagaagctgctgcaggccaccctcgacaccccgcatgtgcgcttcatcgaggtacgcgaccgcaacgacaatatcctggtgtacgtcgaacagttgcccggcgcgttgcagaacgccgcgccgatcgacatcttccactccaccatccagcgccagcgtatcgccctggccagcgacccgctgctggatggcgccagcgaaggcgacggccagtccggcgaggactacctcggccgggtggtggtcggcatgtccaacgacgccttcagccagcggcaacaggaaatcctcctgaaggccgccctgctggccgccttcgccctgatcctcaccttcctcgtcgcgcgccgcctggcgcagcgcctgtcggcgccgatcagcaccatgggccaggcggtcgaggcgatccagagcggcgactacaagaccagcctgccgatcctcgacgacggcgagatcggcgacctggcccgtcacatcaacaatctcgccagcgggctggaccgcgcgagccgggaacaggaacaggcgatcagccaattgatcagcgcccgcgaggaagcggagcaggcgaaccgggcgaagtccgacttcctggcgatgatgagccacgagcttcgcaccccgatgaatggcgtgctgggcatgctgcaactgctggaaaccaccgagcagacccgcgaacaggccgagtacacggcgctggccaccgagtccaccgaacacctgctgaaggtcatcaacgacattctcgatttctcaaggatcgaacgcggcgcgctggaactggagtgcatccccttcaacctgctggaactggtgcaaggctccgccctggtgttccagcacagcgcccagcaacgcggactggcgctggaattgcagatccaggccggcctggagaatatcgaggtctgcggcgatccgacgcggatccgacagatcctggtgaatctgctgggtaatgcgctgaagttcaccgaggaaggcgccatccatctcagcctggagtggcaggctctcgatcacgacgtactgtggctgacctgcgcggtgcacgacagcggcatcggcatctcgccggaacgcctggaacatatgttcgacgccttccagcaggcggattcgtcgatttcccgacgctacggcggcaccgggctcggcctggcgatcgccaggaccctggcggaacggatgggcggcaccctgcaggcagagagcaaggaaggctcgggatcgaccttcaccctggagattccgctgcccttccagcagtcgccggcgcaccggcagcaggccgccggcgacgccgccccggtcgccgccggtcaggaaatcctcctggtcgaggacaatccggtgaaccagacagtcatagaagccatgttgcgcagcctcggctatcgcgtcaccctggtcgccgacggtatccaggcggtacgcagcgccgagcgccagcgctacgacgcgatcctgatggactgccgcctgccggtgctcgacggctactcggcgacacgggaaatcagggcccaggagaacggccggcaggtaccgatcatcgccctgaccgccaacgccctgcagggcgatcgggagaactgcctgcaggcgggaatgaacgattacctggccaagccattcaaacgggcggaattgcaacgcatactgcaacgctggatcggctcgcagccggaactccccgtgacatcgaacgaaaccggacgaggggagccggaatga

SEQ ID NO: 319800 - DNA, 930 bp, Pseudomonas aeruginosa
atgcgtcgcttgcgccccgcccgccgggctttccaggcgctgctcgcgctcgtcttctgctgtctcccgcatgtcggcgaggccgcgcaactggtcttggtcagcgccaaccagggggccgcggtgaacgcctttcgcgatgccctggcgcagcgacggccgcaggaccaggtggaactgcgcacgcccgcggccctggcggaggggatggtcttcgccgacgacacccgcctgctcctgctcggccccgaggccctggcctggcgcctgcgccagcaccgggcgccgccgaccctggcgctgctgctcaaccgggtcgatggccagcgcctgctgccaggcgccaacggacatggcggacacggcgtcggaggtctctgcgtactctggagcgacccgccggcgtcccgccagctccgcctggcgcgcctgatcctgccgggcatccagcgcatcggcgtgctctacggcaaggacagcgaattcctcctcgacgagcttcgccgcgaggcccgcagccaggggctccagctgttcgtcgccagcagcagcggcaacgacgacccgcgcccgctgcagttcctgctcggcaatagtgacctgctgctcggcatcgacgacaaacagctgtacaactcgcagagcatcaagagcctgctgctcggcagctacgccaagaaccgcgcgctgctcggccccaccgcagccttcgtcaaggccggcagcctggcgagcagctacagcgaccaggaggattggctggacaccctcgacgaattgctcggccaggcgcccaggcactggcccctcagcctctatccagggcatttcaaggtgctcggcaatcggcaggtagcccgttccctgggtatcgacctggccagcgacgccgacctcggccggcgcctcgccgaaggagaagaaccatga

SEQ ID NO: 319801 - DNA, 2109 bp, Pseudomonas aeruginosa
gtgcccatcgcttcacgtgctcccgcctccctgaccctgctggccctgctgttcggcggcaagctcgcggccgccgacctgttcaacgatcccagcggcgttcccgaagtattgaccgcgacacgcctgaaacaatccccggcggaagttcccggcagcatcagcgtgctcgaccgcgagctgatcgtcgccagcggcgcccgcgacattcccgaactgatgcgcctggtccccggcatgatggtcggctacctgtccggcaaccagcccacggtcaactaccacggcaccagcatgtcaggggcgcggcgcctgcaggtgctgatcgacggccgctcggtgtaccgcccgggccttgccagcgtcgactggagcgacctgccgctggccctcgaggatgtcgagcggatcgaagtgttccgtgggccgaataccgtcagctacggcgccaacgctttgatgggggtgatcaacatcatcacccgcgcccccggcgagtcgcccggcacgcgcctgaagtacacggcgggccagcgcggcatccgcgactggtacgccagccagagcatcgccctggaagacagcgacttccgcctgtcgctgtccggccaggaagacgacggcttcgaccgcgaccacgacggtcacgccctgcgcgacggccgccggctcagccgcttcaacctcaacgccagccacagcctggcgccgaaccagagcctggagtggcaactggcggccaaggaaggctcgaaccagcacccctacgcctatcgctcgccgtttccccaggttcccgacgacatcgacaactccgatacgctcgcccacgactatgccggttcgctgcgctggaatgtcgacctcgacccgcgccacagcttctatatacaaggctacgcacagcactgggagcgccggcaggaatggaacgcctgcgaggcggccattgccttcagcccgcaactggcgcagctctgggaactgaacccggactacctgcgcaggttcgccgacgatccgacccggctgccgcccggcagcgcccaggagttgcaactggcgacccaggtcctcgaccagctacgcaacggcggactgcgcccggtctgcggacgggtcgaccgcaacatccgggaaagccgctacgacctggagatgcaggacaccctcagcctgggcgacaacctgcgcctgctgaacggcctgagctaccgctacgaccaggcaaactccgagaccttctacggcggcagggtcagcagccagatctggcggctgttcagccaattggagtggcatgccggcgaacactggctgctgcagggcggggggatgctcgaagacgtcgagggctccggcagttcgttcagcccgcggctggcggtgaactacctgttcaacccccagcacagcctgcgcgcggtctattcggaggcagtgcggtcaccgggcatgtacgaaaacgacgtcgactggcgctaccgggtccgccacctgacaccggcgccctatgggcagagcgaagcctactacttcgccagcgcccacggccccggcgacctgggcaaggaacacacccgttcgcgcgagatcggctacaacggttttttccgcgagaccgggctggccgtggatgtacgcctgttccacgaggaaatcaccggactgatcagcgatccgctcagcgtcgtcgacttcagtccggacaacggcgatcgcatccgcttctccggcgcggaaggccagctcgactggcgcctgggcctacgcgaccgcctgcgcgccacctacgcctatctcgactacgacgccaccagtcgctacgaccggcgcctgaccgcccgccacggcggctcggccggctggatgcacgactggggccaaggctggtccagcgccctcttctattatggcgacgactcgctcaatggacatcgtttcgaacgcgtcgacctgcgcctggccaagcgcattcccctgggcaaggccgccctggaactggccggcgtgctccagcagcgtctcgacgaccaaccgctgacgtttcccgacaaccgctacgacagccgccacctgctctacttcagcgccgaggtgacgttctag

SEQ ID NO: 319802 - DNA, 1023 bp, Pseudomonas aeruginosa
atgacagagcagcaaccgattgccgtgctcggcggcggcagtttcggcaccgccatcgccaacctgctggccgagaacggccaggcggtccgccagtggatgcgcgacccggagcaggccgaggcgatccgcagccgacgcgagaacccgcgctacctgaaaggggtcaaggtgcatcccggggtcgagccggtcaccgacctggagcgcaccctggccgattgccaactgatcttcgtcgccttgccctccagcgccctgcgcaaggtgctgcaaccacaccaggcggcattgacggacaagctgctggtgagcctgaccaagggcatcgaggcgcacaccttcaagctgatgagtgagatcctcgaggaaatcgccccgcaagcccgcatcggggtgatttccggcccgaacctggcgcgcgagatcgcagagcacgagctgaccgccacggtggtcgccagcgaggacgacgagctgtgcgcccgcgtccaggcggccctgcacggccgcaccttccgcgtctacgccagccgcgaccgcttcggagtggaactcggcggtgcgctgaagaacgtctacgcgatcatggccggcctggccgcggcgatggatatgggcgagaacacccgcagcatgctgattacccgcgcgctggcggaaatgacccggttcgccgtcaagctcggtgccaacccgatgacctttctcggcctcgccggcgtcggcgacctgatcgtcacctgttcctcgccgaagagccgcaactaccaggtcggccacgccctcggcgaggggctcagcctggaggaggcggtatcgcgcatgggcgagaccgcggagggtgtgaacactctcaaggtactcaaggaaaagtccgacgagatgcaggtgtacatgccgctggtcgccggtctccatgcgatcctcttcgaaggccgcaccctggcgcaggtcatccagctgctgatgcgcggcgagccgaagaccgacgtcgatttcattcccaccaccggcttctga

SEQ ID NO: 319803 - DNA, 342 bp, Pseudomonas aeruginosa
atgtccgcagacccgcaagcacgcgaatcgatcgccatccgcatcctctggatgctgctgttcgtcctggtctggcaggtcgccgaactgctcctcggggcggtggtggtgatccaactggtctaccgactgatctacggcgcgccgaacggcagcctgatggctttcggcgacagcctcagccagtacctggcgcagatcggccgtttcggtaccttccacagcgacgagaaaccctggccgttcgccgactggccgagcgcccgcgccgccgagggcgaggccgcccacagcgtgccgcccgccgcgcacccggcgcgcgacgaagagccgaagttgtga

SEQ ID NO: 319804 - DNA, 465 bp, Pseudomonas aeruginosa
gtgaaactctggctgttgcgccacggcgaggccgaaccgcacgccagccgggattccgagcggcgcctgaccgcccatggacgcaaggaggtgctgcagagcgccgcgcggctggccgggttgccgctggacgggattctcgccagcccctacgtgcgcgcccagcagaccgccgagctggtgcgcgaggcactgggcctggtcgagccggtcggcaccgcgccctggttgacccccgacgacgatccgcgcgaggtgctcggtttcctcgacgagcgcagcgagcgcaatctcctgctggtcagccaccagcccctggtcggggcgctgggcggtctgctggtgcatggcaaccggcgcgatccgttgccgatgagcactgcctcgctggccgagctggaaggcgacttcgccgccgccgggctgatgaccctggtctcgctgcatcacccgcggcacggctag

SEQ ID NO: 319805 - DNA, 1668 bp, Pseudomonas aeruginosa
gtggtcactgcaaatcgtctgccgctcgaagtcttcttcgagcgcgaaaagcgtcatccgcaacggcgttacctggtgcagcccatcggtggcggccgggtcgaggagctgagctggggcgaggtgggcgaccaggcgcggcgtgcagccgcctggttgcgcagcctggatctccccgccggcagccgtatcgcgatcatctcgaagaactgtgcgcactggatcgtcattgacctggcgatctggatggccgggcacgtttccgtccccctctatcccaatctcaccgccgagtcggcgcgccaggtgctggagcattccgagtcggcggtggtcttcgtcggcaagctcgacgactggccggcgatggcgcccggagtccccgagggcataccgaccgtggccatgccgttgcacccggaagggcgtttcgaccgccagtggagcgacctgcaggcctgcgcgccgctcgaaggcgacacgccgaccgctgccgagcaactcgccaccctgatctacacctccggaaccaccggcgtgcccaagggggtgatgcacaacttcagcagtttcgccttcgccgccagccgcggcgtggaactgttcggcacccgcgaagacgaccggatgctctcctacctgccgctgtgccacgtggcggagcggatgttcgtcgagatggggtcgctctacgggggaaccacggtgttcttcgccgaaagcctggacaccttcgtcgaggacatgaagcgtgcgcggccgaccctgctgttcggcgtgccgcgcatctggaccaagttccagatgggggtgtattcgaagatgccggcgcagaagctcgaccgcctgctgaagctgccgatcctcggccgcatcgtcggtcgcaaggtgctcgccgggctaggcctggacgcggtgcgctacgcgctctgcggcgcggcgccggtacccgaggcgctgctgctctggtatcgccgcctgggcctggatgtgctcgaggtctacgggatgaccgagaacagcggttactcccacgtctgccggcccggcaggcagaagaccggctggatcggccagaacagccccggcgtcgaggtacgcatcagcgacgagggcgaggtgcaggtgcgtagcggcgcgaccatggtcggctactacaaggagccggagaagaccgcagaggtgctcaccgccgacggtttcctgcgcaccggcgacaagggcgagcaggacgccgaaggcaacctgcgcctgaccgggcggatgaaggaaatcttcaagaccagcaagggcaagtacgtggcgccggcgccgatcgagaaccgcctggcggtacacgatcgcatcgagcaggtctgcgtggtcggcgagggcctcagcgcgccgttggggctctgcgtgctctccgaggtcggtcgccgggaggccctcaacgggacccgcggggcgctggaaagcagcctgcgggcgcacctggaacaggtcaacggtgcgcttgacaagcacgagcgcctggtcggcctggtcctggtgcaggaaacctgggcggtggacaacggtttcctcacgccgaccttgaagatcaagcgcaatatggtggaaggtgcctatggctcgcgcttccacgaatgggtggaacgccgcgaggccgtgctctggcacgaatga

SEQ ID NO: 319806 - DNA, 438 bp, Pseudomonas aeruginosa
atgagcctctggcgacaaacgcccgacctggagcaactgaacgcctcgcagaagaacagcatcggcgacctgcttggcatccgcttcgaagccttcgacgacgagtcgctgaccgcgagcatgccggtcgactcgcgtacccaccagccgttcggcctgctgcatggcggcgcctcggtggtcctcgcggaaagcctgggctcgatggccagctacctgtgcgtcgataccagccagtactactgcgtcggcctggaagtgaacgccaaccacctgcgtggcctgcgcagcggccgggtcaccgcggtggccagggcgatccacctggggcgcaccacccatgtctgggacatccgcctcagtggcgacgacggcaagccgagctgcatcgcccgcctgaccatggcggtggtgccattggcgggcagggcgggctga

SEQ ID NO: 319807 - DNA, 825 bp, Pseudomonas aeruginosa
atggaacagatcacccatctcagcagcgggattcccggcgtacgcctgatagacgccgagcacaaccgcttttcctttccccggcacttccacctggagtaccacatcggcttgctgttgcagggccggcatcgctatgccgccggcggcgaacggcgcctggccggggccggcgacgcgttgctgatggcgccggaaagcatccacgacggcagcagcgccggcgaggagggctaccgtatccgcgtcctggcgctcgatgccgactggctggagcgcgccagccgtgacttcagcgacggccgccggggggcgccgcgcctgaccagcagcctggtccgcgacgagcgtctgcagcagcgcctgcgtcagttgcacctgggcatgctcggcggagcggcggcgctggagaaccgtctggccctggaagagcacctctggcaggcgctggcctgcctgctcagcctgggcagcagcctgcgcctggaggagggcgaccgggaaggcttcggccagcgcgactggacgcggctgcgcgactggctggagtcgcgcctggagtacccgccgaacctggaggaactggccgccttctgcggcctgagcccctggcaggtgctgcggcgcttccgccgtcactgcggcctgccgccccaccagtggctgacccaactgcgcctggagcgcgccttgccgctggttctgcgcggcgagcagccattgagccaggtggcccagcagttcggtttctacgaccaggcgcacttcagccgtctgttccggcgcacctatgggttaccgccggcgcgcctgcgccagcgctga

SEQ ID NO: 319808 - DNA, 642 bp, Pseudomonas aeruginosa
atgcaggaattgtctgtcttgctgaccctggcggcggtgttcgccatagccctggtcagccccggtcccgatgtcgccctggtggtgcgcacgtccctgcaccaggggcggcgggccggcctggccagcgcgctggggctggcctgcgggattctcctgcataccaccctggtgctgaccggcgtgtcgctgctgctcagccgtacgcctgtgctgttcgccatcctgcaggcgctcggcgcgctgtacctggcctggctcggcgtcggcgcgctgcgcgcctggctgcggcgcggcgacggccagccgggccggctcgacggggcactgccgccgtcgcccctggggccctggctgcgcggagtggcgaccaatctgttcaatcccaaggcgctggtgttcttcatcgccttgctcggcagcctgattcccgcgcagatgtcgctcggcggcaaactggcggtggcggcgctgctgttcggcatgggcgcctgctggttcggcctgctcagcctgacccttacccgcccggccctgcagacccgcctgttgcgcgcggtgccctggctggacgcggcctgcggggtggtgttcctgctggtggcggcggcgatcctcgagcatctcgtccgctctgcctga

SEQ ID NO: 319809 - DNA, 813 bp, Pseudomonas aeruginosa
atgtcgcaatcggttttcttcgcccacgccaacggcttcccgtcggctacctacgccaagctgttcgaggcgttggcgccggagtaccgggtggatcacctggaaatgcacgggcacgacccgcgtttcccggtgaacgacaactgggacaacctggtggacgaactgctgcaccacctcgccagcctggaacagccggtctggggcgtcggccattccctcggcggcgtgctgcactaccacgcggcgctgcgccggccggaactctaccgcggcgtggtgatgctcgattcgccggtgctgaccctcgccgaccgcctggtgatccgtgccgccaagcgcttcggcttcatcgaccggatcactccggccgggcgcaccctggggcgtcgcgaggcgttccccgacctggaagaggcgcgggcgtacttctccggcaaggcgctgttccgccgcttcgaccccgattgcctggaggcctacgtacgccacgggctggccgacagcggcggcggttccggcctgcgcctgcgcttcgatccggccaccgagatcagcatctaccgtagcgtgccgcacagcagtccggggcgtccacgacagttgcaggtgccgctggcgatggtgcgcgggcggcacagcaaggtggtgttgccgcaccacacccggctgatccgggcgatgccgcgcggcgagttcatgtcgctgcccggcggccacatgttcccgctggagcgcccgcgggaaaccgccgaactgctgaaaggcgtgttcgatcgctggtcgcgggcgaccgaggagcgttcggcatga

SEQ ID NO: 319810 - DNA, 861 bp, Pseudomonas aeruginosa
atgagcctgcaggtcgaggaagtacgcatcagcctgccgcacatcgaactggccgcgcatctgttcggtccgccggacggcaagccggtgatcgccctgcatggctggctggacaacgccatgagcttctcgcgcctggcgccgaagctcgccgggctgcgtatcgtcgccctcgacttcgccggccacgggcattccgcgcatcgtgccgagggcgccagctacctgctctgggactacgcgctggacgtgctgatggtggccgagcaactgggctgggagcggttttccctgttggggcactcgatgggcgccatcgtctcggtgctgctcgccggggccttgcccgagcgcatcgagcggctggcgttgatcgatggcctgattccctacactggcgaagccgacaaggcgccgcagaagctcggcgaagcgctgaaggcgcaactggcgctacgccacaagcgcaagccggtctatgccgagctggaaaaagccgtggaagcgcggatgcgcggggttggcgagatctcccgggaggccgccgaactactcgcccagcgcggcctggaaccggtgcccggtggctatacctggcgcaccgacgcgcgcctgaccctaccgtcgccgctgcgcctgacccaggcccacgcgctgaacttcgtgcgcagcgtggaatgcccggtcagcctggtactggccgaacagggcatgctggcggtggagccgcgcatgcgggcgctgctggagaccctgccgttcgagcggcaccacctgccgggcgggcatcacctgcatctggacgatgaggccggggcgcaggcggtggccagggtcttcgcggccttcttcgcgcgctga

SEQ ID NO: 319811 - DNA, 663 bp, Pseudomonas aeruginosa
atgatcgatctctacaccgccgccacgccgaacggccacaaggtttccatcgccctcgaggaaatgggcctgccctacagggtgcacgcgctgtcgttcgacaagaaggagcagaaggctccggaattcctcaggatcaatcccaacggccgcatcccggccatcgtcgaccgcgacaacgacgacttcgcggtcttcgagtcgggcgcgatcctcatctacctcgccgagaagaccgggcaactgatgcccgccgacgtcaagggccgctcgcgggtgatccagtggctgatgttccagatgggcggggtcggcccgatgcaggggcaggccaacgtgttcttccgttatttcccggagaagttgcagggcgccatcgaccgctaccagcatgagacccggcgcctctacgaagttctcgacggtcgcctgggcgaggccgagtacctcgccggcgactacagcattgccgatatcgccacctatccctgggtgcgcatccacgactggtccggtgtcgccgtcgacgggctggacaacctgcagcgctggatcgccgccatcgaggcgcgtcccgcggtgcagcgcggactgctggtgccgcggcgggagaaggagggcgacgacgccatccgtaccgcccagtcgatgctgacccgttga

SEQ ID NO: 319812 - DNA, 807 bp, Pseudomonas aeruginosa
atgcgagggttcctgttgctatccctgggcgttttcagcttttcggcgctggccgccgaccttcccggcagccatgacctggacatcctgccgcgcttcccgcgcgccgagatcgtcgacttccgtcaggcgccgagtgaggaacggatctacccgctaggggcgatcagtcgcatcagcggtcgcctgcgcatggagggcgaggtgcgcgccgaaggcgagctgaccgcactgacctaccgcttgccgcccgagcacagcagccaggaggcgttcgccgcggcgcgcaccgcgctgctcaaggccgacgccacgccgttgttctggtgcgagcgacgcgactgcggctccagcagcctgctggccaacgccgtgttcggcaatgccaagctgtacggcccggacgagcagcaggcctacctgctggtgcgtctggcggcgccgcaggagaacagcctggtggcggtctactcgatcacccgtggcaatcgccgcgcctacctgcaggccgaggaactcaaggccgatgcgccgctggcggaactgctgccgagcccggcgaccctgctgcgcctgctcaaggccaacggcgaactgaccctcagccatgtgccggcggagccggccggctcctggttggagctgctggtgcggaccctgcgcctggataccggggtgcgggtcgagctgtccggcaagcacgcccaggagtggcgcgacgccctgcgcgggcagggcgtgctgaacagccgcatggagctgggccagtcggaggtcgagggcctgcacctcaactggctgcgttga

SEQ ID NO: 319813 - DNA, 1068 bp, Pseudomonas aeruginosa
atgttcgataacgatcggctgttgcttcgcgtgctgctgttcggtctgctcggtgccagtctctgggtgctggcgccattctggtcggcgctgttctgggccgcggtgctggctttcgccagttggccgctgatgcgcatgctcacgcgcctgctcggtggccgcgagtcgctggcggcgggcctgctgaccctgggctggatcgtcctggtggcattgccgctgatctggctcggcttcggcctggcggacaacgttcgctcgctgatggagctgctgaagaatctccaggtcgagggcctgccgccgccgccttcgtggatggccggcgtaccgctgatcggcgaccgcctgatcggctggtgggactccatcgaccaacagggcgtggcgttcttctacgtgctcaagccctatgtcggcgaggtcggcaactggctgctggcgcgcagcgcgaagatcggcggagggatccttgaactggtcctcagcctgatcctgatcttcttcttctaccgcgacgggccgcgcctggagtccatcgtccaccgtgccctggaacgcctgatcggcaaccgcgcggagcactatcgcgaccttgtcgccggcaccgtacagcgggtggtcaacggggtgatcggtaccgccgcggcgcaagccctgctggcctggatcggcttcatgatcgccggcgtaccgggagccatgctgctcggcctgctgaccttcgcctgcagcctactgatggtcccgccgctggtctggggtccggccaccgcctggctgttcttcaagggcgactatggccacggggtgttcctcggcctgtggggcttcttcatcatcagcggggtggacaacatcctcaaaccctacctgatcagccgtggcggcaacctgccgctggtggtggtgctgctcggggtattcggcggcctgctggcgttcggcttcatgggcctgttcctcggcccgatcctgctggcagtggcctacaacctgctcagcgactggatcgccagcacgccgcggacgccgcccgccgaagggcgcggcccggatgcctga

SEQ ID NO: 319814 - DNA, 1275 bp, Pseudomonas aeruginosa
atgactcacgccttgaatgcccggccgggagcgcaccccggccatcctccggaagaactgctgatcgatgccgaagtcgacgacgaaccagttccgccggcgccgccactacgcccctggctgctcctgctgggcctggtgctggtggcgctgaacctgcgcccggcgctgtccagcctcgcccccctgctcaaccaggtgcgcgacgataccggcctctcggccgctgccgccggcctgctgaccaccgcgccggtactctgcctggggttgttcgcgccgctcgcgccgcgcctggcccggcgtatcggcgccgagcgcagcgtgctgctgatcctcttctgcctggccggcggcatcgtcctgcgcagcctgttcccggtgttcggcctgttcgccggcagcgtcctggccggcgccagcatcggcatcatcggcgtgctcctgccgggcatcgtcaaacgcgacttcccgcgccaggccggggtgatgaccggggtctacaccatggccctgtgcctgggcgcagcgctcgccgccggcgctaccgcgccgctggagaagctcttcggcaactgggaactggcgctggcgttctggtcgctgccggcgatcctcgccgccgccttctggctgccgcagacccgccagggccagcacgcccatcgccaggccttccgtgtcatcggcctgtggcgcgacccgctggcctggcaggtcacgctgtacatgggcctgcaatcgtccctggcctacatcgtcttcggttggctgccgtcgatcctgatcgaccgcggcatgactgcggtagaagccggcctggtgctgtccggctcggtgatgctgcaactgatcaccgccctgctcgcgccctggctcgccgctcgcgccagggaccagcgcctggcggtggtgctggtgatggctaccaccctcgccggcctgctcggcttcctctatgcgccgctgcagaccatctggggctgggcggtcctgctcggcctcggccagggtggtaccttcagcatcgccctggcgctgatcgtcctgcgctcgcgcgacgcccacgtcgcctcgcatctgtcgggcatggcccagggcgtcggctacaccctggcggccatggggccgttcatggtcggcgtggtccacgacctgaccggcggctggaacgcggtcggctatatcttcatcggcgtcgccatcgccgccaccctgttcggcctcggcgccgggcgcagccagtacgtgggggcccgcagcgaacacctgtag

SEQ ID NO: 319815 - DNA, 648 bp, Pseudomonas aeruginosa
gtgaccattcccctcaagcgctccctggtggacatcgccctggagcagatccgccagcgcatcgacgccggccattggccgctcggccagcgcctgccgccggagccggaactcgccgagctgctcggcatgagccgcaacaccgtgcgcgaagcggtgcgggtgctgaccttctccggcgtgctggaagtccgccagggcgacggcacctacgtgcgcgcctgcgccgatccgctggaaaccatgctggtgctggcgcgcagcgcggtgcagcactccctggaggcacgcgggatgatcgagatcgaggcggcgcgcctggcagccgttcgccgcgacgacagcgacctgagcgcattgcgcgaacatctcgacgcttcgcgccagcgctacggcagcgccgacctgcaggactacatagagcacgacgtccgcttccaccaacggatggtcgatgccgcccacaatccggtgctcagcgaactctaccgctatttctcgcaggtcatccggacctcgctggaacgcaccatggccgacccacaaagggcccagccctgcttcgagctgcaccagcaactgctcgacgccatagaacgcggagacccggacgctgccgccgcggccaaccgcgcactgctgatctga

SEQ ID NO: 319816 - DNA, 1530 bp, Pseudomonas aeruginosa
atgcccgatattcgttgtatcgccgtggtcggtaccggtgcgatgggcaccgggatcgcccagatcgccgcccaggccggcctgaccgtatggctgttcgacagccgcgccgaggccgccgccgaggcacgccagcgcctgcggcagaccttcgagagcctgtgcggcaaaggcaagctgagcgccgccgacgccgaggccgcgcaaaaccggctgcgggtggcggaacgcctggaacaactgggcgactgcgaactagtggtggaggccatcgtcgagcgcctggaggccaagcaggaattgctgcgccggctggaagccatagtcgcgccggagagcatcctcgccagcaatacctcgtcgctgtcgatcaccgccatcgccgccgcctgcgagcggccgcagcgggtcgccggctttcacttcttcaacccggtgccgctgatgcgcgtggtcgaggtggtcgacggcctggccagcgctccggaagtcggcgacgccctgctcgccctcgccgcgcgcctgggccaccgcggtgtacggaccaaggacagccccggcttcatcgtcaaccatgccggccgcgcctatggcaccgaggccctgcgcatcctcggcgaaggcgtcgccgaatgcgccgagatcgaccgtgtgctgcgcgagtgtgccggcttccgcatggggccgttcgaactgctcgatcttaccggcctcgacgtgtcgcacccggtaatggaatcgatctaccagcagtactaccaggaaccgcgctaccgcccgcacccgctgacccgccagttgctcgccgccggccgtctcgggcgcaagagcggccagggcttctatcgctacgtcgacggccagccgcaggacaagcccggtccgcaaccggtgccgcaggccgccatccggcccccggtgtggctgggctgcgaaaacgaggacgaccgccgcacgctcgccgaactgctgcatcgcctcggcgtcgagccggaaaccggcgaacgcccttccgccgcagcgctctgcctgctggccgcctggggcgaggacctgagcagcgccgtgcagcgcttcgcctgtcccgccgagcgcagcgtcggcatcgacctgctctgcgacctcgagcgccggcgctgcctgatgctctcgccactgactaccccggccatgcgcgacgccgcccacgcgctactggctggcgacggcgtcggggtcacggtgctgcgcgacagtcccggcttcgtcgtccagcgggtactggcgatgatcgtcaacctcgcctgcgacatcgcccagcagggcattgccagcgtcgaggatatcgaccaggcggtgcacctcggcctcggttatcctcacggcccgctggaatggggcgaccgcctcggcccgcggcgcctgctgagcattctccagcgcttgcagacgcttaccggtgacccgcgctaccggcccagtccctggctgcgccgacgagcgcaactgggcatgtccctgcgcgccggcgaaaccgccgccgtaggctga

SEQ ID NO: 319817 - DNA, 786 bp, Pseudomonas aeruginosa
atgtccgccgatccttcgcccgtggtcctgctcgaatttcccgcagccgatatagccctgcttcgcctcaatcgtccgcaagccaggaacgcgctgaacgacgaagtgcgccagcgcctcgccagccacttccagacgctcggcgcggatccggcgatccgcgtcatcgtgctcaccggcgactcgcgctgctttgcagctggcgccgatctccgcgatctctcgacgagcacggcgatcggcctgtacggccgccacggcgagcgctactgggaagccatcgcgcgctgcccgaagccggtgatcgccgcggtcaacggcttcgccctgggcggcggctgcgaactggcgatgcactgcgacctgatcgtcgccggcgagtcggcacagttcgcccagccggagatcaaggtcggggtgatgccgggtgccggcggcacccagcgcctggtacgggcggtgggcaagttccaggcgctgcgcatgctgttcaccggctgcctggtgaaggctccgcaagcgctggccatgggcctggtcagcgaagtggtggcggacgagtcgacgctggcgcgcgccctggaactggccatggagatcgcccgcctgccccctctggcgctggcgcagatcaaggaggtggtcctggccggtgccgacctgccgctggacagtgccctggccctggaacgcaaggcgttccagttgctgttcgactcgcaggaccagaaggaaggcatgcaggccttcctggagaaacgcccgccgaactaccaggggaaatag

SEQ ID NO: 319818 - DNA, 867 bp, Pseudomonas aeruginosa
atgcgcggcaacgacgagcgccggagtccggcggaaggtgccagtacggaagcggaagtgtccgccttcgaagctgtgctgatcgacccgatgcaggagaaagacgaggaactcaaggaccgccagttcgtcaccgcgctagcccgcgggttggaattgctgcgctgtttcacgccacgggaaagcctgctgggcaaccaggaactggcgaagaagaccggcctgccgaagccgacggtgtcgcgtctgacccacaccctgacccggctgggctatctgcgtcacctgccgcatagcggcaagtatcaattggaagtgggggtgatgtcgttcggctacgcgatgctctcgaacctgtcgattcgcgcgctcgcccgcccgttgatggaagagatggccggctacgccaaggccgcggtggccatggcggcccgcgaccggctgagcatggtctacctcgacgtggtgcatggcgaggccaacctgaccatgcgtcgccaggtcggcagccacctctcgctgcaccgcagcgcgatcggccgggcctgcctggcggcgatgccggaggacgagcgggaattcatcctcgggcacattcgcaagcgccacccggaagactggccggaagtgcgcaaggggctggagcgggccttccgcgactatgccgactacggcttctgcctgtcgcttggcgagtggcaacgcgacgtcaacgcggtgggcgtggccttgcaccatgagagccatgggctgctggcgttcaattgcggcgggccgagtttccatctcaagcgcgagaaactggaggacgacatcggcccgcgcctgctgcacatggtccacaacatcgaggccgccacccgctga

SEQ ID NO: 319819 - DNA, 1155 bp, Pseudomonas aeruginosa
atgattcgtgatccggaaaccctgaacctgctgctggacagcatccgccagttcgtccgcgaaagcctggtgcctcatgagcaggaagtggcggaaaccgaccgcatccccgaggcgatcatcgcccgcatgcgcgagatgggcctgttcggcctgtcgatcccggaggcctacggcggcctcggggtgaccatggaggaagaggtgagcatcgccttcgagctggggcggacctcgccggcgttccgttcgctgctgggcaccaacaacggcatcggctcccagggcatcgtcatcgacggcaccgaagaacagaagcggcgctacctgccgcgcctggcgtcgggcgaactgctcagttcgttctgcctcaccgaaccggactccggttccgacgccgcctcgctgaagaccacggcggtgcgtgacggcgagcactacgtgctcaacggtaccaagcgcttcatcaccaacgccccgcaggccggcatctacaccgtgatggcgcgcaccgacccggcgatccgtggcgccggcggaatctccgctttcgtcgtcgagcgcggtacgcccgggctgtccctgggcaagccggatcgcaagatgggacagaagggcgcgcatacctgtgacgtgatcttcgacgactgccgggtgcctgccagccagttgatcggcggggtcgagggcgtcggcttcaagaccgcgatgaaggtgctcgacaagggccgcctgcacatcgccgcagtctgtgtgggggtcgccgagcggatgctcgaggatgcgttgcgctatgccctggaacgcaagcagttcggccagccgatcgccgagttccagttgatccaggcgatgcttgccgacagcaaggccgaagcctacgcggcgcgctgcatggtcatcgacgccgcgcggcagcgcgacgaaggccgcgatgtcggtaccgaggcgtcctgcgccaagctgttcgcctcggaaatgtgcggccgcgtcgccgaccgcgcggtgcagatattcggcggcgccggctatatcggcgactacgggatcgagcgcttctatcgcgacgtgcggctgttccgcatctacgagggcaccacgcagatccagcaactgctgatcgcccgcaacatgatccgcgccgcccagggctag

SEQ ID NO: 319820 - DNA, 1695 bp, Pseudomonas aeruginosa
atgaacagccacgagattctcttgatcctggcctttttcgccctggtcctggtgcctgcaccgttcctcgggcgctactgcttcaaggtgatggaaggccaacgcaatctcctcagcgcgccgctggcgccactggagcgcgtctgctatcgcctgttcggcgtcgatccggcgagcgagcaggactggaagacctacaccctggcgctgctggcattcaacctggccggcctggtcctgctgttttcgatcctcatgctgcagggcagcctgccgctgaacccgcagcacctgccgggcctggaatggacactggcgttcaacaccgcggtcagtttcgtcaccaacaccaactggcaggcctacagcggcgaggcctcgctgagctacttcagccagatggtcggcctcacggtgcagaacttcgtcagcgcggcggtcggcctctgcgtgctggtggccctggcgcgcggcatcagccgccgctccacacgacagctgggcaacttctgggtcgacctgacccgcggcaccctctacgtgctgctgccgctgtgcctgctgctggcgttgctgctggtctggcagggcgtgccgcagaccttcttcgactatgtccatgccaccaccttgcaaggcgccgagcagaccatcccgctcggcccggcggccagccagatcgccatcaagcagctgggcaccaatggcggcggcttcttcggcgtcaactcgacccatccgttcgagaacccgagcgcctggagcaacctgttcgaagtggcctcgatcatcctgatcccggcggcgctggtattcaccttcggccattacgtgaaggacctgcgccagagccgcgcgatcctcggctgcatgctgctgctgttctgcctcggcctgggcctgtcgctgtgggccgaataccagccgaatccggcgctggcgcagttgccgatcgagcagggcgcgccgatggagggcaaggagagtcgcttcggcaccgccgccagcatgctctgggcgatcaccaccaccgccgcctcgaacggctcggtgaacgccatgcacgacagcctgagccccctgggcggcatgctgccgctgctgaacatgatgctcggcgaggtgatcttcggcggcgtcggcgccggcctctacggcatgctgctgttcgtcctgatcgcggtgttcctcgccggcctgatggtcgggcggacgccggagtacctgggcaagaaactcgaggcgaaggaggtccgcctgctggtattcaccctgctggtgatgcctgtcggcgtgctggtgctcggcgccatcgccgccagcctgccggggccggcctcggcggtgaccaatcccggcccgcacggcttcagccaactgctctacgcctacacctcggggagcgccaacaacggctcggcgtttgccggtttcggtgccaacacgccgttccacaacctgatgatcggcctggccatgctcatcggccgcttcggctacatcctgccgatcctcgccatcgccggcagcctggcggcgaagaaggccagcccggtggggccgaacagtttcccgacccatggtccgctgttcgccagcctgctcaccgtgaccatcctgctggtcggcggcctgactttcctgccgaccctggccctcggcccgatcgctgaacaactgagcctcggcttctga

SEQ ID NO: 319821 - DNA, 2073 bp, Pseudomonas aeruginosa
atgaacgctcagacccaggcgtccaagaacgccttgcacaaatcgctcgaacgtcgccacaacgcgtccaccagcctcgccgccttgtggcggccggcgctgctgcaagccttcgtcaagctcgacccgcgccagttgctgcgctcgccggtgatgctggtggtcgaactgaccgccgtgctcaccaccttgctgtgcttcgtccccgaccaggcggtgccgacctcggtggcgctgcagatcgccctctggctgtggttcaccgtgctcttcgccaatttcgcggaagcgctcgccgagggacgtggcaaggcccgcgcggacagtctcaaggccggcagccagggcctctccgccaataagcggcgcgccgacggcagtttcgagagcgtcgttgccagcagcctgcgcaagggcgatgtggtacgggtccaggccggcgagatgattcccggcgacggcgaagtcatcgaaggcgtggcggcggtcaacgaggccgccatcaccggcgaatcggcgccggtgatccgcgagtccggcggcgatcgctcggcggtgaccggcaacacccaggtggtgtccgactggctgctggtacgtatcggcgccaacccgggcgagtcgaccctggaccggatgatcgccctggtggaaggcgccaagcggcagaagacccccaacgaagtggcgctggacatcctgctgatcggcctgaccctgatcttcctgctggtagtggtgaccctcaagccgttcgccctgttcgccggcggcaacctgccgctggtgttcctggtggcgctgctggtgacgctgatcccgaccaccatcggcggcctgctctcggccatcggcatcgccggcatggaccgcctggtgcgcctgaacgtgatcgccaagtccggtcgcgcggtggaggcggccggcgacgtccacgtgctgctgctcgacaagaccggcaccatcaccttcggcaaccgccgctgcagcgcgctgtatgccgcgccgggggtgagcggcaaggaactggccgagggcgcgttgctggcctcgctggccgacgacaccccggaaggcaagtcgatcgtcgaatacctgcgcatcctgcatccgatcgaggagccgcgccgcgaggagctgacgccgatcgccttcagcgcggaaacccgcctgtccggggtcgactggaacggccaggtgtaccgcaagggggcggtggatgcggcgctgcgcttcatcgacctgccgcgggagaagatgcccgaggtgctttcgcgggaggtggacaagatcgcccagagcggcggcaccccgctgctggtggtagccaacggccggctgctcggcgccattcacctgaaggacgtggtcaagccgggcattcgcgagcgcttcgccgaactgcgccggctgggcatccgcaccgtgatggtgaccggcgacaacccgctgaccgccgctgccatcgccgccgaggctggggtcgacgacgtgatcgccgaggctaccccggagaagaaactggcgcggattcgccaggagcagggcgaaggtcgcctggtggcgatgtgcggcgacggtgccaacgacgccccggcgctggcccaggccgacgtcggcatggccatgaacgacggcacccaggccgcccgcgaggcggccaacctggtcgacctggacagcgacccgaccaagctgctcgacgtggtccaggtgggcaaggagttgctggtcacccgcggcgcgctgaccaccttttccatcgccaacgacgtggccaagtacttcgccatcctgccggcgctgttcgtcggcatctacccgcagctcgacgtgctcaacgtgatgcgcctgcaaagcccgcagagcgcgatcctgtcggccatcgtgttcaacgcgctgatcatcgtcgcgttgatcccattggccttgcgcggcgtgcgggtgcaggcggcggacgcttcgcaactgctgcagcgcaacctgctgatctatggcgtcggcggcctggtggcgccgttcctcgggatcaaggcgatcgacctgctgctgaccgccgtcggcctggcatga

SEQ ID NO: 319822 - DNA, 552 bp, Pseudomonas aeruginosa
atgttcaagcaactccgtccggcactggcgtcactgctggtgctgagcctggtcaccggcgtggcctatccgctgctggtcaccggtatcgcccaactggcgttccccgagcaggccaatggcagcctgctgcgcgacgccgagggcaaggtgctcggctcgcggctgatcgcgcagaagttcgacggcgaggagtggttccattcgcggccttcggcgggcgactacgccaccgtttccagtgccgcgagcaacctggcgccgagcaacccggcactggccgagcgtatcgccagggacgccgcccaggagcgtatcgccgaccaggggccggtgccgctggcgctggtcactacctccggtagcggactcgatccgcaactgccgccgcaggccgcgcgttaccaggcactgcgggtggccacggcgcgcgggctgccgctgcggctggtggaagacctggtggaaagccacaccgagcggccgctggtggggccggcggtggtcaacgtgctggcgctgaacatggcgctggcggggttgaagcgctag

SEQ ID NO: 319823 - DNA, 2658 bp, Pseudomonas aeruginosa
atgagcgacaccgcacgcgccgacgcgctgctggccgacctgcccgctgacgggcgcggccgcctgaaagtctttctcggcgcggcgccgggggtgggcaagaccttcgccatgctgcaggccgcccaggcccagttgcgccagggcgtgaaactgcgcgccggggtggtcgagacccactcgcgggcggaaaccgagtccctcctcgcaggcgtgccgcagcagccgctgcgcagcctcgagtatcgagggatgaaactgcaggaaatggacctcgacggtctcctcgccgacccgccggcgctggccctggtcgacgaactggcccacagcaacgttcccggcagccgccacgccaagcgctggcaggacatccaggagttgctggcggcgggaatcgacgtctacacaacggtcaacgtccagcacctggagagcctcaacgaccaggtccgcgacatcaccggcgtgcaggtccgcgagacggtgccggactgggtgttgcaggaggcctacgagatcgtcctcatcgacctgccgccgcgcgagctgctggagcgcctgcgcgagggcaaggtctacgtgccggaacaggcgcgggcggcgatcgatgcgttcttctcgcagaccaacctcaccgcgctgcgtgaactggcgatgcagaccgccgccgcgcgggtcgacgccgacctcaaccaccgctaccgccagcgcggcgaggaagcgccggcgttgcgcgggcggctgctggtgggcatcgacggtgacgaacaggccgaacgcctggtgcgccacgcctgccgggtcgccgaacgtcggcacctgccctggagcgtggtacacgtcgataccggcggcttgcgcggcgagcaggcgcggatgcgcctgcagggtgcgcagcaactggccgagcggctcggcggcgagatcgtcgtgctgcgcgccggcgaggtggcgcggaccctcctgcaacatgcccgcgagcgccgcgccagcctggtcctggttggccagtcgcggcgccgctggtaccgccgggccttcggcggtggtctcgccgggcgtctgctgcgcgacggccagggcctggagatcagtgccctggacagcgaggccgacctgcgcccggcggaaccgcggccacgctatccggtggtgtggaacgactatctgctggcgctgctggcgaccgccctggccagcggcctggcctggatcgtggcgcacctgctggagctgccgaacatctccctggtgttcctgatggcggtgctgctggtggcagtgcgcagcagcctgatgccggcactgctgtgcgcggtggcgtcgttcctggcctatgacttcctgttcatcccgccgcatttttccttcgccatccatcgccacgaagacctgctgagcctggcgttcttcctgttcatggccggcctcaccggcaacctggcggcacgccagcggcgccagctggaggcgctgcgcgatacccaggaggaaaccagcctgctgctggaactgtcgcgcaagctcaccgccgccaccgaccgccaggcggtgctggccgccgccgcccagcagttcgacgactggaaggacgtcgaggtctgcctgctcggtcaggtcaatggcgagtggaagaccgaggccggcgtgcagcggcaactcgccgaccaggaacgggtcgccgcggactgggcctgggcccacgaccagccggccggcctcggtactggcacgctgcccggaggacgctggtggtggtggccgctgtcggcggaagagggaccgctggcactgctcggtgtcgcgtcgctggacggccagccgctgagcccgcagcgccggcgcctgctcgccgccctaggccagcccctggcccaggccctggcgcgggctcgcctggccgaggacctggaggccgcgcgcctgcacggcgagaccgagcaactgcgcagcgccttgctcgcctcggtctcccacgacctgcgcacgccgctgacggccatgcgcggctccatcgacagcctgctggcgctgggtgaggcgatcccgccggcggatcgtcgcgaactgctggaaagcacccgcgacgaggccgagcgactggaccgctatatccagaacctgctcgacatgacccgtctcggccacggtggcctgaagctggcgcgcgactgggtggcgcccggcgacatcgttggcagcgcgctgaaccgcctgcgcgcggtgctggcgccgtaccgggtgcaggcgatcgtggccaacgacctgccgttgctctacgtgcatgcggcgctgatcgagcaggcgctgatcaacgtgctggaaaatgccgcgcgcttctcgccgaaccacggccggttgcgcatcgaggtcagccaggatgccgccgagctgcgtttcgcggtgagcgacgaggggccggggattcccgaggccgagcgggagaagatcttcgacatgttctacaccgctgcccgtggcgaccgcggtggccagggcaccggcctgggcctggcgatctgccagggcatgatcggcgcccacggcgggcgcatcagcgtcggcgaaggcctcgacggtcgcggcaccacgctgatcctgcacctgccgctgcatccgcagccggacctcgggcaactggagggcgacgaatga

SEQ ID NO: 319824 - DNA, 693 bp, Pseudomonas aeruginosa
atgacccaattgcagaacagcatcctgctgatcgacgacgaaccgcagatccgcaagttcctccgtatcagtctcaatgcccagggctaccgggtgctcgaggccggcaccggcgaagaggggctggcccaggccgcgctgaaccgaccggacctggtggtgctcgacctcggcctgccggaccgcgacggccaggacatccttcgcgacctgcgcgaatggtcgcaggtgccggtgctggtgctgtcggtgcgcgccagcgagggcgagaaggtactggccctggacggcggcgccaacgactacgtgaccaagccgttcggcatccaggagttcctcgcccgcgtgcgcgtcctgctgcgccaggcggcgcagggcgaaagcccggaggcgtcggtggcggtcggcccgttgcaggtggacttcgcctatcgccgagtcaccctggagggtgcggaagtggcgctgacgcgcaaggagtatgcagtgctcgccgcgctggcacgccatctcggacgggtagtgacccagcagcaactgctcaaggatatctggggtccgacccatgtcgaagacacccattacctgcgggtcgtggtcggccacctgcggcagaaactcggcgacgatccggccagcccgcgcttcctggtgaccgaggcgggcgtcggctatcgcctgcgcgacagctga

SEQ ID NO: 319825 - DNA, 909 bp, Pseudomonas aeruginosa
atgcagcaactgttgaacgagattctcgatgaagtccgcccgctgatcgggcgcggcaaggtcgccgactacattcccgcgctcgccggcgtcgagccgaaccaactggggatcgccgtgtacagccgcgacggcgagctgttccatgccggcgacgccctgcggccgttttccatccagagcatttccaaggtgttcagcctggtccaggcgatccagcattccggcgaggacatctggcaacgcctcggccacgagccctccggccagcctttcaactccctggtgcagctggagttcgagcgcggcaagccgcgcaacccgttcatcaatgccggcgccctggtgatctgcgacatcaaccagtcgcgtttcgccgcgccggcgcaatcgatgcgcgatttcgtccggcgcctgtgcggcaacccggaagtggtgtcggactcggtggtggcgcgctcggagtaccagcaccgctcgcgcaacgcggcggcggcctacctgatgaaatcgttcggtaacttccacaacgacgtcgaggcggtgctgctcagctatttccatcattgcgcgctgcgcatgagctgcgtcgacctggcgcgggcgttctgcttcctcgccgacaagggcttctgcaagcacagcggcgagcaggtactcaacgagcggcagaccaagcaggtcaacgcgatcatggccaccagcgggctctacgacgaggccggcaactttgcctatcgggtcggcctgccgggcaagagcggtgtcggcggcggcatcatcgcggtagtgccggggcgcttcacggtctgtgtctggtcgccggaactgaacgccgcgggcaattcgctggcgggtatcgccgcgctggagaaactcagcgagcggatcggctggtcgatcttctga

SEQ ID NO: 319826 - DNA, 606 bp, Pseudomonas aeruginosa
atgtcccgtccgatccccgtttcccgtgtcttcgcctgcctcaccgttctcgccgcctgcgcgcatgccggcgccgccgaaccggactggcgtggctacaccagcgaacagcagcagcgcagcgtgctggccgtcgagcaggacgccgaggccatcaacaagcgctactacgacagtgccttcgaggaattcctgccggaactggagcaactggaactcagcctggcgcagcccgtcgtcgccgtcgacgagaaaggcctgctgggcgactggaagtgccgctcgacccaggccgaccagtacggcatctatcgctatccgaacttccagtgccgcatccggcgtaccgaccgcggcctgttcctggagaagaccagcggttcgcagcgggtcagcggctacctgttccgcgaaggcacgcagcgctacgtgttcctcggcggcgccacggtcaacgacgagccccaggtggccttcagtggcctggcccacggcgcgccggctgagtccgacgtggtcgcactgctgcgcccgcacgccggtggcttcctcctgctgttcccggaacggcgcggcggctacgaggtcctcgagttcagccgctga

SEQ ID NO: 319827 - DNA, 1038 bp, Pseudomonas aeruginosa
atgagcaaacaggtcgccctggtattgggctccggcggtgcgcgcggctacgcgcacatcggcgtgatcgaggaactcgaggcacgcggctatgagatcacctgcatcgccggttgttccatgggctcggtgatcggcggcatctacgccgccggcaagctgcgcgagtaccgcgagtgggtggaaagcctggattacctcgacgtgctgcgcctgctcgacgtcagcttccgcctcggcgcgatccgcggcgagcgggtgttcggcaagatccacgagatcctcggcgaggtaaacatcgaggacctgtcgattccctacacggcggttgccaccgacctcaccaaccagcaggaaatctggttccaggaaggctgcctgcaccaggccatgcgcgcctcggcggcaatccccagcctgttcacaccggtcatgcagggcagccgcatgctggtcgacggcggcctgctcaacccgttgccgatcgtgccggtggtgtcggcccacagcgacctgatcatcgcggtcaatctcaacgccaccaaccagaagcagtaccacctgccggtgatcgagcgtccggccgcgctcaaggggcgcttcgacagcatgatcgagagcctcggccacaaactctcgttcttccgccgccacggcgacgacaataccccgccggagctgagcgccgacgccctgctccatccggttccggcggaatccgaggagcccgccgagccgcaactgcaacagccggccgcggcgccgcaaggcaaggactcgccgaagtcggccagcggcaccacggtggtggaaagcagcggtccggcatcgctgctggaactggtcaaccagagcttcgaggtgatgcagacctcgctggcgcagtacaagatcgccggctacccgccggacatcctgatcaacgtgccgaagcgggtctgccgcttcttcgagttctacaaggcgccggaactgatcgccctcggccggcagatcgccagcgacaccctggaccgctacgaggaagacaacgcctga

SEQ ID NO: 319828 - DNA, 279 bp, Pseudomonas aeruginosa
atgaaaacctggatcgttctgcccgtccttgccctgaccctggccggctgcgccggcaagaccgcctaccgggagaactgcgccgaccagttggacgcggcctggaaggaactcgacctggccaaggccgaaggcttcgccggcaccgtcagctactcgaaggccctgaccctgctcaccggggccaagacccagcagcagttcgaggcctacgagggctgcaccagcaaggccgagaaggcgcgcttctatatccgcgagtcgcgcgccgggcgctga

SEQ ID NO: 319829 - DNA, 1035 bp, Pseudomonas aeruginosa
atgagcgaggcgatccgcctgacccagtacagccacggcgccggctgcggctgcaagatttcgcccaaggtactggaggtgatcctcgccggcagcggcgcgcagaacctcgatccgaagctctgggtcggcaacgcctcgcgcgacgacgcggctgtctacgccctcgacgaggagcgcggggtggtctccaccaccgatttcttcatgccgatcgtcgacgaccccttcgacttcggccgtatcgccgcgaccaacgccatcagcgatatctacgccatgggcggcgacccgctgatggccatcgccatcctcggctggccggtcaacgtgctggccgcggaagtcgcccgcgaggtgatcgccggcggccgcaaggtctgcgaggaagccggcatcccgctggccggcggacactccatcgacgcccccgagccgatcttcggcctggccgtgaccggcgtggtggagaagcgcttcatgaaacgcaacgacaccgccgaggccggctgcaggctgtacctgaccaagccgctgggcatcggcatcctcaccaccgccgagaagaaggccaggctgcgcgccgaggacgtcggcgtggcgcgtgactggatgtgcaccctgaacaggcccggcgcgcgcttcggccggttggcgggggtcaaggcgatgaccgacgtcaccggtttcggcctgctcggccacctggtggaaatggccgacggcagcaagctcaccgcacgcgtggagtacgccgcggtaccgcgcctggccagtgccgaatattacctggagcagggctgcgtgcctggcggcaccctgcgcaacttcgacagctatggcgagcgcatcgcgccactgccggaagtgcagaagctgttgctttgcgatccgcagaccagcggcggcctgctggtggcggtggctccggaaggcgaggcggagttcctcgccgtggcggcggaactcggcctgcaactggcgccgatcggcgagctggtcgagcgacagagtctcgcggtacaggtgctgtaa

SEQ ID NO: 319830 - DNA, 1110 bp, Pseudomonas aeruginosa
atgcgcgacaacacccagcactaccgcgaactgtttctcgacgatatccccctgatggatgtgcgcgccccggtggagtaccacaagggcgcctttcccaacactgtcaaccggccgctgatgaacgacatcgagcggcagaaggtcggcaccagctacaagcagcacggccagcaggccgccatcgcccttggccacgaactggtctgcggggcgctcaaggccgaacggctggcggcctggaaagccttcgccgaagccaacccgaacggctacctgtattgcttccgcggcggcctgcgctcgcagatcgtccagcagtggctgaagcaggacgccggcatcgactacccacgggtgatcggcggctacaaggcgttgcgcaacttccttttcgaaaccacccgcgcggcggtcgacgagtgcgatttcgtgctggtcggcggcctcaccggttgcggcaagaccgaggtgatcgcggcgctggacaacagcctcgatctcgaaggccacgccaaccatcgcggctccagctttggccggcgagccacgccgcagccggcgcagatagacttcgagaaccgcctggccatcgacatcctgaagaagcgtcatcgtggcgtcggccagttcgtccttgaggacgaggggcggatcgtcggcagctgctccttgccgctggagctgtaccagggtatgcagggctacccgctggtctggctggaggatgccttcgagcagcgtgtcgagcgtatcctcagggactacgtgatcgacctgcgcagcgagttcgagcgtgtggtgggcgtggaggagggcttcgccgccttctccgcctacctgcagaagagcctcgccggcatcgtcaagcgcctcggcggcgagcgctaccagcggctggcggcgatcctcgtgcaggcgctggaagagcagggccgcgacggctcggtggatacccatcgcggctggatcgaggggctgctcaaggagtactacgacccgatgtacgccttccagcggcagagcaaggaagaccgcgtggagttccgcggcaaccaggccgaggtgatcggctacctgcgccagcgtcaggcgttgcggccatcgtag

SEQ ID NO: 319831 - DNA, 348 bp, Pseudomonas aeruginosa
atgaactatcgaggaagctgccactgcggaaccatcgcctacgaagtcgaaggcgacctcgaccaggtgatccagtgcaactgttcactgtgcagccggcgcggctggctgctgtggttcgtcccgcgcgaccgtctggcgctgaagacgccggccagcgcgatgcacacctacaccttcaacacccaccgcctgcagcatcacttctgccccacctgcggctgcgcgccgttcagcgaaggcataggcccggacggtcaggcgatggccgcggtcaacgcgcgctgcctggaggacatcgacgccagcgcgctcccggtacagcactacgatggccgcaacgcctga

SEQ ID NO: 319832 - DNA, 609 bp, Pseudomonas aeruginosa
atgcaactggacttcaccaccatcgctcccgccgaggcctatcgctggttggcttccaccgtcaccccgcgaccgattgcctgggtctcgaccctgtccgccgagggcgccagcaacctggccccgttcagcttcttccaggtgatcagcgacgagccgccgaccctgatggtcaacgtcagcctgcgcgacgacggcagcctcaaggacaccctgcgcaacgtccaggccaccgggcagttggtgatccacctggtcggcgccgcccaggccgagaccatgaacgccacctccgcctggctgccccatggtgtgagcgagatcgagacggtcggcatccctaccgtgtccagcgtacgcgtggcgccgccgcggatcgccgcggcggcggtggccttcgagtgcgaggtggcggagatcaagccgtatccggcggagaaccccaattgccacctgatcttcgcccgcgtgctgctggcccatgtcgacgatgccgtgctggccgacgagcgccatgtggatagcgcccggctcgacctggtcggtcgcctgggcggcagccactacagccatacccgcgacacgttcagcatgatccggcccaggtag

SEQ ID NO: 319833 - DNA, 408 bp, Pseudomonas aeruginosa
atgcgtcccgtattgccgctgttgctgtcgctgagtctgtgcgcccccaccctggccgactggagcggcccgatcgagcagccgctctggtcgttgccggcggcgccgggcctgtcgcgctggctgatcgtgcacaacctgtcgagcgcggcggccgacggcctgtaccacgtcgaggtcctggagcgccgccagggccagcagccctggcagttccagcgcctggccgcgcacctggcgctgaccgaacaggcgctgcgcgcgagtatcgtggcgccgctgaagcgcggcggggtgtatccggaaagctaccagttcgcctatcgccagtggcaggaacgccaggccgcgggccaggcgccggtgtgccggcgcacggtcgacgagtgcctgcgggcgccggactga

SEQ ID NO: 319834 - DNA, 1959 bp, Pseudomonas aeruginosa
atgctggggttgctgcgcaggcgtctggccgatctcggcacggcgaagaaactggccatcggttttaccctggtcctgctattgaccgcgctggtggccgcgctcgcggtgctctcgctgcatgcgctggggcagcgcttcgcgcgcctgcaggagatgagcgcgatcaatcgcgacgtgctggaggttcgccaggccgagaaggaatttgccctgcacggggaaaagagcgacgccgagcgcttgcgccagcgcctggccgcgacccttgaacgggtgggccggctcaaggccgacggcgacgccgatcaggcgcttggcatggccgaggtggagcaggtgctggcggcatacctagaagcgttcggccgcttcgagcagtccatccagggacgccaattggcttgggaaagcgccagctggtcgctgaacggcgccgccaacagcctcgatatcctccagtccagcctggccgaggatggcgcctatgcgctgaaggagagccaggggcacgacggcgagccgctgttgcagcaggcggcccaggtcgcccaggtcaatcgcctggtccttcaggggctggacgaggcccgctcgcgtctcgaagcgcgcgccgcggatgcgcaggaggggccgccaaaatcgctgcgcgaggcgctggagctggcagcccggctggagcaggcgatcaccgacgatgcctacgtgtcggtggtcaaggacgtgctgaccaatatccgcggtttcgctgacaagctcgccgagtaccgcgccagtcagctccaggagcggcagatgtacgccgccatgggcgagcgcgccgggcaggtgatggcgcgtgtcgaccgtagctgggaggcgcagcagcaggccatgctccacagcctgcggacaaactccctgctgatcgtcggcgccgccgtgctggcgctgctggtgggcctgggcgcggccttcggcatcagcctgctgatcgtccgtccgctgcgccaggcgatgggtgtggcgcagcggatcgccgaaggcgaccttgcggtacgggtcgacagcgagcggcgcgacgaggttggccaactgatggccgcgatgcgcgccatgaccggcagcctgcgcggtatcgtcagccagttgcaggacggcgtcgggcggattgccggcgcttccgaggcgctgtccggcgttaccacgcgcacccgcctgggaatcgacagccagcgggcggaaaccgaacaggtggccacggcgatgaaccagatggccgccaccgtccatgaagtggcgcacaacgccgaggaagccgcgggggcggcggaaagcgccgacggcaaggtcagcgtcggccaggaggtggtacgccagaccctggagcggatcgagcgactggccgaggcggtgcgcgcggccaccgccagcgtcgaggcgctgagcgccgacagccagcgcatcggcagcgtgctggacgtgatcaagagcgtggccgagcagaccaacctgctggcgctgaacgccgccatcgaggcggcgcgggccggcgaccagggtcgaggcttcgccgtggtcgccgacgaggtgcgggcgctggcgcggcgcacccaacagtccacggccgagatcgagaccctgatcggtgccttgcagaatggcacgcagcaggcggtgcagcgtatgcagcgcagccaccagttggtggaccagagcgtcgacgacgcgttgcagaccgaggcggcgctgggcaacatcgccacggcggtggcgctgatccagcagatgaaccagcagatcgccgcggcctccgagcagcagagcgcggtcgccgaggagatcaaccgcagcgtcacggcgatccgcgaggtggccgatcagtcggcccaggccatgcagtcgacggcttcgtccagcgaacaactggcggagctgggccgcgaactacagggcatggtcaggcatttccgcttgtag

SEQ ID NO: 319835 - DNA, 1722 bp, Pseudomonas aeruginosa
atgccactcgcccgctgggtacccggactcgatagcctgctccactaccgccgcgcctggttccgtccggatgtccaggccgggctgtcggtagcggcgatccagatccccaccgccatcgcctacgcccagatcgccggcttcccgccccaggtaggcctctatgcgtgcatcctgccgatgctgatctacgccctgatcggcagctcgcggcagttgatggtaggccccgacgcggcgaccgcggcgatggtcgccgccgccatcaccccgctggcggcgggcgatccgcagcgcctggtggacctgtcgatgatcgtcgcgatcatggtcgggctgttctccatcgtcgccggcctggcccgcgccgggttcatcgccagcttcctctcgcgaccgatcctggtcggctacctcaacggcatcggcctgagcctgctggtcgggcaactgggcaagctgttcggctacgaggcggcgaccagcggcttcgtcgccggcatcctcgcgctgctggagaacctgctgcacatccattggccgacgctgatcctcggcagcctctcgctcttgctgatggtgctgctgccgcggcgcttcccgcagttgcccggggcgctctgcggcgtcctcctggccagcctcgccgcggcgctgctgggcctggatcgctacggcgtggaactgcttggcgaggtaccggccgggctgccgcaactgagctggccgcagaccagcctggaggaactgaaaagcctgctgcgcgacgccaccggcatcacggtggtcagcttctgcagcgccatgctcaccgcgcgcagcttcgccgcccgccacggctacagcatcaacgccaaccacgaattcgtcgccctcggcctggccaacatcggcgccggggtctcccagggcttcgccatcagcggcgccgactcacgcaccgcggtgaacgacatggtcggcggcaagacccaactggtcggcgtggtcgccgcgctggtgatcgccgccaccctgttgctgctgaacaagcccctgggctgggtgccgatgccggcgctcggtgcggtcctgttgctggccggctggggcctgatcgacgtgcaggcgctgaagggcttctggaagctcagccgcttcgagttcagcctctgcctgctgaccaccgtcggcgtgctcagcgtcggcgtgctgccgggaatcttcgtcgccgtcagcatcgccgtactgcgcctgctctactacacctatcgcccgagcgacgcggtgctcggctggatgcacggcatcgacggccaggtcgagctggccaagtacccgcaggccaccactcttcccggcctggtgatctaccgcttcgacgcccccctgctgttcttcaacgccgactacttcaagcagcgggtgcttgccgtggtggacggcagcgagcggccgaatgcggtgctgctcaacgccgaagccatgaccaacctcgacatcagcggcctggccaccctccacgaggtgcaacagatcctcaaggcccagggcgtgcacctgtcgctggcgcgggtgaccgggcagacgctggacctgctgcaacgctcgagcatgctcggcgagatcaagccgccgctggtgttcagctcggtgcgctccggggtcagtgcctatcgctactggctgcgccagcaggaaagactcgccgcccaggccgcggctacaagcggaaatgcctga

SEQ ID NO: 319836 - DNA, 1005 bp, Pseudomonas aeruginosa
atgacctcccagatcaatcggcaataccagttggcccagcgtcccagcgggctgcccggccgcgacaccttcagtttcgtcgagaccccgctcggcgaaccggccgagggccagatcctggtgaagaacgagtacctgtcgctggacccggcgatgcgcggctggatgaacgacgcccgctcctacatcccgccggtggggatcggcgaggtgatgcgtgcgctcggcgtcggcaaggtgctggtttcgaagcaccccggcttccaggccggcgattacgtcaacggcgccctcggcgtgcaggactatttcatcggcgagcccaagggtttctacaaggtcgacccgtcccgcgcgccgctgccacgctatctctcggcgctgggcatgaccggcatgaccgcctacttcgcgttgctcgacgtcggccagccgaagaacggcgagaccgtggtgatctccggcgccgccggtgcggtgggcagcgttgccgggcagatcgccaggctcaagggctgccgggtggtgggcatcgccggcggcgccgagaaatgtcgcttcctggtcgaagaactgggcttcgacggcgccatcgactacaagaacgaagacctcgccgccggactcaagcgcgaatgcccgaagggtatcgatgtgttcttcgacaacgtcggcggcgaaatcctcgacacagtgctcacccgcatcgccttcaaggcacgcatcgtcctctgcggggcgatcagccagtacaacaacaaggaagcggtgcgcggcccggccaactacctgtcgctgctggtcaatcgggcgcgcatggaaggcatggtggtgatggactatgcccagcgcttcccagaaggcctgaaggagatggccacctggctggcggaaggcaagctgcaatcgcgcgaggacatcgtcgaaggcctggagaccttccccgaaacgctgctcaagctgttcagcggggaaaacttcggcaagttggtgttgaaggtctga

SEQ ID NO: 319837 - DNA, 762 bp, Pseudomonas aeruginosa
atgagcaaacttctttccggccaggtcgcactggtcactggcggtgcggcgggcatcggccgcgctaccgcgctggccttcgccgccgccggggtcaaggtggtggtcgccgacctggacagcgccggcggcgagggcacggtcgaagcgatccgccaggcaggtggcgaagccgtcttcattcgctgcgacgtcacccgcgacgccgaggtcaaggcgctggtagagggttgcgcggcggcctacggccgtctcgactacgccttcaacaacgccggtatcgagatcgagcagggcaagctggccgacggcaacgaagccgagttcgacgccatcatggctgtcaacgtgaagggcgtctggttgtgcatgaagcaccagatcccgctgatgctggcccagggcggtggcgcgatcgtcaacaccgcctcggtcgccgggctcggcgcggcgccgaagatgagcatctacgctgcttccaagcacgcggtgatcggcctgaccaaatcggcggcgatcgagtacgcgaagaagggcatccgcgtcaacgccgtgtgtccggcggtgatcgacaccgacatgttccgccgcgcctacgaggccgatccgcgcaaggccgagttcgccgccgcgatgcatccgctgggtcgggtcgggcgggtcgaggaaatcgccgccgcggtgctctatctgtgcagcgacaacgcaggcttcaccaccggtatcgccttgccggtggacggcggggcgacggcgatctga

SEQ ID NO: 319838 - DNA, 894 bp, Pseudomonas aeruginosa
atgaccgccgatcccatcctgaccctgttcctccccatcgcactgggcatcatcatgctcggtctcggactgtccctgaccccggccgacttcctccgcgtggtgcgctacccgaagccggtgctggtcggcctggtgtgccagatcgtcctgctgcccctggcctgtttcctgatcgtccagggcttcgccctggaggcggccctggcggtcggcatgatgttgctggcggcctcgcccggcggcaccaccgccaacctctacagccacctggcgcatggcgacgtggcactgaacatcaccctgaccgcggtgaactcggtgatcgccatcctcaccatgccgctgatcgtcaatctgtcgctgcaatacttcatgggcgacgggcaggcgattcccctgcagttcggcaaggtcgtgcaggtcttcgtcatcgtcctcggcccggtggccatcggcatgctggtgcgcaaccgcctgccggccgtggcggatcgcctgcagaagccggtgaagatcctttccgcgctgctgttgctggtgatcatcctgctggcgctggccaaggactggcagaccttcgtcacctacgcgccggtggtcgggctggccgcgctggccttcaacctgctgagcctggcggtgggctactgggtgccgcgcctgctgcgcctgccgaaggcccaggcggtggccatcggcatggagatcggcatccacaacggcaccctggcgatcgccctggcgctgagtccgagcctgctgaacaacagcaccatggcgattccgccggcgatctacggagtgctgatgttcttcaccgcggcggccttcggctggtgggtcagccgtggccaccaggccacgccggcgcccgtgacggcgccggactga

SEQ ID NO: 319839 - DNA, 1197 bp, Pseudomonas aeruginosa
atgaccgaaaccacccagccccagcctcgtctgcgtccgttcgccgactcctctcccgccgccgtggtggccggcttcgtcgccatgctcaccggctacaccagctcgctggtactgatgttccaggccgggcagaacgccggtctcagcagcgcgcagatttcctcgtggatctgggccctgtcgatcggcatgggcctggcgaccatcggcctgaccctgcgctaccgggtgccgatcgtgatcgcctggtccacccccggcgcggcgctgctgatcagcagcctgcccggagtgccgtacagcgaggcgatcggcgccttcatcgtctgcgccctcctgatcaccctgtgcggcgtcaccggcagcttcgaacgcctgatgcgccaggttccctcctcgctggcctcggcgctgctggccggggtgctgttccgcatcggcatcgagatctgcaacgccgccgagcaacagaccctgctggtgctggcgatgttcttcagctatctgctgtgcaaacgcttctcgccgcgctatgcggtgttcgctgcgctactggtgggggtgctgctggccgggatactgggccaactggacttcagcaggttccgcctggaactggcggtaccggagtggaccacgccgagcttctccctggccgccaccatcagcatcggcatcccgctgttcatcgtcgccatggcttcgcagaacatgcccggcatcgccgtgctgcgcgccgacggctaccaggtgccggcctcgccgctgatctcgagtaccggcatcgcctcgatcctgctggcaccgttcggctcccacgggatcaacctggcggcgatcagcgcggcgatctgcaccggtccctcggcccacgaggacccgcacaagcgctataccgcggcgctctggtgcggcttcttcaactgcgtcgcaggaaccttcggcgccaccctggcagcgttgttcgcggcgttccccaaggcactggtactgtccatcgccgccatcgccctgctcggctcgatcatgaacggcctggccaactcgatggccgacgagcgccagcgcgaggccgcgctggtgaccttcatggtaaccgcctccggcttcaccctgctgtccatcggctcggcgttctggggcctggtggccggcctgctgactcagttcgtgctcaactggcggcgcggctga

SEQ ID NO: 319840 - DNA, 636 bp, Pseudomonas aeruginosa
atggatgcaaacccctacgccacgccgcgtgtcgaattggtcgagcagggcataccggatgctttccgccggcgctggacgcccgcgcaactgcgcatcctcgcctggctctgcctggcctcgatagccggcggcgtggtgctgatggtgctcagcctgctggaggcattcggcgacggcgccgcgttcagggtctacgccgactggctgggcctgctcctcagcctgctcggcgcctacctgctgctgcggctcaagcacctggtcgagtcgcgctttcgcggcccctcgctggcctggccggtatggttgtcgattctcctgaccctgctgggcgagggctggagcctgctggcggttaccgacgatgcgctgcagggctggaactggcaggcgctggtgtacttcgcgctgcttgcgctgatcggcgctaccaccctctggctgggcctgcgtctgctcaagcaggaaaacctctatccgtcgctgcggatcatggcctggctggacatcgccggcggcgcgatgctggcttcggtgctgttgctggtgctggcggtactgccgctgctggccgccaccgtggccatggcgctggcctgctggcgcgcggcgcgggagttggagcggagctag

SEQ ID NO: 319841 - DNA, 477 bp, Pseudomonas aeruginosa
atgcctgacctgaaaaaccacgccgtccagcagcaggccatgatggaagccttcttcttcgcgtaccaggccttcaccaccaagcctgacgagatgctcgcccgccgcggcctgggacgtgtgcaccaccgcgtgctgttcttcatcgcccgctatccgggcctcagcgtgaaggaactgctggccctgctcggcgtgaccaagcaggcgctgaacatcccgctgcgccagttgctggagatgaacctgatcggcagcgccaccgccgacgacgacaagcgcaaacgcctcctcggcctcaccgccgagggcgtgcggttggaaaaggcgctgcgtcgcgagcagtcgcggctgctccaacgctgcttcgaggaagccggcggcgaagcggtctccggctggctggcggtcaatcgcaccctggctcgggcgcatgcaggcagccgcggcgaagcggcgacggaggccgccgactga

SEQ ID NO: 319842 - DNA, 1167 bp, Pseudomonas aeruginosa
atggccttctctgaacgcatctcccgcctgaaaagctccttgatccgcgaaatccttgccgcggcgcagcgtccggaggtgatgtcgttcgccggcgggctgccggccgagccgatgctgccgaaggtgcagtgggagcagatgccggcctccatgggccagtacggcatgagcgaaggcgagcctgccctgcgcgaagccatcgccgccgaagcgcgtgccctcggcgtcccctgcgaggcgagccaggtgctgatcgtcagcggttcgcagcagaccctcgacctggccagcaagctgttcatcgatccgggcaccgaggtgctgctcgaggcgccgacctacctcgccgcgctacaggccttccaattgttcggcgccgattgcgtgaccgtgccgctgggtgccgagggccccgacctggttgccctgcggcagcgcctggagcgacacaagccggccttcgcctacctgatcccgactttccagaatccgtccggcgtgcgctacagcgaggaacgccgcgacgcggtggcggcgctgctagacgaattcggcgtgaccctgatcgaagacgaaccctatcgcgaactggtgttcgacgagggccgcgcaaccccgctggtcagccgcctgcgcaagtccagctggatctataccggcacggtgtcgaagaccctgctgccgggcctgcgcgtcggtttcctgatcgccaccccggacctgttcccccacctgctgcggctgaaacagtcggccgacctgcataccaaccgggtagggcagtggcaggcgctgcaatggttcggcagcgaggcctaccgccagcacctggccgaactgcgcgagttctaccgggtccgccgcgacgccatgcaggaggcgctgctggagcacttcggtgagctggccgaatggaatatcccggagggcgggctgttcttctggctgaccctcaggcagccgctggatactcgcaccctgctccagccggcgctggccgccgatgtcgcattcatgcccggcgaacctttcttcgccgagccggagcagaacctcgggcgtctgcggctgaacttcagccacgtcgccccggagcgcctgcacgaaggcctgcggcgcctggccaaggtcgtccgcgacgcccaggccgccgaagcggcctga

SEQ ID NO: 319843 - DNA, 603 bp, Pseudomonas aeruginosa
atgtacaaggtctacggtgattaccgttcgggcaactgctacaagatcaagctggccatgtcgctgctcggcatcgactaccagtgggtaccggtggacattctcaagggcgagacccagaccccggagttcctggcgaagaaccccaacggcaagataccggtgctggagctggaggacggcagttgcctgtgggagtccaacgccatcctcaacttcctcgccgacggcagcgccctgttgcccagcgaaccgcgcctgcgcacccaggtgctgcaatggcaattcttcgagcaatacagccatgagccctatgtggccgtggcgcgcttcatcaagctctacctcggcctcccggaagcccgccgcgccgagttcgaagagaagaagatcggcggctacaaggccctcgacgtcatggagaaacagctgtcgcgcacgccattcctggtcggcgaacagttctccatcgccgatatcaccctctacgcctacacccatgtcgcccatgaaggcggcttcgacctgacggcctacccggcgatccgcgcgtggatcaagcgagtgggggaggtgccggggtatgtggggatgctggattga

SEQ ID NO: 319844 - DNA, 1557 bp, Pseudomonas aeruginosa
atgacctattcgagcaagctctcctcgcattatctggaactcgcggaacagccgatttcaaaggatgtctttgcgggtgaggatgtgcgtttttccagcgaatacgaggcgctggaaaatgagctgggcaaggcgctctcgctccatgagaacggccagaccgactggttgaaaatcctggaaaacagcgaagcgctgcttcgtgcccaatccaaggacctgcgtgttgcagcctggttgacctgggccctctaccaacgggaatcctttcccggtttgctggccggactgggattgctggaacgtctgtgcagccggcattgggtcgagatccatccgctcaaggcgcgcactcgcgccgcggccattggctggctggtgccccggctggagcaggcgctgaacgaaaacgtaccgatcaaggagcaactccccctgttccggcgtctcgccgagcacctggaaaaactcgataccgcgctgaccgcgcaactgggcgacgacgcgcccttgttgctgccgatcagccgacgcctttcgggcatgctccagcgcgccgccgacaaccagcccgaacctggcgtggtcggcgccgtggtggcccaggtcaagcaggcggccagccagttgctggcgccgggtgcgcccatcgacaacgagcgcgacgcccacaaggccatgcgcgcccagcaggaggccgcacgccccctgtgcgcctggtggctgaagcagaaagccaccgatctgcgcgcgctgcgcctcaaccgaacgatgctctggctgcccatcgagtccatgcccgagcgcaatgccgaacaggtcaccgcgctaaggggagtgccggcggacaagctgaaaagctaccaggagcgtttcgcccagggcctgtacgccgatctcctggtggagctggaggcgagcctggcacgggcgccgttctggttcgacggccagcgcctggtctgggagtgcctgcaagggctcaacgccgagcaggcgatgcgggaagtcgaaatgcatttcgccttgctcctgcagcgtctgccggggctggtggagctgcgtttccacgatggcagcgcattcgccgatgcggccacccgcggctggatcagcgcccatgtcatgccccatctccagaacgacagtgcgccgcgcaaggtcgagaccgtggccctgcaggccgaatgggacgtcgccctggacgaggtccagccggtgttgcgcaaggacggcctgaaggcggcggtacaggtgttgaagcagggcatgaagcgcgcccacggcgggcgcgcccggttcttctggcaactgagcctcgcgcgactgtgcttcctggcgaagaagtacgagctggccaagacccagctggagagcctcgaccatcagttgcacgaatcgggattgcacgcctgggagcccgatctggcgctggatgtactgcacctgctgcatagctgctgcgagctgttgccgcagaaccacgccgtgcgagaacgcaaggaagacatttatcgcaggctgtgccacctcgatctcgaggtggtgctcgaatag

SEQ ID NO: 319845 - DNA, 507 bp, Pseudomonas aeruginosa
atggccaaagaaggctcggtagccccaaaggaacgcatcaacgtcaccttcaagcccgccactggcggtgcccaggaagaaatcgaactgccgttgaagctactggcgatcggcgattacacccagcgcacggatgagcgcaaggtggaggaccgcaagccgatcggcatcgacaagatgaccttcgacgaggtcctggccaagcaggagctggggctgacgctgagcgtacccaatcgtctccaggaggagggcggcagcgacgagctggcggtggggctgcagatcaactcgatgaaggacttcaacccggccagcatcgtcgagcaggtgcccgagctgaagaagctgatggagttgcgcgatgcgttggtggccctcaagggcccgctgggcaacgccccggcgttccgcaaggccatcgaaagcgtactcgccgacgacgagtcccgtagccgtgtgctgggcgagctggggctgagcgccgccccctcccaggacgcctga

SEQ ID NO: 319846 - DNA, 1476 bp, Pseudomonas aeruginosa
atgagcaccagtgccgcacagcaaggccggaaccagaacggcgaatacaacattctcgacagcatcatcgccgagacccgcctgagcccggacgacgaggcctacgacatcgccaagcgcggcgtctccgccttcatcgaggaattgctcaagccgcagaacgacggcgagccggtgaagaaggcgatggtcgaccggatgatcgccgagatcgacgccaagctcagcacgcagatggacgagattctccatcatcccgatttccaggcgctggagtcggcctggcgcggcctgcaactgctggtcgaccgcaccaacttccgcgagaacatcaagatcgagattctcagcgtttccaagcaggacctgctggacgatttcgaggactcgcccgaggtgatgcagtccggcctgtacaagcacatctacaccgccgaatacggccagttcggtggccagccggtcggcgccatcatcgccaactactacatgtcgcccagttcgcccgacgtcaagctgatgcaatacgtctccagcgtggcctgcatggcccatgcgccattcgtggcggccgccggtccgaagttcttcggcctggaaagcttcaccggcctgccggacctgaaggacctgaaggatcatttcgaaggtccgcagttcgccaagtggcagagcttccgccagtccgaggattcccgctacgtggcgctgaccgtaccgcgcttcctgctgcgcatgccctacgatccggaagagaatccggtcaagtcgttcgcctacaaggagaccgtggctaacagccacgagcattacctgtggggcaacaccgcctatgccttcggcaccaagctgaccgacagcttcgccaagtatcgctggtgcccgaacatcatcgggccgcagagcggcggtgcggtagaggacctgccgttgcaccacttcgagagcatgggcgagatcgagaccaagatccccaccgaggtgctggtgtccgatcgccgcgagtacgaactggccgaggaaggcttcatttccctgaccatgcgcaagggcagcgacaacgccgcgttcttctccgccagctcggtgcagaagccgaagttcttcggcatcagcgccgaaggcaaggccgcggagctgaactacaagctcggcacccagttgccgtacatgatgatcgtcaaccgcctggcccattacctgaaggtcctgcaacgcgaacagctggggtcgtggaaggagcgtaccgacctcgagctggagctgaacaagtggatccgccagtacgtcgccgaccaggaaaaccccagcgccgaagtgcgcggccgtcgcccgctgcgcgctgcacagatcatcgtcagtgacgtcgagggcgagccgggctggtaccgcgtcagcctgaacgtgcgcccgcacttcaagtacatgggggcggacttcaccctgtcgctggtcggcaagctggacaaagagtaa

SEQ ID NO: 319847 - DNA, 408 bp, Pseudomonas aeruginosa
atgaccggatacggcagcctgttcgagcgcctgaacggcgacgcggataagcgcgtcggctggagccgcgaggtttccgccatggcgtcggtggctgcccatctgggcaagatgctcagcacccgggcgggcagcgtgcagacgctgtccgactacgggttgcccgatctcaacgacatgcgcctgagcctgcacgactccctgagccaggcccgctcggccatcgaaggtttcatcgaggcttacgaaccgcgcttgagcaacgtgcgtgtcgtttccctgccgcgcgacaacgaccagctccgcctggccttcagcatcgaagggttgctggaggtggaaggtttcaagcgccaggtgagtttttccgcatgcctggatggcagcggccaggtgaaggtcagctaa

SEQ ID NO: 319848 - DNA, 1788 bp, Pseudomonas aeruginosa
gtgtccttcaatcattactaccagagcgaactcaccgcactgcgccagctggggcgccgtttcgccgagcgtagcccggccctggccccgtttctcgggcaggtcggacgcgatccggatgtcgagcgcctgctcgagggctttgccttcctgaccgggcggttgcggcagaagctggacgacgagttgccggaactcagccactcgatgatgcacctgctgtggccgaactatatgcgcccgctgccggctttcagcattctccagttcgaccccctgacccgcccgggcggggcgctgcgcgtggagcgcgatacgccggtcgagagccggccggtgggcgaggtcgcctgtcgcttccgtacctgctacgccaccgaggtcctgccgctggtgctggaggcgctcaactattcggtgaccggcgagggtgcgctgctcggcctgcgcctggcggtgaactgcgacgggcatctcggcgagctgggcctgagtcggctgcgcctgcacctggccggcgagcgctacatcagccagatgctctatctgtgcctgctgcgcaacctggagagcatccaactgattccgctggacgcccatgggcggccactggatggcgtggccggcaagccgatgtcgttccgcctgacgggcgagcgggtgcagccggtggggttcgccgaagacgaggcgttgattccctatccgctgaataccttccgtggctatcgctacctgcaggaatacttcgcgttccaggacaagttcctgttcgtcgacgtggatggccttgacctgctcggcgcgctgcccgaggaaaccctcaagcaggtccgcggccttgagttgcgcttcgatatccgcaagagcggcatccagcgcctgcacccgacgctggagaacgtcaagctgtactgtacgccggtggccaacctgttccgccacgatgcgctgccgatccgcctcgacggcaagcaggacgagtacctgctgatgccggccgaatacagcctggaggactgcggggtgttctcggtagagggcgtcaccggctggcggccgggcgggctcggctaccaggcctacgtgccgttcgagtccttcgagcacgatcccagcttcgacgttcccgaagcacggccccactacagcgtccggcaacgtacctcgttgctgcacgatggcctggacacctacctgagcttcggcatccgccatcccgagcagatcgagacgctgtcggtggaactgacctgcaccaaccagaacctgccccaacggctgcgcctgggcgatatctgcgtcgcctgcgaaggcacgccggagttcctcggtttccgcaatatcaccccggcgacgccgagctacgcgccgccgctgaaccgcgatttcctctggaaactgatcagcaacatgtcgctcaactacctgtcgctggccaacgtcgacgcgctcaaggtgatcctcgaaacctacgacctgccgcgctactacgaccagcatgcggcgaaggtcagcaagcgcctgctgggcgggctcaaggcggtccgccacgagcatgtcgaccgcctgcatcggggtctgccgctgcgcggcttgcgtaccgagctgacgatcgatccggaaggctacatcggcgagggcgacctgttcgtgttcgcttcggttctgaacgaatttttcgcgctttacgccagcatcaactcctaccacgagttgcgggtgaggagcacacagggagacgtgtaccaatggaaaccgcgcatgggtttgcagcccctgctgtaa

SEQ ID NO: 319849 - DNA, 1008 bp, Pseudomonas aeruginosa
atggaaaccgcgcatgggtttgcagcccctgctgtaagcgcgctggcccggggcattcgcgagtactcgctgttccaggcggtcctgctggtcatggatcgcctgcgcgaggaatatcccgacctgggagacgaggcgctctacgatcagttggaattccaggccaatcctagcctcggcttcccgggcagcgatgtcgatcgggtggagttcttcgaagagcgcggcatgctgcgggcgcggctgcgtttcaacctgatcggcttgttcggtgccagttcgccgttgccggcgttctacagcgagcaggccctgggcgacagcgaggagggcaatcctacgcggaacttcctcgatctcttccatcaccgcctgcatcggctgctgttgccgatctggcgcaagtaccgctaccgggtgagcttccagagcggcgcgagcgatgcgttctccgctcagttgttcgccctcgtcggattgggcggggaagagatccgcaaggccagggaactgaactggaaacgcctgctgccctacctgggcctgctcagcctgcgggcgcactcggcggccttgatcgagtcggtgctgcgctactacttcaagcatgccgaactggtcgccgagcagtgtatcgaacggcgcgtcgcgatcctcgaagagcagcgcaaccgactcggcctgttcaacagccagcttggcgaagacgcggtgctgggcgaacgggtccgcgaccgcagcggcaagttccgcattcatatccgccagctcgactggcagcgcttccacgagttcctgccgatcggtcccggctaccagccgctttgcgcgctggtccgcttcaccctgcgcgacccgctcgactacgacatccggctggtcttgcgccacgaggaaatccgcgagttccgcatcggcgcgcagaacgcctgccgccttggctggaccagctggctgggccgggagcgcgccgatggcgtggtgacgctgggcagcaagattcattaa

SEQ ID NO: 319850 - DNA, 2628 bp, Pseudomonas aeruginosa
atgatcaacgtagacctgcaacaactgattcaggcgctggatgccgacacccggcgcgacctcgaaggctcggccgagcgctgcgtagcccgcggcggcagcaaggtactggtggaggacctgttgttgggcctgctggagcgtccccagggactgctggcgcgcgccctgcaggatgccgcggtggacgctggcgaactcaacgccgcgttgcaagcgcggggcgagcacagtgcctcgcgcaatccggtgttcgcgcccgagctggtgcagtggctgcaggatgcgctgctgctggccaacctcgaactgggccgtagccagatcgaccaggcggcattgatcctggccctgctacgcaacccgttgcgctatgccggcagccgctaccagccgctgctggcgcggctcgacatcgagcggttgaaggatttcgcgctctcgcagccgctggagggcgcgcccagcggcaagccgggcggcggcgagtccctgttgcagcgcttcacccacaaccttacccagcaggcgcgcgacggcaagctcgatccggtgctctgtcgcgacggggctattcgccagatggtcgacatcctggcccgtcggcggaaaaacaaccccatcgtggtcggcgaggccggcgtcggcaagaccgccatcgtcgaaggcctggcctcgcggatcgccgcaggagaagtgccgccggcgctgagggacgtcgaactgttgtccctcgacatgggcctgttgcaggccggtgccagcgtgaagggcgagttcgagcggcgcctgaaaggcgtcatcgacgaagtgaaggcagcgctcaggccgaccatcctgttcatcgacgaggcccatacgctgatcggcgcgggcggtcaggccggcggctcggatgccgccaacctgctcaagccggccctggcccgtggcgagttgcgcaccatcgcggcgacgacctgggccgaatacaagaagtatttcgagaaggacccggcgctggcccggcgcttccagcccgtgcagttgcatgagccgagcgttgccgaggcggtgacgatcctgcgtggcctggcccgggtttacgaggaaagccacggtatctacctgcgcgacgacgcggtggtggccgccgccgaactgtccgcccgctacctggcgggtcgccagttgccggacaaggccgtcgacgtcctcgacaccgcctgtgcgcgggtgcgcatcagcctggcggcggcgccggagaatctcgagcgcctgcgcggcgagctggccgaaggcgagcgccagcgccaggccctgcgccgcgatgccgaggcaggcctgccgatcgaccacgatgccctgcaggcgctggaggagcgcctggcccaggtggaaagcgagcggcacgtacaggaggaccagtggagccgccagcgcgaactcgccgagcgcctgctcgccctgcgccagcaattggccagggcccgcgaggcgaaccgggaagagcagggcagagaggcggacgcggaggctttcccggccgacgagcatggcggtgtcgaagccttggaaaaggcccttcacgaaacccgccaggcactcgccgatgcccaggcccaggggcggctggtcagcttcgaggtctgcccgcgcctggttgccgaggtgatcggcgcctggaccggcgtaccggtggaacaactggcgcgggaacacaacgccaaggtgatggggttcgccgacgacctgcggacgcggatccgtggccaggaacaggcggtcagctccctggaccgcgcgatgcgcgccaccgcggccgggctgaacaagcccgatgcgccggtcggcgtgtttctgctggtgggcccgagcggggtgggcaagaccgagaccgcgctggcgctggccgacctgctgtatggcggcgagcgtttcatcaccaccatcaacatgtccgagttccaggagaagcacaccgtctcgcgcctgatcggcgcgccgcccggctatgtcggctatggcgagggtggcatgctcaccgaggcggtacgccagaagccctattcggtgatattgctggacgaggtggagaaggccgatccggacgtgctcaacctgttctaccagatcttcgacaagggcgtggccaacgatggcgaagggcgcgagatcgatttccgcaataccttgatcctgatgacctccaacctcgccagcgagcacatcgccgcgctttgccaggacggcgcgcggccttccgccgaactcctggaggaaaccatccggccggcgctcagccggcatttcaagccggcgctgctggcgcgcatgcgcgtggtgccttactacccggtgggcggcccggtactgcgcgagctgatcgagatcaagctgcaacgcctcggcgagcgtctggcccgccgtcaactggctttcgactacagccaggcgctggtggaccacctggccgagcgttgcacccagagcgacagcggcgcacggttgatcgaccacctgctggacacgcacctgctgccgctggtggccgaccgtttgctggaagcgatggcgcgcgacgagcgtctcgagcgggtccatgcgacgctgggcgagcacggccgcgtgctctgcgagttcgcctga

SEQ ID NO: 319851 - DNA, 1512 bp, Pseudomonas aeruginosa
atgttcagccgcgtaccgcaacccctggccttcgccgaagccctgctcgctcagttcggcgcgctgtcgcgggaaaccgacatcgcggccctgctgggcggtttcgcacgcgcagtcggcgaactcagcggctgcgagctgagccagctgtatctgctcgaccagacccataccgcgctcaccctcaacgccgaatgccgggacggcctgttgcaggcgctggagccgtcgagcctgccggcggactacaccggcgagcagttgctgcagttcgccctgtgccagaaccgcgtggtcagtctcgtcgacctgccgtcgcggctgcacgagaccggcttcctgccggcaggggagcagccctggctgtccctgctctgcgttccgttggtgagcccggagaaaacggtcgagggcatggtggtctgcgctacccggcgcccactggacctgcagggattcgcccatccactgggccagctgggctcgttcgtgctggcccagctgcatctgctgcaacgcctctcgcaaccctccggcgagccgcagggaccgtccagcgcaccggtggtcagcggctacgggctgatcggcaggagcgcggcgatgcgtgagacctgccgcctgatcagcaaggtcctgcacaacccctataccgtgttgctgcagggcgagaccggcaccggcaaggaggtggtcgcacgggcgatccacgagtacggcccgcggcgtgcacaggcgttcgtggtgcagaactgcgcggcgtttccggaaaacctgctggaaagcgagctgttcggctaccgcaagggcgcctttaccggtgccgagcgcgatcgtcccgggttgttcgatgccgcggatggcggaaccctgctgctcgacgaaatcggcgacatgcccctctcgctccaggccaagctgttgcgcgtgttgcaggaaggcgagattcgcccgctcggcggcaacgacacgcacaaggtcgatgtacgcatcatcgccgctacccaccgtgacctcgccctgctggtacgcgatggcaagttccgcgaagacctctactaccggctggcgcagtttcccatcgagttgccgccgttgcgccagcgcgagggcgacgccctcgaactggcccggcatttcgccgagcgcgcctgcgtgttcctgcgccgcgcgccgctgggctggtccgcggaagcgctggaactgctcgacggctatggctttcccggcaacgttcgggagctgaagggactggtggaatgcgcggtactgctctgcgaaggcgaggtgctgctggccgaacacttttccctgcgcgcgcccccggaagcggaggcgccgctcaagctgcgcgagcatctggagcagatcgaacgggacctgctgctcgcctgcctgcgcaggaacgctggcaaccagaccctcgccgcgcgcgaactgggtctgccgcgacgaaccctgatctatcgcatgggacgcctgaacattcatttcggcgatccccggacctga

SEQ ID NO: 319852 - DNA, 141 bp, Pseudomonas aeruginosa
atgcctgttcgtcactggcccgccgtgcttctggccctggccgtcctctgcggcctctccggttgcagcggcaactacaaattcaacgacggcgactatcgcccgcttggcgatccgcaggcggtcaatcgcggcaagtga

SEQ ID NO: 319853 - DNA, 1194 bp, Pseudomonas aeruginosa
atggaactggtattggaaatgctcagcgccaagcaattcgtaccgacggagctatgcagcaagaccttcggcaggaacggcggcctcatcggccgcggcggtgagtgcgattgggcgattcccgatcgcaagcggcacctgtccaagcagcatgcgcgggtcagctatcgcaacggcgcgttctacctgaccgacaccagcagcaacggcatccgcgccggcaacggcagccgcctgccgcatggcgagccgcagcgcatcgagcaggacagcgtcttcctgctcggcgacttcgagatccgcgcgcggttgctgcgcgagcccgacgagctcgccatggacgtcgggcggccgcagccggcgggcagcatcattccggacgatgccttcctggccctcgatccgttgcaggcgctcgaccaggacggtgcagatgcctacgaactcgacgacctgagcgcaatcgcccagcccagccaggaggccggggcgcgtgcggactacgcgcggatcgacatggaaagcctggtcgtaccggagctggtgcccgccccggcggctccgcaggaacccgtggacagtccgcgtccgggtcgcgacgaagccttctggcagcgtttcggccaggccctgggagtggaccttgaaggcctcgacggcgctgcgcgcgaagcgctggcgatcaacgccgccggtttgctgcggcagtgcatcggcggcttgcagcagagcctgcggacccgcagcgaactgaagaacgaactgcgcctgtcgctgagcacgttgcgcgataccggcaagaatcccttgcgcttcagcgccgatgccggcgaggcgctggggcatctgctacgggatggcaagcctggccagttgagtggtgaacaggccgtcgcacgcagtttccgcgacctccaggcgcaccaggtggcgctgctcggcgccagccgggcggcggtgcgcgcgaccctcgagcatttctcgccgcagcaactgaccctgcgtttcgagcgcgacggccgccggccgttgctggccacctcgggcagccgctggcgtgcctatggtcgctaccaccagtcgctatgccaggacgacgactggagcgagcgcctgctggcgcgtgatttcgcccaggcctacgaagagcaggttcgcctgatttccaccctctacaccgagcaccaaggatga

SEQ ID NO: 319854 - DNA, 507 bp, Pseudomonas aeruginosa
atgtctcgtcgcccgatcccgccagccagggcgctggccatgctcgccgtcctggcgctgctggccggctgttccacgctatcgccgtattccagactgaccaagctcgacctcgccctgagcgccggcgagcgggtcaatcccgacctcaatggccggccgtcgccggtggtagtgcggctgttcgagctgaagcacccggtggcgttcgagaacgccgacttcttcagcctctacgaacgtcccaaggagaccctggaccccgacctggtgaccagcgaggagctggagctgcgtcccggcgagcgggtcgaactcaagctcagcgtggaggaggggagccgctacgtgggcgtgctcgccgcctaccgcgatctcggcgaggcaagctggcgctacgtggtgccggtcacggcgaaagagctgacccgggtagagctgaagctgggccagaagggcatcctgaatgccggcgaactgctcggcaaggcgggtgacgcgcgatga
